United States Patent Application Publication US 2019/0348154 A1 - sequence listing, part 12

SEQ ID NO: 44103 - DNA, 2076 bp, Acinetobacter baumannii
atgacatcattgcccactttagctagctcaaaccagcacaatttagaaacgtatattaatagagaactctctttattagagtttcataaacgggtgcttgctcaagccaaagatattgaacacccattactggaacgtttgaattttttaattattttttcgcgtaatctggatgagttttttgaaattcgtgtggcaagtttaatccagaaaattagcttgatgagtcaggcaaccggaccagaaggtttaccgttagtagaagtattaaagcaaatttcaaaaaatgctcatgaggcggttgaagagcaatataaaatcttaaactatactttgttaccgcaactccaaggctatggcgttcattttattcagcacggcgatatattagaaaagcataaagaatggattaaagaatacttttttaaagaagtacaacctgtagttacgccaatcagtctagatccagcacatccatttccacggctggtcaataaaagtctaaacttcattgtaactttagaaggtaaagacgcttttgggcgtcaaattgatttagctattgtgccggcaccgcgttcgttaccaagacttgttaaaattccagaacatatttctggcggtgcagagcattacattctgctctctgctattatccatcagcacatttccgatttatttccgggcatgaaagcgacgggctgtcatcaatttcgtgtaactcgaaatgccgatttaaccgtttctgaagatgtagaggatttggctgctgctttaaaaggtgaattatcttcacgccgttttggccaagcagttcgtttggaagtagcaaaaaaatgtcctgaagaaattgctaactatttattagagcaattcgatttagatgcagaacatctttactacgtcgatggccctgttaatttagcccgttttatctcaaactttgatttaccagagttacgctataaaccatatcaacaagttttgcctcagcttttatacactaaaaaaccgatttttgatgtgttaaaagcaggagatgttctacttcatcatccatttgattcttttgcacctgttatcaagttccttcgggaagctgcacaagatccaaatgttttagcaattaaacaaaccttataccgtagtggtgccaactcggaaatcgtacagctacttgcagaagctgcgcgtaatggtaaagaagtgaccgcggttattgagttgcgggcacgttttgatgaagaatcaaatattgaagtcgctaacgttttgcaagaagctggcgccgtcgtggtgtatggcattgttggctataaaactcacgctaaaatgattttagtggttcgccgtgaacaagacaaaatcaaaagatatgtgcatttaggtacaggtaactatcatgcagtgaatgccaaaatctataccgattttggtttgctgaccaatgatgcggaaatttgtgaagacgtccataaaattttccaagaactgaccggtatgggcaaaatggcaaagcttaaaaaactttttcatgcgccatttaccttacattctcaactgttagaacttattgaacaagaagttaaaaatagccttgctggtaaaaaagcacacatcatcattaaagtgaatgcgcttactgaaccacagctcattagcgcgctttataaagcatcacaagctggtgtaaaaattgatttaattattcgttcaatttgctgcttaagaccacaagttgcagggctctcagagaatattcgagtacgttcaatcgttggtcgttatttggagcatacgcgggtttactatttttataatgatggcgatacaaaagtttattgtgcaagtgcagactggatggaacgtaatttgttctctcgtattgaaacctgcttcccaattgaaaataaaaaattaaagaaacaagtcattgaagatggtctaaataactatttaaaagacaatcgtcaagcatgggaattacaggctgatggaacatgggtgcaatgtcatcctaagccggaagaagaactttatattgcacagcaacacttgatgaacttagctgggtaa

SEQ ID NO: 44104 - DNA, 912 bp, Acinetobacter baumannii
atgcatatttatattttaggttcagcagctggaggcggtttccctcagtggaactgtaattgtcctaattgtcatggtgttcgtacaggtacgactaatgccaaagtgcgtactcaatcttcaattgcaatttcagaaaacggcgtagactggattttattaaacgcatcaccagatatccgtcaacaattatttgattttaaaacggctcaaccagcgcgaaagttacgtgatactggtattaccaatgttattttaatggatagccaacttgaccataccactggacttttaactttacgtgaaggctgtccaatgaatgtgtggtgtactgaaatggtctatcaagatctcaccacgggttttccggtattcaatatgctgaaacactggaatggtggtcttcaatatcatcaaattgatcctaaacaagcttttaaaattgatggtttcgaaaatttagaatttttacccttaattattcaaagcgcggcacccccatattctccacatcgccatgacccgcatgagggcgataatattgccttgattattaaagatcataaaacgcaaaaacagttgttctatgcgccgggtttgggaaagattgatgatcaaatcatgcagattatgcaagattctgactgcgtcatgattgatggcacactatggacagatgatgaaatgcagcaaaccggtgtagggaaaaaaactggccgtgaaatggggcatttatacattagtggtgaaggcggttcgttatcttacttaaaccaacttagtacaccaaagaaagtgctaattcatattaacaataccaatccgattttaaatgaagactctactcaatttgctgaactaaaagcaaatggtgtagaagttgcctttgatggcatgcaaattgaactctaa

SEQ ID NO: 44105 - DNA, 759 bp, Acinetobacter baumannii
atgactcaaacacctgaagctttaacgaccgaacaatttaaacaggccattattgataaaggtcagtattatcatatctatcatccatttcatgtgatgatgtatgaaggtaaagccactcaacaacaaattcaggcttgggttgcaaaccgctactactatcaaatcaatattccgctcaaagatgccgcgatcatggcaaattgtcctgatcaacgtgtgcgtcaggaatggattcagcgcatgattgaccaagatggtgaatatcctgatggcggtggacgagaagcatggttacggttagccgaagctgtaggcttgagtcgtgagcaagtgatttccgaagaattggttttgccgggtgtacgattcgccgtagatgcctatgtaaattttgcacgccgtgcgtcatggcgtgaggcagcaagcagctctttaactgagctatttgcacctcagattcatcagtctcgacttgagtcatggccacaacattacccttggattgatgacaagggctatgaatatttccgctctcgtttaagtcaagcacgccgtgatgttgaacatggtttaacaatcacgcttgattcatttactactcatgaacaacaacaaagaatgctggaaatattacagtttaaactggatattttatggagcattttggatgctttaacactggcatatgtacacaatgaagcaccgtatcatagcgtgactcaagaacgagtatggcacaaaggactatttaaatga

SEQ ID NO: 44106 - DNA, 285 bp, Acinetobacter baumannii
atgaataaagaacaatttgatgtaaatcttgtgcctacctggcgccaaggttatcgctttcaatttgagcctgctcaaaatggttttgtcattttatatcctgaaggcatgatcaaattaaatgaaagtgcagggaccattggacagtatattgatgggacaaataatgtttctgcaattattgcccagctcaagcaacaatttggtgatatagccgaaattgacaacgatgttattgattacatgttagttgcccagcaacaacactggattgatttagtatga

SEQ ID NO: 44107 - DNA, 1155 bp, Acinetobacter baumannii
atgacagaaggtgttggcctacctttatggttattagcggagttaacttatcgttgcccgctacaatgtccatattgctcaaaccctttagactacgcacagcataaaaatgaactgaccacgcaagagtggtttgatgtttttgatcaagcgcgtcaaatgggagctgtacaactcggtttttccggtggtgaacctttggtgcgtcaagatctggaacaacttgtggcgcatgcacaccaactaggcttctacaccaacctgattacctcaggcatgggacttaccgaacagcgtatttcgcatttaaagcaagctggcctagaccatattcaaattagctttcaagcgagtgatccggtcgttaatgatgctttagcagggtcgaaacatgcttttgaacaaaagtatgaaatgtgccgacttgttaagaaatatgattatccgatggtcctcaattttgtaattcatcggcataacattgatcagatcgataaaattattgaactttgtctagaacttaatgcggatacagttgagctagcaatttgtcagttttatggttgggcgtttttaaaccgtcagggtttattaccgacacaagaacaactcatacgtgctgaacgtattaccaatgaatatcgggaaaagttaaaagcgcaaaatcatccttgcaaacttatttttgtagtgcctgattattacgaagaaagaccaaaagcctgtatgaatggctggggtaaaattttctttacagttgctccagatggtatggctctgccttgtcacgcagcaagacaattaccgatttctttcccaaatgttcgtgaacaaagcctatcaagaatctggtatgagtctaccggttttaaccacttccgtggtgatgcatggatgccagaaggatgccgtagttgcccagataaagaccgcgactttggtggctgtcgttgtcaagcttatatgctaacaggcgacgcaagtaacgcagaccctgtttgtggtaaatcgccgtatcatcaacttattgaacaggcacgtgccgagagcgaaattgattcctctctggaaaaattggtattccgtaatagccgaaattcaaagcaatttacggttcaacaaaacattccggttcaaaatattgtagatgattag

SEQ ID NO: 44108 - DNA, 1053 bp, Acinetobacter baumannii
atgaaccatggcacatttcctgtttttgatggccataatgatgtactaacccgattgtggttaagtgatcataacaatcctgctcaagcttttattcaagaaggtttagcaggacatctcgatttaaaacgttgccaacaagccggttttgttggtggtatgtttgctattttcttgccgccttttcattatgttaagcagcatcatcccaacaaactatttgaccaagacgcatctgacttcacgcaacagcaaattgaacacatttgtttggcacagctcgatttagcaaaacaacttgccgagtactctaacgacattcaaatttgcacaactgttcaagacatccagcactgcctaacacagcaaaagttagccattgtattgcatatggaaggtgctgaagcattacaacataatccagatttactcgatgtattttatgatgccgggcttcgtagcatcggtccactttggaatagaccaagtcgttttggacatggtttaaatgccaagtttccgcattcacctgataccggagcaggtcttacaaacgaaggtaaagcatttataaagcgctgtgctgataaaaaaatggtgattgatgtttcacatatgaatgaacgagctttttgggatacagctaacattcttcagcaaccaattgtcgcaactcactcaaatgtgcatgctttatgtccacaagccagaaacttaacagataaccaacttaaagcaattaaggactctaaaggcatagtcgggttaaattttgatgtcgcatttttacgtaaagacgggcagcgtgatgcaaacacatccattgaggtacttttagaacatcttgaatatttaatagatcaaatgggagaaaatcatgtcggttttggttctgactttgatggagcactgattagtcatgaaattgaagatgtaaggggactacacctactgattgaagcaatgcaaaagcggcattactcaaatgagattatagaaaaaatttgtttttcgaattggttaaccgtgctcaatcgcatcctaggtaaataa

SEQ ID NO: 44109 - DNA, 177 bp, Acinetobacter baumannii
atgttaaagtcaattttagtattaggaacaggtattgcgattggcatgtgtatgtacaagaaaaagcaaaagaacagtaagagcttctctactgatagtgataccgactcattgattagtaaggataataataagagtaaagatgacaattcactcgataatgctgtccaggtttaa

SEQ ID NO: 44110 - DNA, 237 bp, Acinetobacter baumannii
atgtcaaagcgccatattttaaaagaagttaatgcgaaaagtatgtgtgggatggaaattgtggtagagcaaatttttgaaaatacattggagaaaaatttagcttcggctgaaatcgaacaaaactggttaccgctttccaagattgtgatttcagataaagttatcaatttagatcaagataatacctttgctcatcccagaacagggaaagtctttaaagttttaaattcttaa

SEQ ID NO: 44111 - DNA, 588 bp, Acinetobacter baumannii
atgataattgagatagagacccatccactgcaaccgtttttgccagaaaatgcccgtttattaatgttaggaagttttccaccaccacgtaataaatggaagatggacttttactatccgaactttcaaaacgatatgtggagaatttttggtttaatcttttttcaagataaaacttattttttaagtgagaaccaaaaaagctttaacgaagaagctatccgcagctttctgattgagacaggcattgctatttttgatacggcgtatcaaattaaacgcctaaagggcaatgcttcagataagtttcttgaaattgtcactccgacagacttagcggttttattgaaacagattcctcaatgccacactattatgactacgggcgataaagccacagataccttaatctcagttttacctgagaacacggaaaaacccttaattgggacatctacatcaacttattttgcagaccgcgatattaatttatatcgattaccatcatcttctagagcatatccattagctctcgagaaaaaagcagaagcctatcagaaattctttaaggaaatcggtttcttgtaa

SEQ ID NO: 44112 - DNA, 1560 bp, Acinetobacter baumannii
atgatcaatcagctatatgagcagtatagtactatggccttaagcgcttggggctttactgatttaccttcttatacagataaatatgatcctaatgagaaagatatagtgataaagacaaaaaattggttgaatgatgaggcagcagaggaaaaaactcagcaaggtctgactgcctttgtagctcttgatgacgcatttatgagtattgcatcacgaatttatttaattagaaatgccaaggaaacgattgatctacaatactacatttggaccaatgattttgtggggaaccttattttacatgagctgctcaaggcagcggatcgtggcatcaaaatccgtttattaattgatgatcaaaacggtataaagcttgatggcatattaagaagccttttacagcataccaactttgaaattagattatttaatccttataaatttcgatacttacgtgtcttcgattatctgttccgatttaaaaaagtaaatcatcggatgcacaataagctcattattgcagatgcatcgattgcagtaacaggcggtagaaatattagtagtgaatattttgaagcaagtagtaagtttcaatttacagatatggatatcttattttacggacatgcagtgcgacatgccgaagctgtatttactgatttttgggaaagtaccctaagtgtaaatgcaactgacattatcggaacttgtgctgagcaccatttaaaagctttaagagagcactatgaacaactccatcacgaagaccatagcctcactgaagataagctttacgatgcgcagagttatttaaaagagattttagagcataaccctattcaatggtctaaggcccattttgttgctgactctccgaagaaaatactgggcactgcaactgaacatgaaatgctttatggccaagtcttgtctattatgggtaaacctaagcaacacttagaattagcttcagcttattttgtacctacccaacaaggtacttattacttaaagcaactacgagttgaaggtataaaagtccgcgctttaacaaattcttttgctgcaaatgatgttgcgatcgtacatgccttttatagccaataccgtgtagaaatgcttaaaaatggtattgaactgtatgagtttaaacctgttctggaacgacgacgtagaacgtggtacgaaatcgtaacaggcagcgttataccagcaaaaggaaaaaataagtcgagcttgcatgccaagttttttgatgtagatggtaaagtctttatcggatcatttaactttgacccccgctctacctatttaaacaccgaagtaggtttggtgattgagtccagtcaattacaaactcagatttctgtcatgttagatcaacatttacctcaagtagcatatcaacttaagctaaatagccaaggccaaattacttggctagattaccaagcaaacggacaagtcattgaatatgataaagacccgggaaccagccgttttcagagaacaatgattaaagctgtctcttatttgccaattgagtggatgatgtaa

SEQ ID NO: 44113 - DNA, 456 bp, Acinetobacter baumannii
atgccacagtatctcatgtttgcggaaaatatttataacaaaattaaagatgaggaattgttttcacatgactgtattgaaaatatgaacttacttatgacatgtatacgcagagaaattgagggaacagaatttaaattaaaatataattttattgattttgttgaattgtttagtagaccattagatgaatgtaaagtaaaaatagatgtgagtttgattcctcctcataattcagaaggtgagtatattttatggttagctggattaatcgaaaaaattacagaaggtggacctaaaccacctccgcctataaagaagtttattccagagtatatgaccttgaaatctgaattagattttttacctttaaatgaggaaaaaattcaaaccgaaggtaaagaaattacggattactttaattcaaagctttataaggcaacttttaagaagtaa

SEQ ID NO: 44114 - DNA, 435 bp, Acinetobacter baumannii
atggattctacagaatacttttggcttactcggaaaaaagaacctaaaactaaacctaaaagccggccattgcctaaggcgaagcaaaaatatctcgaggctgaggcaacacttaaggaagagcttgaggatttggcgattggatttgaaagtaagtttcagccgatccataccaaacactggcgctttgattttcatatagtgaaattgcgtttgctcattgaaattgagggtggcccctggtctggtgggcgtggtggaaagctgtcaaataaagcatggagtcttaatcgatatgatcatgctgaagagatgggttacaaaatagagcgctttcatccagattctattttgtcgggatatgtcatcaactggataaaaagtgaattagcgagaattgaagatggagcaaataagaccatttccaccgactga

SEQ ID NO: 44115 - DNA, 642 bp, Acinetobacter baumannii
atggagcaaataagaccatttccaccgactgattttattgatcaagcagatgaagaagaagcaattagactaacaccagcaccagatctaaaaaaatgggttgttgctaattacttaactattggtggacctctttataaccccgatcatgatcacataggtgaactgcttcacgataatgaagaatttttagcattcgcgtgggcctcttctgcatataaaagcaagcaagctatggtgttgggccagtgcgaaaaagtcatgttcaatgtcggtggctggcgtaaagctcgacaagagcaacagatgcgagactggtttggttttgtacctacatatttaataacggtcgatgcatctttctgtgagcgtgcaaacgatacagagttctgttacttgcttgaacatgagctttatcacattggtgtgatgaaggacgaagacggcgaaatcatttatagcgatagtacggggctgcctaagcattacttagctggtcatgatgtagaagaatttgttggcgtggttaaacggtggggaccaagtaagaatgttaagcgacttattgaagtcgcaaaaaatccgccgtttgtttcgaatcttgatatttcaaaatgctgcggaaactgcgtaatcaactga

SEQ ID NO: 44116 - DNA, 516 bp, Acinetobacter baumannii
atggctgcacttaaagaacaggtaaaaatatttattgttcaagcgcttgcctgcatggatacccctcaacaggtagctaatgctgtcaagcaagaatttaacattgagattgatcgaaaacaggtacaactttatgacccgacaaaagcggcaggaaagaatttaagtaagaaatataaagacctttttcataaaacccgagaggactttaaaaagaatgtttatgacatccctttagctaataaagcctatcggcttaaagaacttcagaagatttatgaagactggaagaacaacaggcttatgaagcaaggggttattaaacaggttcgggaagaaatgcagggttatgacctgatgttattaaatcttgagttaaagcaacttgagattgaaaagttaagagagggtgaaggtgatgaagatccaacaccagtcaaggtaactattcaagttgtggatgcgagtaaaaaagatgccgaacatcaatccgacactgaatgtacctcaggctaa

SEQ ID NO: 44117 - DNA, 1293 bp, Acinetobacter baumannii
atgccgaacatcaatccgacactgaatgtacctcaggctaattttttgcagatggaaaagaagttccgcgcatttgtcgctggctttggatcgggaaagacttgggttggatgctccagtttatgcaacaaagcttgggaattccctaaagtacctttgggttattttgctccaacttacccgcagattcgcgacattttctttccaactattgaagaggttgctttcgattgggggcttaaaactaaggtttatgaaaccaataaagaggtggatatctattatggtcggcaatatcgaacgacaatcatttgccggtctatggagaaaccagcaacaattgtaggttttaaaattggccacgccttgattgatgaacttgatgttatggccaaggtcaaagctcaacaggcttggcgtaagatcatcgcacgtatgcgttataagcaagctggtttgctcaacggtattgatgtggccactacacctgaaggttttaagtttacatacgagcaatttgttaaagaggcaaataaatcagaggctaagcgtaagctatatggaatgattcaagcttcaacttatgacaatgaagctaatcttccagatgactacatatcatcactttatgagtcttatccgccgcaattaatttcagcttatttaagagggcagtttgtcaatttaaccagcggtgctgtttaccccgactttgatcgagttctaaaccacacggatgaagaaattaagaaaggtgagcctttactcattggtatggattttaacgtgcttaaaatggctgctgtggtttatgtcattcgagaagggaagccaagagctttagatgaactggttggcgtgagagatacaccgacgatgtgtcaattgattaatgagcgctttccagatcacgatattaccgtgattccagatgcttcaggtcaggcaacatcttcaaagaacttcagtgaatcagatcatgcaatcttaaagaaaaatggattcaaagttgaagtgaatggtgtgaatcccggaattaaagatcgtattactgctgttaatgcacaaatcctaaatgctgagggtgaacgacacttaaaagtgaacacaaataagtgccctaactttacggctactttagaacagcaagtctatgatgattttggaatgccagataaaagcgctggtttggaccacgttggcgatgctggtggatatccaatagccaagagattcccgatcatcattcagaaagtatttaaacggcgcacaatcgctggtttttcccgttaa

SEQ ID NO: 44118 - DNA, 1341 bp, Acinetobacter baumannii
atggcagttactgataaacatccgcagtatattgctgcacaaaaaagctggttgattatgcgtgacgccgttgctggtgaagagcagatcaaacaggcacaaacaaagtacctagctaaatcggccggaatgattgaggctgaaaagcaaggtgatacgactggagagatttataaggcctatctaagtcgagctcagtatccgctatgggttcaggacgcattacgcacaatgatcgggttagtttcaaagcttgagccgaatattgtgattgaaagttctctacttaaaggattgatagagaatgcaacaaatgacggttttgggcttaaacagctctttattcgcatttgttcagagttgctagagtttgggcgctgtgggctgcttgtcgatgttgatgctaacggagtgccatatttcgccttatatgatgcgttatctattatcaactggaaggaaaacagtatcggtggtcgtaaagatctaaaactgttagtgctcgaggagcaatttgataatagtgaagatgaattcgggcacgaaactaaaacggttcaccgcgttctatctatggatgatggagcattagcggtccgattgttcgatggttcaaatgtggaggataaaactcccgatctcggcggtaatcaactttctttcacaccatttgttttctgcggtgccactagtaattctccggatgtaggtaccataccgcttttgacaatggccaaggctgctctgaagtattaccaacttagtgcagattattaccagtcacttcaccatacagctcatccgcagccttggattaatggacttgagggtgatgaagatattagcgttactggtgttatggctgtctggagtcttcctccaaattcacaatgtggttatttagaaatttcaggtaacggcattgaactcactaaaaaggaaatggatgcgcaaaaaaattcagcattagaagctggggctaaagtagttgataccaatacacaggaatcaggtgaagcgcgccgtgcacggcaagacgatcagcaagcaagtcttcacagtatcgtgatgtgtgcagctgcagcaattgaacaagccattaaatatgcagcgcagtggttaaagctggattcgacaaaatattcatttacagttgaacctgagtttattgtgcaggtcacggatattaatcttgcaaaacagctttatgagggtgctatttcagggaaaaactctttccgcacatattgggaatacctgatgacaggtaaattaccagctcacgactatcaggaagaagtgaagcgggttgaaggtgaacaggacagtatgccgttgtag

SEQ ID NO: 44119 - DNA, 1107 bp, Acinetobacter baumannii
atggcttcaaaagaagataaatcattgattgaagtacttacccaacatcaggcgtacttatatcgggtgtcttctcaatctgttaatgagctactaaaaatctttaatgatgagtcaatattaatgttggcaaagcttcgggatttgcttgatgaattaaatgattctgaaaagatggctctagcaagtggacagtacacaacgtcaaatctgaaggaagttcgtgatctgattgctcagtggtttactgcaataaacactgcattacctgaagctttcgctgtttctgctactgccttggctgtttatgaagccaattacatggcgaagctatatggcggcaagatcaaaaaaccaaatggtggaaagctatatgcagcagctaaaaaaataccattggtaggtggggctcttgttgatgatctgctatcaagaattgctgaaaatgcccgccaaaaggttgagtatgcaattcgggatggcattaactcaggtaaaacaaatcaggaaatagttcagcgtattcgcggcaccaagcgccttaattatgaggatgggcttttaagtagctctaagacggatattgaacgtaccgtaagaacagttcgtagtcatgttgctaatcaaacgtatttagatactttcaaacagttaggttttgagtatgttcgttttattagtgtattggatggaagaacatctaagctttgtgctcatttagacggtactgtctggaggattgatgatccggcaaaacgtgtaccgccgttgcatcctaattgtcgcagcgaactagtaccagttaaaaaagatggtcaacttatcggtgaacggccatttgtaatggacgaacgtagagttaaagacatccccaaagaagagcgaagccagttaataggacagttagatgcaaacaccacattcaaagagttctttaagaaaacagatgatttctttcaaagggagtggctagggccaaagcgctttaagctctataaagatgggaaatttgattttgataagttctttgatcctgaaggccgtttctatagcttagatgatttgagaaagttggatgaaaaagcttttaaaaagttgggtctgtaa

SEQ ID NO: 44120 - DNA, 429 bp, Acinetobacter baumannii
atgttatattttttaaaacatcagaatttatacaatatgaaaacaatagcttttgtatgtctaaccctaatttccatcacttgtttagctgaaccaagtcaaaaatatcttaaagaatatgatcgattgtctgaagctttggagtcagcaatggcaaatgcatattcttttgatcctgcaactggtcaagtaaaacaggctactcaaggtttagaagctaaaaataatttatgtagagctgcccaggcgaaactaaacctcaccacgtttttaaaagacaatttagaggaatctaaagagctttataaatctattgatggtgcagagactctagataaaaattatcttagtggacaacagcaggaacaacaaactctcgtttcaaatttgaaaaaagaccttgttggaacagggtttaaatgtgagtaa

SEQ ID NO: 44121 - DNA, 243 bp, Acinetobacter baumannii
atgagtgaatcaaaagttagacatttggtacttaaaagagtttcagataaatcttctcatcttgctctttgtgacgaggaaacaggtattccattagctggattaaccgctgtaaaaatgaattgtagtgtttttgagggtccagcgactatcacagcaacatttgatgtaggcggtcctcaaggaatccgcttggttggtgacgaacctagacaaagggtttggggtgcaaaggaaacgtag

SEQ ID NO: 44122 - DNA, 153 bp, Acinetobacter baumannii
atgtctgaaaagcaaatcaatatgtcagatgctcaatatattttgagcacaaaattaattctggtgccttttcttcaaattaagatttcaagagccatggcaatttatggttttacttttgcaagattaaaagcaatcgcactcatcaattag

SEQ ID NO: 44123 - DNA, 315 bp, Acinetobacter baumannii
atgatcaaagaagtaacagagcaagagttagctgaaaagtctgtggcaccccgagtaactaaagcgcaaattgatgcattgatggagcgtgttacatatacggttgagcaacgtcccggaggcacgacatctacttttgtacatgcatttttagatgaaaagttttttctagcaacgggttttagtgcatgtgtgaatgctgaaaactttgatgctgaaattggtgagcgtatggctcgtggaaatgcagaaaagtcagccgaaaataaactttgggagctagaaggctaccgtttatttgcaacaaatttctaa

SEQ ID NO: 44124 - DNA, 792 bp, Acinetobacter baumannii
atgtcattgccatttattgttgattcacttgatgcaatcaaagaagaacaccgagctttatatgtcgaggaaaacgggaagtttcgccttgatttagaaggctatgaagatccaaaaggtttgaaatctgcacttcaaagcgagcgtgaggctgcaagaactgcaaatcgacaacttcaggaacttcaaaaacaatttgagggtattgatcctgaaattgttaagaaagtctttgctcaacttgaccaagatgaagaggctaaattaatcgcagacggcaaggttaacgaagtgattcagaagcgtaccgagaagatgcgtgaagaacatgaaaagttactgaaggctgaaaaagaacgtgctgataaagccgaagcttatgcacaaaagttcaagcaatcagtgattcagagccaaattgtacaggctgctattgaacttgaagcattgccagaagcgactcctgatatcgcctttttagctcagtcaaaatttgcattagatgaaaacggtaaagctgtggcagttgatgaaaatggcgaagtggtgattggtaaagacggtcagacgcctatgactccaaaagaatgggttgaatctctacgcgagcaaaaaccgtattactggcctaagcctaatggcatgggcgcacctggtagcaacaattcaaaaggtcagccagacattctcaaagcagatggctcggtaaatatgaccaaattggcgcaattacgaaatgaaaacccgcaactagctaaagagctagcggcaaaacacggtattaaactttaa

SEQ ID NO: 44125 - DNA, 951 bp, Acinetobacter baumannii
atggctgagacaaaaattgctgatgtaatcgtacctgagttatttactccgtacgtattaaataagactgccgagaagtctgctttatggcagtcaggcattgttggggagcttgatgaaaaagttgcttttggtacagaaggcggtaccacagtaaatattcctttctggaatgatttaagcggtgagtctgaagtactttcagattcaaaacctttatctgtaaataacatcacttcaggcaaggacattgcgattcttcatgcacgtggtaaagcatggggcgctaatgatttggctaaagcattatctggtgacgatccacttggtgcggttggtgatctggtcgcagattactggtcgcgtgaatttcaggggtttaccgtaaatacacttaaaggtgtatttgggtctgcaagcatggcaggtaatacccatgatatttcggctggaactggagctgcagctgtaattgatggcgtatcttttgttgatgcttcttataagttgggtgatgccgtagataaattaacggctattgcaatgcactcggcaaccatggcggctttagctaagcaaggcttaatcgaaactgttcgagatgctgatggtgtggttctctacaaaacctttatggaccgtcgtgtgattgttgatgatggtatgcccgttgaaggtgatgtctttacctcattcttgtttggccaaggtgcgattggtttccaagatattggcgcaccagttggtgtagagactgatcgcgacagtctagcaggtacagatattcttattaaccgtcgtcactttgtattgcatcctcgtggcattaaatgggcaggtgcaacgggtatcgcacctaataatgccggtcttgctacgtctgataactgggaacgtgtctacgatcctaaacagatccgtattgtggcattcaagcacaagatcaaataa

SEQ ID NO: 44126 - DNA, 336 bp, Acinetobacter baumannii
atgggactttcatcatttaaccgtgcacgggaaagacaacaaatgacagaaacaaaaattgctgagcttgaagaacaactggcaactttgaaaggtgaattcattgctttccaaaatgatcctgaagcaatgaaagcacgtattgctgaacttgaatcaggtgaaggtggtcaaacacctgaagatgaccaaaaaccaagtgatactcaaccacaaccaattaactatgctggtttaaaagttgatgagttgcgtgcggtcttgactgaaaaaggcattgcatttgaagcaggtgctaaaaaagatgaacttttagcattaattccaaaggaataa

SEQ ID NO: 44127 - DNA, 381 bp, Acinetobacter baumannii
atgagctttatcactgaacaagaagcgatagaacatgttgaaggctttgatgctttatctgccagtgataaggctcaataccttcagatggctgaagcttatctattagcacgtaacgttaagctttatgaagatgctacccaagtacctgaacctttaaaaacggcctcctatcaaatcatcaagggcattatgaaaggtgatctatatcaagggcaagaacaggcactaaaacgtaagaaagtcaaagctgatacggttgaaactgaaaaggaatatcaggacggatcagtaaaacttagtgcgattgagcaattcattcttgatttgattaagccttacagcaaacgaaaagctgtattttttgtcaggaaaatctaa

SEQ ID NO: 44128 - DNA, 369 bp, Acinetobacter baumannii
atgagtttacgtgacgaaattcaggcagatattgctgaagcatttaatgatgatttagcggatgccgttcatacctttacatgtgagcggatctcaaaaacaaattgggatcctaagactgaaacgtatgttgaagttaaagaaaactattctggccgtggtgttctttttggctcatacagtcaatatgaaatacaaacgcttggagtattggccacggataaaaaggcgaccgtgcttcaaaatgaagtaactatgactccaaaaattgatgatgaatggttaacaagcttaggctcattccgggtaattcatattcaacaggatccagcatctactatttggaaatgtcagttgaggaaggtttaa

SEQ ID NO: 44129 - DNA, 672 bp, Acinetobacter baumannii
atgttactaaaaggaaataatgctgaaaaaattgcgactaccttaatatttttcataattttgctagtaacttatatattagttaacttagcctttagatcaatcacgcacacaacactagaaaatatggtgaaagatggaatgagcttctcagctacagctatagctcccatcatagctattttgttatttagtgattggcgggtacaacatttagctatcaaaatggagaccgcagctgaaaaaattgtaaaaaatttactcgatattaattttgaaatagatattttagatgcagaagttagaaaggatattaaaaacataaatgttgaagatactcaaaaaataatttttgatctgagaaagcgcttaattgaacaaaatactcaattaggtattacgtttgatggtgaacctaaaacaaatgactttattaatcagattaatgatttaatgtatgagatgttaaattatttaaatttaatgaatattgctattactgctcacgaaaaacttaagaataatacgacaatttttgagagtgatgaagttaaaacgttttatgcggacaaagagaatctctatttcaaaaagtcttttgaaagatttactggatttgtagaaacgctttctacaataaataattccttgcgagaatttaagattaaataa

SEQ ID NO: 44130 - DNA, 408 bp, Acinetobacter baumannii
atgataagcacagattacgtacctttatggcatatctcaccatttcaacatgttcaatacactcttgctagaagtcagcttcacatggatctgttattcgaggacatgaataacgttgataagttcttgtctactgaaggtgctgctgcacaagttgatttttattctgacggcgcgtatgcagttgttcagttgggcgatacctcagaaagaaatttaattgaagtgtatggattgcttttacataaagctgttcatgtctggcaaaagattaaaaagctaatgggtgagcgcgagccaagtgttgagtttgaagcatattcaattcaagcgatcgctcaagacctttttaaaatgtatgaagaaagcgaggtgaatgatgggatggaaggggaaaaagccaactga

SEQ ID NO: 44131 - DNA, 369 bp, Acinetobacter baumannii
atgggatggaaggggaaaaagccaactgaatttagttttgatgtggctaaaacagcagaggaaaaggtaaagaaaattacaatggatgctgttcagtctttagtggtttcaagtcctgttgatactggcgcttatcgtgcttcgcatatcgtttcaattgaatctggtgattatagtgtccgtggacctgaaacaaatgctattcaggatgcagctattcaagctgtaaagattaaattgggcaatttagtttatatccagaacaaccagccttatgcagagcgcttagaaaatgggtggtctgatcaagcaccacaaggaatttacaacaccacctttacctttatttctcagaagtatggcggctaa

SEQ ID NO: 44132 - DNA, 399 bp, Acinetobacter baumannii
atggcaatgactttagagcagacaaggcaagctattatcgatcgtatgcaagcttttaccggtattacgcaagacagaatccagtatccaaatttaccaggctttaatgtacctaaagatggtgtttggtgccgcttaacgattgcaggtggtcccagttttacttctggcattgcagataagccatgtactcgccgtaccggtaatatcatgattcaatgctttgcacgtcccaattcaggaataatcgaaatcacaaaattgagtgatgcattacttgctcattttgaatatttctcaatcgaacatttagaatgtttgaatggccaatctatttatgcgggtaaagatgctgacttcattcaatacaatgtatcaataagttttttagttaactaa

SEQ ID NO: 44133 - DNA, 354 bp, Acinetobacter baumannii
atgagcaattttgtttttaagcgtggtgacactttcaacttaaatcttcagctagttgatatggatgaaactttgcaatatccacccgatgatgttcgccgtgcaattgatctgacgggttatacctttacttcacagattaaagctttggctaatggagcagctgtggctaccttgacttgtgctgcattaaatcaaagtacacagaagggatggctgaatattaaatcaggtgcaagtacagcagcttggcctttaggtctgtgccagatggatattaaggctgtcgtgaatggagttacccagcatacagatactttgattttccaagtgattgatggggtaacagcataa

SEQ ID NO: 44134 - DNA, 1305 bp, Acinetobacter baumannii
atggcaaatcttgtttttaaatttagttgggatcatcggccattcccttataacgcctcacaaggcaagcgacagttcatgttgccatttgcatctggcatcccaaacttaaacccacaactttcacaggtccaaggtgctggtacagcagctgcagcaaatcttactacttcagtttcagatgatacgattgggagagtgcttcgggttggtgattttggtttagggaaaccattaagaaacacagatgttaatggaagtgatctgaataatatgaccaccgtggggttctatggcaatgatacatttgccagtgcaactcttgctttaaactttcctgaagctggtactgttgggtcgttgcttgtattgaacgttgctggctctaatagttaccgtaatcaggtgtatatttccgcatcaagcagccggatttggtttcgctctacctcagatttaaccaactggacgccatggaagcgattactggatgccagctcaacagagtttcagcgaatcgtgaataatggttttgctgcaaataaaaacttggggtcaacagcattatccggttttgatgcaggtggttcatttattggattacaaggcactagtgcaggtgcggcagctgcaggtgattatcctacggcacaggcccagtatattcttgggctgaatgcgggtagtgcaagcgaacatgctgctaatttaagtattgcaacttcagcaacatatataggctttagacgaaaatcatatcagggtacttacaccccatggtacgccttgcgtggagaacacaatacaaccgtggatggttcaggttttattaaagccgcttcgccagtcgttaagcttttccaaagtcatattgagctaaataacgatgcagctaagcaaccaatcactttcgataagttgggtactggtgattacttagtgaaaggctcattgggttttgctcaggaaggctggtacattgaagtacctaaggatgccaacggtaatacggtagtagcagttgaatattcaaccttagaaaatggtgatctttcaattaaaacttataaacgtaagtttgatgtggaaaaggcagccattgtagctgatctcgaaaatccacttgatattccagaaggccgctggattgatattcgtctgcatgaagaacctgaaccagagcctgaagagccgttgagtgaaacaccagtggatttccagcctactaacttatctcaggcagttgctgcagccatgaatggcgtggaaccgccagaaatctcagacacagacgaaacactttaa

SEQ ID NO: 44135 - DNA, 918 bp, Acinetobacter baumannii
atgagttcaggcgcaaaaattcgattatatgcttgtgaagaagcagttttaggaacaactccagcaaacccgatctggtacacagttcgccgtgtaagtgatggtttatctgaaaatgtttctactgaagaaagcagtgaagtggttgattcacgttttcgacaaggtggggtagttactgaagcagaagtagcaggtcagttagagtttgaattatcacttggaacatttgatctattcctaagtgctttagccttcaataattgggcgggtaacgctttaagttttggtggtacggtacgtaagtcattaacgctggttaaagttttcgaagatgttggccaagtctttatttatcgtggagtacaggtaaataccggtgaaattaccattcaaacaaccgggaagatcactggtaactttggtttagtaggtagctcgtttactcgtcagcaaacgaaccctgtagtgaatccggttgcagcttcgactcgtccgcttgtcagtatgccaaacgtggaaaacttgcttattaatggtcaatcaattcaaggtaaagcgtgcatgcaatcgcttacgctttcaattaataacaaccttgaagcaatccgttgtatcggctcaggcaaatacacaccagagttctacattgaaaagatgatggatatcgaagcaaatgcttccttcatgttctcggcaactgcggcagggtggattgatgccattaaaacccgagatgtgtttactctgacctttgatattaaagacagcaaaggcagtaaatactcgtttaacttccctcaattagaagtgatggaagccaatcacccggatggtgggggtgatgacatcattactgtagacatcaactttgctcaagttcgtacagctccaacgattgtacgtgctcttgtgtaa

SEQ ID NO: 44136 - DNA, 552 bp, Acinetobacter baumannii
atgggctttttaatttctaaaatttcagaggttgctatggctttaaaagttggaattattaaaagctcggacgtatcaaaatggtgtgaatataaggattctgatgggcaagtacaggctgagttcaaagtccgtggtatcgcttataagccttttcaggtagctatagaacgtgcagggaaccagatctcgtctaaaggctacgatgtgatggtgaaagatgaagatgccaagctttaccatgaattgttaatggatgcatgtgctgcccatttaatagaagactggaaaggtgtggtatttgccgaagtagtggatggtaaaacggtcgagaccgaaaaaccgtatacacctgagaatgcatcaaagcttctaaatctaggtgacattggcatttcgatctggttattcatcaaagagcaggcacataagattcaagaagaagcagatcaagacaaggctttaattctgggaaagtcatcgagctctacaaataccaaaaaacgtatgcgtcgaaaacgccgcacgaaatcgaacaaatcaaattcttag

SEQ ID NO: 44137 - DNA, 198 bp, Acinetobacter baumannii
atgaacttttcgtttatttttaacaattcaaataaaaccgataacaaaaaagaagctagcaagcttatgtctgatgcagcggattcttttaaaagagctatgcaagaaagtgctactcagtataatgaccatagaaaaaaagctgaggagcaaataaaccgtggcgcaaaactcaccaaccacagaatcaatctttga

SEQ ID NO: 44138 - DNA, 855 bp, Acinetobacter baumannii
gtggcgcaaaactcaccaaccacagaatcaatctttgattttttttacctagacaatccaaaaataaaatcattttatgctcagcttaatggactaggctccttgaatgctcttaaaaatacaagccaaattggagacacaaggaagttggaggctacagttggtgttcctgccgtaacaggcggaaaacttgctaatgaccacactgtaaacactacttcagagcatctttatgatggtattcctactatgccaagagagatgattaaccggttagatgaactagggttcattaacagagagttaaatgatgacatgctgggaaatcttgtattgcttgagggacgcttaggggtcactgatatcggtgtagttaaggagttggttgaaccagctttaaacttttacatcaaggacttaaccaaaaagaataccaaggaagctcgggaattagcaaaagcattaaaagaaaacaccaaagatgcagccaatatggttagaggaataccttttgggcttgaggccaagctacttcatgacactggacaaaaagatgaagaaactggtgtaagtttgtgtaatgaagtatggatgacattgaatagggatgaaattgtaggtaccccaactgatttgaattttaaacatagtgagtttctagctggtagctggtatgttttgggtgtattggatgctttaccttttgataatttcacttttaatacagatccaaatgaatttagagatggtgtggtcagtatgataaaaatggtgagagagtttgctggcagacctcagaccgcctacggtattaccccaatagcaatatttagagttttgaaaccaaaactctag

SEQ ID NO: 44139 - DNA, 525 bp, Acinetobacter baumannii
atgaaaaaattattggctactggattattgagtttgggattagttgggtgtgctactacccctcagcaaccatcagaacctgtaaagtttgaaaaggtttatcaaatagatggattaaagcaaggccaaatttatgatggcgcgcgtcaatggtttgcaacagcttttcgctcagcaaatgcagtaattcagtacgaagataagactacgggttcaattattggcaaaggtaatatgccataccgttgttctgggtttgctgattgtatgactgttactgctggtgatcgagtagatttcacagtgcgcgtagatacaaaagatgggaaaatgaaagtaagttacgataatcttactcactataaaccagcacaggtaattagcggagttcgctatagtgaaaccaatcgtactattaccgaaaattatccatcagctaaaataattatggatgaattaaataaatcatctgatcaaatggctgaaaagatcaaaactcaacaaaaagttaatgctgattggtaa

SEQ ID NO: 44140 - DNA, 4524 bp, Acinetobacter baumannii
atggcacaagaatcgcgtttggttgttgttattgattcgcagaatgctgtacggaatgctaaggctttagctgatgaaatgtctaaaattaccgaaaaaggtgattcagctacacgtacttccaaagaactgggcaatcaaatcaacgtcacaaataatattgttcaaaaatttaataccacggttaacaattcttcgtctgtggtaggtaaaactggtgaagccactaaacaagcatcgcagcaagtccaaaaatatggacaagaaataaaaacgacaacacaagaattagacaagcaagaaaagtctgctcgttcttacagtacagctataaagtccttagcaggatatatggctggtttagtaacgattaatgctgccattaataatatggacacttatacgggccttcagaaccgtctaaagctcgttactaataatcaggctgaattgaataaagcgactgaagatacattccagatcgcacaaaaaacctattcagcttgggattctgttttacaggtgtaccaacgttttagtgacaatgctcaaacactgaatttaactatggatgatacggctcgcttaactgaaacggtatcaaaagctgtagcaattagtggagctagcgcagaagctgctgatgccgctttagtccaattcgggcaagctttagcaagcggcacattacgtggtgaagagcttaactctgtaatggagcaaacaccagctttagcaaaagctattgcacaaggtatgggcatcaccgttggtcagctacggtcagtagctgcagaaggcaaaattacttcaaaagaaatcgttaaagcacttaaaaacgcccaagacgatgtggatgcacttttcgctaaaactgatatcacaattggtcaatcactcactcttttaaataacgaaatcattaaatttgttggagaggctggtaaaggtagtggtgcagcacaggtattagctggatccattcaaactcttgcaagtaatttagatttaattgctgatggggctttggtcgttggtattggttatataactcgtgcaattttaattaagagtacagcggttaaagaggggatggcatcaacattagcgagccggcaagcctctgtattaaatgctcaagcagaatatgcagaagctaccgctgctttgaatgcagcaaaagctcatctcgcgaatgtgcgagcaacaaatgccgaaacccaagctaaatttggagcaactgcggcagcaactcgatacgcacaagcacaggcagcagtaactgctgctacaaatgcacaaactgctgcgcaaactaggctctcagcagcttcttctttagttggtagtattggtagtcgagcattaggacttatcggcggaccaattggagcaattaccctaggagtatccgctctagcagcaacatatacttattttaaaggtaaggcagaagaagcgaatagaacacttgctgaacaagccgaagtggctaaccgtacagctgaagaattaaaaggcttaaaaggtgaggcaaaaactaaagctattaatgacttaacaacggcctttaaagctcaaaatgaggagttgaaaaaaacagaaatggctgttggttcagctttaattgatattcaaaacttcggtaaaggtaatgttgaacttacaaggatttctaatgaagctcgattgggcacaattagctacaaggaggctatggagcaacttgctaaacagaagttacctccaagcttaagagatgcattaaaggagcaaatcgacaaatacaatgaggcttatgaaaaagctgataagaccaaaacagccattaaattgtttggtattgaagttatcttaacaggtaacaaagcacaaaatgcagcaattgagcagcagaaacatgctgatgctatcaagaatacaaaacaggctgcagatgaggctcaaaagtccttacagaaattgtatgcagataaattatgggatacgcaatttgtcgagatagtaatgaaaaagggtttttctgagtctcaggctaatgatttactgaagctttataaagattcattagctaagggtcttaaggcagcagaccgagaggctatgaaagcattaacggatacttggaaagcagaagaatcaatcaaagccatcacggatgctagaactgattctatacgtgagcaaaacaaggagcttaaaaatcagcaaaaagtactaaatgtaaatgcgaaagttctagcaaatgcttcaaaattcggctttgcagatctagagtctaaatacaaacttccatcaggaacattatccgcgattcatatgatcgaatcgaaaggtaatgcaaaagcctataacaaagaaaccggggcgactggtggatttcagtttctcgaaggtactgccaagcaatatggcgtaaaagaccgcactgatttagcacagtctgctgaaggtgcggctaagtatatgtcttatcttttgaagctttttaaaggtgatttagaaaaggctgtacgtgcataccatgcaggtgaaggcaatgtaatgaagggtaaaggtattggtaaaaataataatcaatactggaaagactatcaaagttatatggctggtattaatggctattctgctggcgatatttcatcaaaagactttgataagcttattcaagatacaactaaaatggctgaggagcaggcaaaacttcgccttcagttggagaatgaggttgctaatcaagtaacaaagattaggaatgatctggccaaaaaacttgaggatgttgataaagctaactttagcccagaacgcaaggccgaaattaaagcagaacttcaagcacgtgcagataatgatattgccattgctgagcaagctacaaagactaagcttgattctttccgtgatttcaccaagtcggaagagcagcttttaaaggacagttttgcaaaacgtcaatttgaagccgaacacgacttagagatgacgaaagaacagcgtaaagaagctgttaatttgttagctcaacagttgcaacaagaattaggtttactaaaacttgctcaagagcaacgtttgtttcaagctaaattattcttgctttcagaaactgaggcaatgcaagaacgctaccgattggagcgagaagaaattgctaaaacagtaaaagatgaggaggaaaaacgtaagcgactggcattatcacgtgatcaagaacgattagaagcacttgatcgtgcagcaaaagctggtcaagcatggggtggtattcaagctgatatgaatggcagtggtgagttctatagactagatcaagaacgatctagccgcctaagtgccgcgacaaatctacttgatagtcagcaaggtgtggttaatttaaatgaacaaaattctattgaggctttaaatgcacaatttgagcaacagcttataagtcagcaggattacgaaaaccagaaaacagctatcattcaagctgctcaagatcaacgtaatcagattgctgccgaatatgcaaagaatgctcaggatattgaagataagtatcagcaagaccgcttgaacactcaaattgcatttggtggccaaatgatgggttctcttacatctatgtttggttcaatgtttggagagcaatctaaagcttacaaaatcatgttcgctgcagataaagcttatgcgattgcagctgcgggtattgcgattcagcaaaatattgcagcagcttcaaaagctggttttcctcttaacattccattaattgctggagctgttgcacagggtgcaagcatcattgcaaacatccgggcaatcaaagatcaaggttttgcggaaggtggttatacaggtcgaggtgggaaatatcagcctgctggtattgtccataaaggagaggtggtctggtcccaagaagatattaaacgctgggggggagttggtttagttgagaaaatgcgtaagagtgcaaaccctgaagcttttctcaataacaatgcctcagctgatagtgtcatgcgccgtgcaatgatgagctctaatgcctttatagaaagccaaaagcaagctgacatctttaatcaaccggttcaagatactcagattatctataaagttaatagagacacacctaagttggcgtcttcggcaaattctgacctattccatgacggtaaagtctatttctcatccaatggtttagttcaggatcgctcaaatctggatgatgttcaggactttactttaggaagtacttcacgccctcaagctgagattatgccttcaattgagccagctttaccgacaatcaattttaaaattgaagtgattaatcaggtgagtggggcgacagttgaagccgaacaattggatgagaaaactgtccggatcattgttacagatgaactggataagcagcttccaagaaaggtaccgaaacttgtaagtgaccaaatcgcaaatccaaactcaaccattagtcggtctttgactgagaatacgacagcaagacggaatcgtacttaa

SEQ ID NO: 44141 - DNA, 588 bp, Acinetobacter baumannii
atgaaaaaaataattgtaatttctacaacacttttaggccttacgggatgtgccattcctgcggtaaataatctcgtaagatctacaaatatgtatcaagatgaaatagcaggtgatacagccaatttaagggtttatagaagtaatgtacccatggtgcagttctatattacttatcaaaataatgagggtgaaaaaatttcaaaaaacctaataactaagcagatttcaaataatttaacaaagtatggctctatgcatgagcccaaaaaattaaatatgcctaaacccacaatcagtttaaataatggtgaagagttttttgagtttaaagtacccgcaaataagaagttaactttcaggcttacttctgttattgggtcaactactatgtatagttgtgatgtaaaaatggactatcagttggaaagaaatggaaattatgaattgatccgtttaaaacagatcaaagattttgtgaatccagctttactgactgaaccatctcaagatggagcttactgcaagtttgtagtgaaagagatttttgaagatggtaaagaaactattattaaatcgatttcttaa

SEQ ID NO: 44142 - DNA, 399 bp, Acinetobacter baumannii
atgtacaagttaaagctaaatcctcagaccagcggctatggcgtaacaccgggtgatgatgtaaagcgtcaacaaatggatggtgggcgtggacgctattacatcgatgtaaaacgtaatagccacattgttgatgttaactggaatttaagtaaaaccgatttcaataaaatgatggctttctggcggatctatcagaataagccagcctcattctatgcggatctggtcattgatcagggaacacgtcagcaatatctatgcaatttcattccaaactcgttcaagaccaatgaagtgaatggcaacctttaccgggtaaatgcacagctcgaagttgttcaaaaccagcctaaccttatcgctgatcaggcacttatcaaagattgggaggtctaa

SEQ ID NO: 44143 - DNA, 507 bp, Acinetobacter baumannii
atggataacgaatatgccaaattctttttcaatcgaaaagtagatgtttatcaattggaatgtattgaactatcacacccttcttttatgaatacttaccgggtagtccgtaatgatgatcgcggggtgtatgttcagcacaatgaaggcgcggggcaagtattttacgaataccttcctatgacaattcaaagatccggaatgctcggtgatctggaccagactttgaccgtttcaatatctgggcttggtgatattttgccggatgagtttgaacgggtaattgaaggccaatatcccgatgtaaagccaacagtaaattaccggatttacagttcagacaatctgaattctccaatgttttatttactcggactgcaactctccagtgttgcaatgaaccataaagctgtgacattcaaggctgaatcaccaagattaaatactgcgaagactggagatatcttttcgcttgatcgttttagtggtttgaagggggctatatga

SEQ ID NO: 44144 - DNA, 363 bp, Acinetobacter baumannii
atgaagagtcacgatcatttgctcgataagcaatatgacgaggaacactacaactgtgttcacttcgcgcatgaagctgcaatggatctatatgatattgatcgaggagaggcgcttgagttttttatgaagcccgtcaaagagaaggtatttctgccatcaagattgaagttactaaatccattgcccatgcccaaggaaggctgcatagtcgcctttcactctagataccgaaacaagcccccacatgtggggctttttcgtttggggcgtattttgcatttgcaggaatcaggcgtttcatggatgccaattcaagtcgttcaagcatttggatttaatcgtgtgagtttctatgattaa

SEQ ID NO: 44145 - DNA, 3447 bp, Acinetobacter baumannii
atgattaagattatttataaacaagaccctttatccgaagacaaaacaattgaacacgctgaaactttgggtcaatggcttacttcaaaatatgaccatatgcctgagcatgtccgtatttttcataccataagcaatatggatcatgcggaaatttcatttgcgaatgaagtcacaccgaagaatgcatatgaattaaagcagctcgatttcttgccaggcactttcattgtaattgagaatcccaagggtatagaccccataactctagcttggatagcggttgcttctatagttatgggtgtggctgttgcattattaatgcctgtgccctcaattacccaaaccaaccagaataacaatcaatcctcgtctgcaaataacgaattatcaaaccgtgaaaataaaactcgcgtaaatggtcgtatcgcagatatttatggtgccgctaacgatacccctgatctgattactgtgccttacaaggtatatgaaaacaatgtcgaagtagagcatgttgttggttgtattggtcgtggtcactataaaattaacggtgcatatgacggtgaaaccaacattgttgatattgccggcgcatcggtagaagtctttcgaccgggtgtcgatattgtctcgggtgagccatatttctcgcttggtaccgaaattacaactccacccttaacggttcagcatcaaacttctgttaatggccaagttttacgtcctgctgatacacaatctttagaaggtacgaactaccttcattttgcatatccaaacgagattcttcgggcaacggcaaacaacacagatttaaccactaagtttgtaagtaatgaccgcgtagaaatcacgaatgcctcattcacgtttaacggccagacttatgatttaaacggcacttacagtgttctatcggtagctgatgatcgaatgacgttatcaaatccggcggccgttaatgctaactggttaaaagttaaagagttaagtgcccagcaaacagcagctttatcaccaaagatcagttcaataggtgaaaagtggattggtccattcattctggacaatgtcgaacgaagtcgggtgctatgtaactttgtggccacaaatggactttacacagtttcttcaggtggaaatcagggagctgtaaacgtcacgattgaagtagaagtaacgccggtaaatgaatcgggtgcagccattggtaatccaatgctaaagcagatcattctaaagggttcggcaaagtcacgtcagacagttggcgcaacgctggatatggtgacatttcaaggtcgctgtagtgtccgtgcacgtcgtttaacaccaacaccggcggttacaacggtagtagatgaagtaaagtggcaggcgctttatggtgcttatcctttgcaaagcacagtgtatgaacatgaaacggtttttcgtgcgcgcacttatgcaaccactggagctttatctgttaagtcccgcaagatcaattttgatcttcagcggatgttaccgacttttaaaaacggcgcaatgacgacagagctatttccaacatcaagctttgctgatgcattggtttcaatggcactggatgacaagataggccgccgtacgatcgacgaaatagatctggaaaatatctatcggacttataacgatgtagttgattattttggtacaccacttgcggctgagttctgtactacgattgatgatacaaacctgtcttttgaagagctggttaccaatctttgtgatgccgtattttgtaccgcatatcggcaaaacaataagctcaagctttattttgaacgtccaactgataactcggtaatgctgtttaacttcaggaatatcattccggatagttacaagcatgaccttacctttggcgtgatggatgactacgatggactgatctatgaatacacggatccgaccgacgatagtcgtatcaatatctatttgccagacaaaggagcaaagaacccgaaagaagtgaaatccgttggtgtacggaataaatggcaagctcattttaatgcttaccggctctggaacaagcttcggttccagcgtaaatccattacctttgatgcagcacctgaatcagaattactggttttacgtgaccggatcgctgtagctgattatcgcaatggtattcatcaaagcggggaagtggtacagcaagagggtttaatcctcaccttaagccatgatgtagatttcattgcaggcaagagctatgtgatttatttgcaaatgggggatggcacagtggaccttattcctgttaccgctggatctgccaagaacaaggtggttttagggcggttaccgaacggggccttaaagctaagtcctgatgattttgtaaataccatctatacagtagttaatgacgataccaaaggctcactgccttatctggttgcaaaaagggaaccggctgaccagttctctaataccattacggcaattaattacgatgaacgttattacctcaatgacaaggactttattgatgtgccagtagatgattcaccgatttacattcgatatgaccagcttgatattaatttggcgcgtttgtatcagatgcaaagaggggatttgccaacgactggcgaaattagctttgtagttgaagctggtgcgctggtttcaagttcgagttcttaccgaccagaaaccagatttgtctataaatttgactacaactctagtcctccaaaacgagagtatatcgttccagctgcatcagaattacctgctattgatactggtgagtttccacctgatctggtggtgaatctgacgattaaaggtgctgtagttggacgtggtggtgatggcggtttacctcatttggcatttggcgcttgggaaacggatccggattacaactttaccaaaacccgccgtgatgggtttcagggagcacccggtttattgaaccggcacagcaaactaaacctgattattgatggcggtactctagctcgaggcggatctggtggcggcgcaacaccaagcggtatttacactggattgtcttatggtgttcagggtattccgggtggggctggtgcaccatttggaagggtcatgtcaggccagccaatttcaaatgactcacaagactggcgttggtactttggaagctatttcaatgttctaaaaatcactgatgccgaagcttcggtacccggtaaaggttatcgaacccaaaatgaccgttatggatctccattatcaggtgatggcggtggatggggcgaacgtggtaccaagtctaccaatggtggaacatggaattggcaataccatggaacgacggaaggccagccggggccgggtggacctgcaattgttggggtggcacctctaacaactcaattgattaacggagggaaaatcttacaaaccctttaa

SEQ ID NO: 44146 - DNA, 390 bp, Acinetobacter baumannii
atggaaccagtttccacaagcggtttaacagcaattttaaaattttatggtgcagcaattatggtgactttagcggtcgctttagtggcagcagttgtattgatgacacgtatgcctcgctcaccacaagagtgggcagttggtttgatctgtactgttgtatcaagccttgctggcggctcattcattattgtgaagtggggacttcatgaatgggttactgatgtatgggggatgattgctctaggtgggttcttctttgtttgtggtttacccggttgggctttagtccgttggatctttaattttatagataaacaggaaggtaaaacgatcgttgaagtaatcaaagagtttaagaaagccagaaaagacattgaaaacagctaa

SEQ ID NO: 44147 - DNA, 183 bp, Acinetobacter baumannii
atgaatcaatctgaggaaaatgttagcaccaaacccggtataagtatagagggtaaaatgagtgagaaagacgcaggtagagctgctgtaatcatggcttggggtaaagctatatccctagtaattggtagtgttgctggagcaataactgctattacgactttttttaaatatatattttaa

SEQ ID NO: 44148 - DNA, 546 bp, Acinetobacter baumannii
atgaacatcgaacaataccttgaagaattgatcaaacgtgaaggcggttatgtaaataacccggcagatcggggcggtgcaaccaaatacggtattactgaagcagttgctcgagcaaacggatttaaaggaaacatgaaagatttgccgcttgatgtcgccaagtctatttatcgcaaaaactattggacagctccgcgttttgatcaggtgaataccgtttcttcagcggtagcggaggagttattagacacaggagtaaattgtggtactggctttgcaaaacctcttttacagcgtgcactaaacttattgaataaccagggtaaagcaggttggccagatcttacggtcgacggaatttatggacctgctacattaaatgctcttaaaatttatatggccaaacgtggaaaagatggcgagaaagtattagtgcgagttcttaatatcatgcaaggccagcgctacattgaaatttgtgagcacaatccaagccaagagcagtttttctatggttggatcgccaatcgagttgttatatga

SEQ ID NO: 44149 - DNA, 2319 bp, Acinetobacter baumannii
atgaaacctttggcagctttaccgttaatttttatagcaattcagcaagtgcaagctgaggagagaattgcaattttaaagcctcttgtttttaaggcaaatgcattaaaggaaaaaaattatgtggtggacaaagaaaaagtagaaagttccaatacaataggtgatgctcttaaaaatataacaggtatacaaagtacttcatttggacccaatgcaggtgcaccagttatacgtagtttgagtggaaatcgggttggagtaattgaaaatggagaatttattaatggaatgaatgcatttagtggaaatattaatataccattcgatccaatttttatagaaaaagtgatagtgaacaaaaatacagataatattcgttatggcggaaatgcaataggcgggagtgttcaaatagaatcgggtttaattcctaaaaaaattgaagaaaagccaaacaaattagatattgtctttcggaaaggatttaatgattttgatgtaaaggggttcaattttaacatcaatgatcaaaaaaactggtctacaaatataagatattcagaatatgaaatttcttcttataaaattccaggaaatagtaaagccaaattatgtgaagaccagattttttcaaattcaggtgggatcaatagtgcattagcagcttcctgtcaaaaggatagtagagtccaacatatttataacaagtcgtcacaaccatacatagataaatttatgactgagaatcctgattgggcagatggggatttttctttttatacagataagcccacatctatatggggaggaaaaacatatataaatccaaaaaatccagagtacatacctaatactccgcaaaatacaataaaaaagatcaatacggatgttacaccaaattattttaaaaaattaggtaacagttatgctcagaatgagaatattgggtttggaacaacatacttttttgataaaggtttcattggattgagtgcagataagaaaaaaagtgaatatggtgtaccaggattttcattacaaaatcaatcttttgctgattcttatgaaacattaccggttggtgtgaaaatagatcaaaatcgttttgtattaaattccaattttatccaaccaatttcctctgcagaagagataagtttgaattttcaacagctttctaataaatctggagaatatgttggtactgcaaaagctaatgagtataaaattgataatcaattaattgaattaataatgaaacagtcatcctttaagggattagatgggatacttggttttagccttaaaaataggaatatcgaaggaagtggtagtcagcgctatttacctaatgtaagtactattagtaaagctatattcttacaagaagaattaaatatcaaacaatttactttaaatacgggctatcgttttgaaagaattgaacatgagcttcaagataatgattttaaactagcaagaaatgctagtaattcaagaatagaaaatagaaaatataatttaaaccaatattttatcggaggagaatataaggttaataattttataaatttaaaagttgattatggtatttcagaaagagcacctgaagtgaatgagctctattcaagtaatgttcactattctgttatggcacaagaagaaggcgaccagaatctcaaaccagaaaaatctaaaagtttagagttaggtatgtttttgaattggaataattgggtcatgcaacttgttgggtatcaaatggattttgaaaattatatgtatttatctcattcaggtgttgctgtgcaaaatcgattacctttaaaatactggaaacagacagacactgacgtcaaagggtttgaaattgatttaatttatgattttaatctagctcatattgggaatattaaactaggtggtttagctgattttgttaaaaataaggctgttaatcctacaggtataaggttagctaatgatggagtttacctaccaaatatgcctactaatcgttatggcatgtttcttgagtggagaaatgattcttggaaaggtaaaatttcaagtatttactacgatgagccaagatatctaggtaagaatgtaatacaggaagttcctttatctggttacaacttacttgaatttaagatagataaaaaattaaagattaaaaatgcttcatttgatatatttttaaatggtacaaatctgctgaacgaagaggctagaccacaaaactctcctctaaaatatattgcccctctaccagggcgagcatttcaactggggataactatgcatatttag

SEQ ID NO: 44150 - DNA, 267 bp, Acinetobacter baumannii; identical to SEQ ID NO: 43415

SEQ ID NO: 44151 - DNA, 657 bp, Acinetobacter baumannii
atgagtggccagatctattttgtgagtgggattgataccgaaattggtaaaacctacgcgacaggtttcttagcaaaattatggactgagcagggtaaaaaagtaattacccaaaaacttattcaaacaggtaatgctgatatctctgaggatatccagaagcatcgtgaaattatggggcaaggttggtttcaggaagatcatgacaagctgactatgccggaaatctttagttatcctgcttcacctcatttagcaacgcgtcttgataaccgagagatcgattttcaaaaaattgagaatgcgactcaaacattggctgagcgttttgaaattgtattgttagaaggtgcaggtggcttaatggtacccttaaccaccagtttacttactattgattacgttgctcagcatcagtttcctgttattttggtaacgtctggtcgtttggggagtattaaccatacattgcttagtctcgaggcacttaagtcacgtggtctgaaattaaaagctttggtttacaacctaaaagatgaatcaaaagatccattaatctctcaagatacttcaaattatttgaagaaccatttagccattcatttccctgaagctgagtggattgaactagcaaaaatgaatgaattaaaaaattag

SEQ ID NO: 44152 - DNA, 750 bp, Acinetobacter baumannii
gtgagtttgaataaaaatttggttgcccaacgttttgctaaagcagggcaaagctattcaaagcatgcaattgtccaaaaacaaatttgccaaaacttaacgaacttactaaagcaattttgtccaagcgcaatgtcacgtgtctttgaaattggttgtggttctggcaatttaactcgtctgcttgttgaatcttttcaaattgaaaatttagttttaaatgatttgtatgcagaggtgcaacagcactttaatcatgaagaacatgtgaaatggttaattggagacgttgaaaccttagaattccctcagcagcttgatatgattgtttccggttcagctttgcaatggatgcaagatttaccacggctacttcaacattgctatgctgctttaaatgagcaaggctggctatgcttttcaacatttggtcctaaaaacctcattgaaattaaagagctaactgggcaaggtttaaattattggaatcttgaaaattggaatagtgccttaactcaggctggttttgagattttgcatttggcacagtcagaaactcagctttatttcgattcgcctaaagctgtgttgcagcatttaaaagcaacaggtgtaacagcaactgctcagcatcgttggactaagcaatctttacagcagttttatcaagattatgaccggtttaagcacaccgaggggtactccctaacatatcacccgatttattgtattgcccggagaatgaagtaa

SEQ ID NO: 44153 - DNA, 1158 bp, Acinetobacter baumannii
atgtcattgctcgatcattttgctacagagttagatgagttaaaacgacaaggtaatttcagacaatttacccaaaatgtgcagcatggccgttttattacgattcaaaataaaacgatgctcaatttagcttcaaatgactatcttgggttggcagctgatattgatcttcgccaagaatttttagattgctatccattagaacgcagctattttagttcttcatcttcacgtttattaacgggcaattttgatgaatatgaacagttggaaaatagcctaagccaagcatttggtggtcgggtggctctattatttaatagtggctaccatatgaatattggtattttgcccgctgttgctgatagtaaaactttaattctggcagataagttagttcatgccagtatgattgatgggatccgtttgtctggtgcccagtatgtgcgctatcgacataatgatttacagcatttagagcaacttctacaaaagtatcatgatgatgaccagattgaacgaattattgtggtcacggaaagtatttttagtatggatggcgatgaaacagatttaaccgctttagtccagcttaaaaaacgctttgctaaaaccatgttatatgtcgatgaagcgcattcaattggcgtacgtggacagcaaggtttaggatgtgccgaacaatataatgtaattcaggaaattgattttctagttggtaccttgggtaaagcgctagcagcagtcggtggttatattatttgccatccaattattaaagattatctcattaataaaatgcgtccgcttatttttagtaccgctcaacctccgattgttatggcatgggcaaattttatttttaaaaaagtattaatggctcaatctcaacgtgaacatttaaaaaatattagccaatatcttcaacaagcagtggtgcaaaaggggtatgtgagtccatcgaccagccatattattccagtgattgtgggagaaagtcaggctgctatcgataaggcgaaacaggttcaggaaagcggtttttatgccatgcctgtacgtccaccaacagtacctaaaaatagttcgcgtttgcgcatttccttaacatcaatggttgagcaacatgaacttgaagcattggtgagtttcctgtga

SEQ ID NO: 44154 - DNA, 1281 bp, Acinetobacter baumannii
atgaccgataattttgatttggaacatatttggcatccatatacttcaatgacccaacctttacccacatttaaagtgaagcgtgcctatggggcaacgattgaacttgatgatggtagaactttaattgatggtatgtcatcttggtggtgtgcaattcatggctataaccaccctgaacttaatcaggccgtgaccgaccagctacaaaatatgtctcatatcatgtttggcggtttaactcatgatcctgctattgaacttggcaaaattcttttaaaaattacaccgccgagtctcgataaaattttttatgcagactcaggttcggttgccgttgaagttgctttgaaaatggctgtgcaattctggacagcacaaggtcaaccacaaaaaacaaattttattactacacgttctggttatcacggtgatacatggaatgcgatgtctgtttgtgatccagtgacaggcatgcatcagatttttggtaccagtttaccgaaccgtctttttgtagcagctccgcaaaccaaatttcatgaagagtggaaccaagaagatattgccgagctagagcaagctattcagcaaaatcatgaaaaccttgctgcacttattattgagccgattgttcaaggtgcagggggcatgcgcttttatcatcctgaatatttacgtcaggctaaagcgctttgtgaaaaatatcatctgttattaatttttgatgaaattgccactggttttggtcgtacaggtaagctctttgcttgggaacatgctcaagtcgagccggatattatgtgcctaggtaaagggttaacaggcggttatatgactttgtctgcgactttaacgacaaagcatgtagcagaaaccattagtcgcggtgaggctggggtatttatgcacggcccaacttttatggccaatccactcgcttgtgccgttgctttaaaaagtacgcaattattaattgagcaagattggcaggccaatattaagcgaattgagcaacagcttagtcaatatttaatgcctttaaatcagcttgattatgttgccgatgtaagagtgctcggtgcaattggtgtggtagaactcacctttaatgtcgatatgaaaactttacagcaacaatttgtagagcgtggaatctggattcgtccttttggaaaattagtttatgtcatgccgccttatgtcatcactcaacaagagttaagtgacttgctcgaacatttggttgaagtagttaaaacgatgcagggggcacattaa

SEQ ID NO: 44155 - DNA, 735 bp, Acinetobacter baumannii
atgaagttacaaaataaaattttattgattacaggttggggagtaggaatagaacctttgcaatcgttaaaattaggtttaacgaaagctgggtgtgacacgcaacttattaatatttttaatgttttagatggtggctttcacgatcagcttgattttttaactgatattgatgtggttgtaggttggtctttaggtggacagttagcaacatacctgattgactttttttataaacaaacgggccaaactaaaacgttaattacgcttgcctctaatccttgttttgtggctaatacctcgtggcatactgctatgcctgctgatgtatttagtcaatttaaagcatcctttttacagaatccccaagctactttaaaacgtttttattatttaattacacttggctcatctcaggcaaaacaagattggcttagtgtacaaaacatagcaaatccgccctcaaataaactgttgttagaaggtttgcaaatgcttgagcagctaaatttggtagataacttgaaaacctatccaggacgacagcttcacctgtttgctgaacaggataatgtcattccttgcaagattgtggaaaattttaaagatatagcgacagaaaacatgagttataagctaataaaagatgctacacatgcttttccctacttacaggtagaaagaacaattgaagaaatctgccaatttttaacaattcatcagcaaagttcataa

SEQ ID NO: 44156 - DNA, 852 bp, Acinetobacter baumannii
atgaacagtcaaagtataatatctgatgggagagaaaaagatacatattttgttacacccaatgatattataaacaccttacctacagataaaaattattgtttatttctggatattgatggaacattagctccatttcaaattcatcctgagcatagttttattccaaataccaccttagaagttataaaaaaaattattgaattaaatataccggtgattgctgtaacaggacgtgatgttgaaacagcaagtaagctacttcagtctattgaattacctatagcgggcttacatggtttagatatttattttgattctgatacttatattcgcccagatttaagcgatattaattttcaaaaattaaaagaagatattataaattcttgtgaaaaatatcccgatttattaattgaggataaaggacattctattgctttacattatcgaaaaaacccggaattagaaaataatgcaatttatattatgcaacagattaaatatttttatcctcaattaaaattaaatagaggaaaatttgtcgttgaattattacctaaacaggcagataaaggtaaagcaatacaaacaatattaaatcatcttaatttaccgttaattcaccccatatttataggagatgatttaacggatgaatcaggtttcatttttattaatcaacagtttggcacttcaattaaagtaggttctggtgaaacagaggctcaatatagattaaaagatattaatagtgtgtctaattttctttttttcttcctagaaaaaataaaaaagttatacgtcaaaaatagtcaagatcagaatggagaacaaatatgtctaaattaa

SEQ ID NO: 44157 - DNA, 1431 bp, Acinetobacter baumannii
atgtctaaattaatcgtgttatcgaatcgaattagtatgccatcgggtaaggcttcagcaggtggccttgcagtagctgtacaagacgcattaaatgatagtaacggcatttggttaggctggaatggtcagcaaattaccgatactgaagcgcctgaattcgatcaggcatattctcatgggatcgactacattacctgccctcttacacatcagcaatatgcacagtactactgtggttttgccaataaagtattatggcctgccatgcatgatcgggatgacctgatcgaatataatgcagaagaatataatacctaccaaaaggtcaatcgtttatttgctgaaaaattacaacagattgctcagcctgatgatcttatttgggtgcatgactatcactttttcagcgtagctcgtcattgccgtgaattaggtatgcaaaataaaatcggtttctttttgcatattcctttcgcaagcttaaatatctggcgcaagatcccagttgcactacagttggtccaagatctttgccaatatgatgtgattggtttacaaactcaaaccgatcagaacacgtgtatgcaaacttgtatgggcttacttgaagctcaaaaaatactaagcgacagaatcagttataagaaacgtcaaatcttgattaagtcctatcctatcggtgttcagccagagcttattcagcgccaagcacaacaggcctttcatacaccatacgtatttaactttgaagatataccacgtcaaaaaacaattattggggttgaccggattgattattcaaaaggtttacttgaacgtttcaatgcatttgcaactttccttgaaactaatcctgaatatcatggattggtacgtcaccttcaagttgcaactccttcacgtacagatattccagcctatcaacgcttataccaacgctttaaggccaaattagagctgattaatgaagagtttgctcatgaagattggcgacctatcgattgttgcttcgacacagttcaacatgacagtttgatgcatatttatcgtcgttctgacatttgctggattagctcattacgtgatggtatgaatttggtcgcaaaagaatatattgcggctcaagatccagagaacccaggtgtgctgattttatctaaatatgccggtgctgctgaacaaatgactcaagcattgattgttgatccattagatagagcagccatgatggattctttaaaaaccgctctagagatgtccaaagctgaacgtattaatcgttatgaacagttaatagaaggtttagcagctactgacctgagcgattggcgaaataatttcttgaaggatttagaaaattctccgacattcacaaagtctaagttgtccttacaagaaaagtatcaacccacttaccatgtcttataa

SEQ ID NO: 44158 - DNA, 1248 bp, Acinetobacter baumannii
atggggaatcggttggtatggatcgccaatggttttatggtgagcttcgcgtatatgttattttccaaacctgctgttttagatacagctactctcttaagtacacaacgattagcaactcgtcttagcttttttagcttgggctttgcgatatctgcatgggcaccacttattccgtatgctcagcaacgtttaaacctaaatcacgcaaattttggtttattgctgctttgtatgggaatcggctcaatgattgctatgcctgcgacaggggctttagttaagcgttggggatgtcgtccattaattgctgtggcgaccatactcttgatggtattactaccaagtttaacgatctggcatagtcttgtatcgatggctgtagcgttattcatttttggtacggcagcaggtagtcttggcgttgctatcaatttacaagcagttgtggtggaaaagcacagcttacgtgcgctcatgtctagttttcatggtatgtgtagccttggcggtttaatcggtgccatgcttgttactgcactattagcaattggcctttcaccactcatgagtacattgtctgtggtgatggttttattggtggtaagctttgttgccattccatctgccttaacgacatttgagcaagatgaacaaggtgcagcggaaataactgacgcacctaaaaaatcttcacgtccgaatggtacgatccttttgattggggtgatgtgtttcattgcctttttgtcagaaggtgcggcaatggactggggtggtatttatttaaccagtaaataccagcttaatcctgcctttgctgggctggcttatacttttttcgcgcttagtatgacaagtggtcgttttgcagggcatatcttgttaaaacagtggggtgagaaaactattgtgacttatagtgcaattgtcgctgctcttgctatggtcactattgtgatggcacctgtttggcaagttgtcgtattgggttatgcacttttaggtttaggctgttctaatattgtaccagtcatgttctctcgtgtcggacgccaaaatgatatgcctaaagcagcggcactgtctttagtgtcaacgattgcttatacaggttcattaagtggcccggccttaattggtttgattgggcagtggactagcctaaccactgtcttatcaggagtggcggttttattaaccatgattgctatactcaatcgctttactcttgtgaaggcaaagtaa

SEQ ID NO: 44159 - DNA, 465 bp, Acinetobacter baumannii
atgcgtggcaatccagaagtcatagactatttaaatatgctcattggcggagagttggctgcccgtgatcaatatttaatccattctcgtatgtatgaagattggggcttaaacaagatttatgaacgtattgaccatgagatgcaagaagaagcgtctcacgccgatgcgattattcgtcgtgtattatttttaggtgccaaaccaaacatgcatcgtgaagatatcaatgttggtacagacgttgtatcttgcttaaaagctgatttagcacttgaatatcatgtgcgtgaaaaattagcgacaggtattaaactttgtgaagaaaaaggcgactacatcagtcgtgacatgttacgtcaacaattatcagatactgaagaagaccatacttattggcttgaaaaacagttgcgtttaattgaactgattggcctacaaaattatatccagtctcaaatttaa

SEQ ID NO: 44160 - DNA, 2037 bp, Acinetobacter baumannii
atggcaataacttccgtgatcgaacagatgcgtcagcttattcaactgattgcaaagcataaccatgcctactatgtcatggatcagccgacaatctcggacagtgaatatgatcatttatttcatcagttaaaagctttagaagaacaatatccggaacttgtacaagccgactcaccaacaacgaaagtaggtggtcaggcgctttcaaaatttgagagtgtgacgcatgtggtgccaatgctttcacttggtaatgtatttaaccaagaagacttatttgcatttgcacgccgtgtagaagagcgacttccgaaccagaaagtacaatatgaagttgagttaaaactcgatggccttgcgatttcactatggtatgaaaatggtgtactcgttcgcggtgtaacccgtggggatggcgaaacgggtgaagatattactcaaaatgttaaaaccattcgtaacttacctaaagttctgcattcagaaaaatatgaaatacctcgtctacttgaagtacgtggtgaagtattgatgccaaagtctggttttgaaaaactcaatgctgaccaagaagcaaagggagaaaaaaccttcgctaaccctcgaaatgcagccgctggaagtttaagacaacttgatccaaatattgctgctgctcgacctttggcattttatgcgtatgggattgcacagtgtgaaccaaatcatggcctaacaaccatgcatgatagcttgcaatggttaacggaacttgggttccaaattgctgagcgtcagtacttgtgtaattcaattcaagaagtacagcagcgctatgagcaaattcagcaagaacgtccaaacttgcaagttgaaattgatggcatggtggtgaaggttgatgacctaaaacagcaacagcagcttggtttcttaagtcgtgaaccacgctgggcaactgcttataaattcccggcacaagctgcattaactacagttgaacagattgactggcaagtagggcgtacagggactttgacccctgtagcacgcttaaaccctgtttttgtgggtggtgtgactgtttctaacgtaacgttgcataatattggggaaattcatcgtctggatgtacgcattggcgatacggtaagtgtatatcgtacgggtgacgtgatccctaaagtagaaaaagtttggccggagttccgtcctgctgaagcagaagttgttcatttaccagagtcctgcccagtatgtgcttcgcctgtagtgatgcctgaaggtgaggctctcgcacgttgttcaggcggtttatattgtgccgcacagcgtattgaagccattcgtcactttgtatcgcgtaaagcgatggatatcgagggtttgggagatcgttgggtagaatctttattacgtctcgatttacttaaagatgttgctgatatttaccatttgcatgagcacagagaaactctgttgggcatcgaaaaaatgggagaaaagtcagtacagaacttaatagatgcgattgaagcaagtaagaaaacaactctagcacgttttatttatgcattaggtattcgtggagtaggtgaaacaacggccagaatgttagcaaatacattccagacgcttgaggctcttaaagctgcgaatgtagaagctttaaagaaaaccccagacgtaggggatattacagcagagtggattgctgactttttcttggcaccgcataacattgaagtactcgatcgtttaattgctgcaggaattcattgggatgcgccaacagcaccaacgcgtcagcctttaaatggtgaaagctgggtacttacaggtacattagagcaaatgacccgtgatcaggccactcaaatgctacaagcattaggtgcacgagtaagtgggagtgtttctagcaaaacgaaatgtgtagttgctggtgagaaggcgggttcaaaattagaaaaagctgcaaagttaggtattcctgtcatgaatgaaacagatttcttatcactcatggcaggctatgggcaaactttgagctaa

SEQ ID NO: 44161 - DNA, 1038 bp, Acinetobacter baumannii
atggaaatcaatacgattattggcatcgttgttgccattattatcatgctaattggcttaagaatgattttaaaaaagccgaaccatgctgaaccctcgctagacagtgatttgcatattaatcctgaaagtaatcaaccggttatccctcgtcatgtacgagatcaacttgaacagccagaagttactgttgcgtcagcagccgttgctgcacgagtggaaccaactttaagcgagccggcacagtcagaagaaaagggaacaaaagaactagaacaggcttcgcaagctcaaacagtccagacacaagtacccgttgaaaaaacgccagtagaagtagaagaagttaaagctgaagaaaatactgttagcccaactgtaagtgaaaatagttcagttgagttagttgataccgtttctgctgaaccagaagttgttagctcatcagaaccaaaagttgcagaagggcaaccgaaaactgagccggaattaagcttaaatccaaatatcgaaactgctgaaattgctgagtttgaaggtgaaagcaacattcttgatgtacatttacatgagcagcagcgttttgatgacgaaagtgcgttagcaatggctgagcagattatcgcattaaatgtatatccaaatccgcgccgtgcgttatcgggtgataaagcactgaaagtgcttttaaaatatggtctacgttacggtgaaatgtcttgtttccaccgctatgaaaataccgatgagccaagtgcactgatgttctctgtattgcgtatgactgataatggtcctgctggtttcgatttagaaactttatcgactgaacaagttcaaggcttagcatttttccttgcacttccaaacagcaaagctgttaccggttttgacatgatgaccagtattgcaggccttattgctcgtgaaattgatggtaaggtttatgatgaaaataaccttgaatttacgccacagttaaaagaacattggcgccatcatgtgattgattatcgtccagcacaggcaacagcctag

SEQ ID NO: 44162 - DNA, 3450 bp, Acinetobacter baumannii
atgcgtttaagcagtttaaaactttccggctttaaatcttttgcagatagtacaactttaaattttaaggcgaaccgcacagcagtggttggtccaaatggttgtggcaaatccaatgttattgatgcaatccgctgggtgatgggggagtcaaacgctcgtcagctacgtggtggtagcatgcaagatgttatttttaccggaacatccaagcgtaaacctgttggggttgccagtgtagaactgcgttttgacaatacctatggcaaattaggtggagcttataacgcttataatgagctcgcagttcgtcgtcaggtgactcgcgaaggtaaatctgagtatttcttaaatggtacacgttgccgccgccgtgatattactgacattttcttgggcacagggttagggccacgctcttacgcagtcattgaacaaggcatgattaaccgcttggttgatgccaagccagaagaaatgcgtattttcattgaagaggcggcaggtgtttcccgttatcaggcgcgtcgccgcgaaaccttgcagcaccttgaacatacggagcaaaacctttcacgcttggaagatattgcgcttgagttaaaatcacaacttaaaacgcttaaacgccagtcagaagcagcggttcaatataaaacattagaaagccagattcgtaccctaaaaattgaaattttgtcttttcaggcagagaaaagtgtacgcctacaagaagaatataccgttcaaatgaacgaactgggggaaacatttaaattagttcgttcagaattaagtacgattgaacatgatttagaatctaccagtgctttatttcagagacttattcagcaatcttcaccgttacaacaagaatggcaacaagctgaaaagaaactgtctgaactgaaaatgactctagagcaaaaacaaagtttatttcagcaaaatagtacaactctcgttcagttagaacagcaaaaagcccaaactaaagaacgtttacagctttctgaattgcaactcgaaacactgaatagccagttagaagagcaaaccgaagctttaactgcaattgagcatacagcagctgaagcagagcaaagttttgcaggtttacaatcacagcaacggcaagcgcagcaacaatttgagcaagtaaaagctcaggttgaaaaacaacagcagcaaaaaatgcaaatgtctgctcaaatcgagcaattaggcaaaaatgttcagcgcattgaacagcaaaaagaaacgctgcaacatcaagcaaaccagatccaatcgcaagtacacgaagatgaacaaggcgagcttgagcaattacagcagcagctttgtcgtgaaatctcaacgctagaagctgaaattgagcagtatgtgcagcgtattgaacaagctcaacaagcgcatcaggtaaataaaaaccagcagcaaacgttaaaaacagaaatacaggttttattatcagagcagaaaaacttaagccagcttgttgctaaacaaagtccaaagcaaaaccaagatacgctacgtttaatgcaggctctagagttaacagagcagggcaaaccacacgcacaaattattgaaaagtttttagcaaaatggttacaggcacatattgttgaaactgaacaaccctttcaggaaggaattgctcgccagttaaagccttcagagcaatcaagcaaatttaaggggaacctgacttgcttgaatgattggattgcatcgccacagctatcaatattctcgaatgtagcgattgcacaagatttatctcatgctttaaatgaacaaaagcaactgcaatatggccagtctattttgactttagatggttatcatgtcgggcaagattgggtaattgctcttatgtatgatgacgaaagtcaaagtgcgcaaggtatgctcagtcatcgtatacgtctagacgaaattgaacaagttcttcaaaagcagcaaccagaattacaagcattagatcaaattatagttcagcaaaaagatgagctaggacagttacaagttgacctacagcaaaaacaacaagtcattaaacaaaaacaaaaagacttgcaacagcttgatgtacaaattgccaagcaacaaaccgcagcacaagcatttttattgcaaaaacagcaattgaaagatcaactcgctcaattagatacgcagcttgaagaagatgcgatgcaaaaagatgatcttgaaattgatttgcatgcattggcaatgaagctcgaaactattttacctgactataaaactttgcaatttcaggtagaagaattaacagagcagcttgaggaacagcaacaagtcttacaacagcaacaacaagaacgtgagattttacgacgtaatagtacgcagacaactcaacaaattgagctgcttgaaaaagatatttcgttcttgcagagccaatatcaacaaattacagcgcaaatggagcaagcgaaaaagtttgttgaccctattcagttagagttgccaaaccttgagtcagagtttcaacaacagtttgctcaaaccgaaaagctgcaaaagacatggaatgaatggcagattgagcttaatagtgtccaagagaagcaacaaacgcttacagaccaacgccatcaataccaacagcaagatgaaaagcttagagagcagcttgaagccaaacgtttagcatggcaagcagccaagtcggaccgtgagcactatcaagaacagctcaaagagttaaatgccgagcttcaaacgggcttgaaaatagatttaactgaacaccagcaaaagctagaaaaagtacagaaacagtttgaaaagatcggtgcagttaacttagctgcttcacaagagtttgaagaggtttctcagcgttttgatgagttgagccaccagattcaagacttggaaaatacggtaactcagttaaaagatgcgatgaagagcattgaccaagaaacccgtaagttgtttatgtcgacttttgatcagattaatcaagagttacaaaatctatttccaaaagtttttaatggtggtgaagctagtttaagtcttgaggatgattggcaatctggggttaagctcatggcgagaccaccgggtaagaaaaacagttctctagcattactttccggtggagaaaaagcgttaacagcgttagcattagtatttgctattttcaggttaaatccggcaccgttttgtgtactcgatgaagtggacgctccactcgacgatgcgaatgtacagagatattgtaatttggtaaaagagctttctgaacatgtacaattcatttacattacacataataagctggcgatgaccatggcaactgacttgttgggtgtaaccatgcctgaaccgggtacatcaaaattagtcactgtcaatttagaacaggcaaaagaatacgggttagtttcggagtcatag

SEQ ID NO: 44163 - DNA, 696 bp, Acinetobacter baumannii
atgaatctcgaagagacagaaagtctttctgagcaaattgtcaaatatattagcgaacagattattagtggcgaattggttgaaggcgaacgtatacaagagcttcgtatcgctaaagaacttgacgtaagtaggggatcagttcgtgaggcgctattattactcgagcgtacgcatctcattgaaatttttccgcgtcgtggtgcaattgtttcggaaatgtcggcacaacaggtcaaagcgttgtttgatacaaatatgatgttattggggcatattgtacaacgcataagcgaaacatggcgtgcccatgaagctgatcaattacagctcttgttagaacagcttcttgagcatgtaaaagcaggcgatatcgaaaaattctacgatgctattttccaatatcttgctgaacaacaagatatggtcggtaatccttatttaatgaaattttataaagaattattaccatcattacgtcgtagttattttttgacactaaatacctctaaacgggaactgcaagaagcgtttgcattatttaaactcgtgactgatgcaattttgatccgaaaatcacaacaagccgctttatttatggaagatttttgtcgacacttacgtaaccttgtgttggaatcgctaacacgaatgaaacagattgaattggcttgggcgagacgctcacgccgctag

SEQ ID NO: 44164 - DNA, 804 bp, Acinetobacter baumannii
atggagttaatcatatatttactcattggcgcaattgctggttttactgccggactgtttggagttggtggtggactaattattgtaccaatcctctatgtcgtttttacccagttgcactatgatcccgcggtaatcatgcatattgcagtcggaacctccctagcaaccattattgtgacttcctttagttcagtttcggctcatcataaaaaaggtgcagtcctctggcctgtttttcgtaatttagcaccgggactagtgattggttcctttttaggtgcaggtattgccgaccttttgtctggacagcatttacagcttcttattggtgtctttgctgttgtgatggcttatcggatgttcaaaggagcccatgttgtggttgacccaacacgtcagcttccttcaacccctatgcaattcatggcgggtggaggcattggtattgcctctgcaatttttggtattggaggcggaagcttaactgtcccatatttaaaccgtcatggcgtagtcatgcaaaaagcagttgcgacctctgctgcttgtggtttacctattgctattgcaggtgcaattggttttatgtggtttggtgctaaagagcacatttctgtacctaatacgattggatatatccatatctatgcttttattggtattagtgtcatgagttttgtgaccgctaaacttggggctaaggttgcccacgcattgtcaccacaaatgctaaaaaaatgctttgcttgcttgttagtcgtggtaggcagttactttatttataaaggttttatgaattaa

SEQ ID NO: 44165 - DNA, 753 bp, Acinetobacter baumannii
atggatttagagactcgccaactacaacaacttttaagcgcaaaaaaccagcttccagaagtggttttattaaaagcaaccacaacttcgaccaatgatgatattcgtgaaattgcccaaaaaggcattacaacaggcttggtttgcagtgctcaacaaactcaagggcgaggtcaacatcaacggcaatggatttcacctgaaggaaacatttatttaagcacattggtgcaaactcgaacacccttagatggtcgcttagcacttgaagttgctttgaatattttgcaaattccacagctacagtctttgagcctacaagtgaaatggccaaatgatttgtatagtacacaaggaaaatggggcggaattttggttgaacctctttcccaacatcaggcgattgtgggtgtaggtattaatttaaaaacaccaccagtcactgatagtgatcaaccgatcacgtctctagaagatttaggcctagaacaaatgagtcgtcttgagttaatttcagagctttatgttgcaattcaaaatgcagcccgctggtttgatcatggttgttataaccttgcaggacgttttaaccaccatgctgcgtggcttaatcagttagttcagttcgaacatagtcaaggactgatatatggccgtttcgttggtatctctaatgaaggtgcggtgattcttgaaactcctgaaccacagcagttttatcaaggtcgtctaagactacaaaccactcagtaa

SEQ ID NO: 44166 - DNA, 735 bp, Acinetobacter baumannii
atgaaaagtttatggcttgatatcggaaacacccgtttaaaatactggattactgaaaatcagcaaattattgaacatgcagctgagttacatttacagtctcctgccgatttattactgggattaatccaacactttaaacatcaaggcttgcatcgtattgggatttcttcggttctcgataccgaaaataatcagcgtattcagcaaattctaaaatggctagaaattcctgttgtttttgccaaagtgcatgctgaatatgcaggtttacaatgtggctatgaagtaccaagtcagctcgggattgaccgctggctacaggtacttgctgttgctgaggaaaaagaaaactattgcattattggttgcggaacagcgcttacgattgatttaaccaaaggcaaacagcatttaggcggttatattctgccaaacctttatttacagcgtgatgcgctgattcaaaataccaaaggtattaaaattcccgattcggcttttgataatctaaatccgggcaataacaccgtagatgcagtacatcatggtattttactgggcctcattagtacgattgaaagcattatgcaacaatcacctaaaaagctactcctcacaggtggcgatgctcctctttttgcaaaatttctacagaagtaccaacctactgttgaaacagatcttttgcttaaagggttacaacaatatattgcccattaccctaaagactag

SEQ ID NO: 44167 - DNA, 1410 bp, Acinetobacter baumannii
atgtttgataccttaacagaacgactcacgcagagtttaagaaatgttactggctcagggcagctgaccgaagacaatattaaagataccttacgtgaagtacgtatggctcttcttgaagccgatgtcgcgttacctgtaactcgtgaatttatcgcgaaagttaaggaagaggcattgggccaagaagtgatgacgcagttatctccaggccaggcatttgtaaaaattgtctatgatgaactcaccaagatgatgggtgaggctaatgaaacactggatttaagtgctaagcctccagttgtggtattacttgctggtttacaaggtgcaggtaaaacaactacagcagccaagttggcacgtttcttaaaagaacgtcaaaagaaaaaagtaatgaccgtttctgccgacgtttatcgtccggcagcgattaaacagttagaaactgtgtcagcagaagttggtgcaggctttattccatcagatccttctgaaaaaccaattgatattgttaaccgtgcaattgaacaggcaaaaatccagtttgctgatgtgttgattgtcgatacagcgggtcgtttacatgtcgatgaagacatgatggacgaaattaaagagttacatgcagcagttaagccaactgaaactctgttcgtggttgatgccatgacaggtcaggatgctgcaaatacagcaaaagcattcaatgatgctttagcgcttacaggtgtgattcttactaaaactgatggtgatgcgcgtggtggtgcggcactttctgtgcgtgctattaccggtaagccaattaagttcttaggtatgggcgaaaagcttgatgctttagaaccattccatccggaccgtgttgctcaacgtattttaggtatgggtgacgtactttctttagtcgaagaagttgaacgtaaaatcgacaaagaaaaagccgagaaaatggcgaaaaaattgcaaaaaggtggcagcttcaactttgaagatatgctgatgcaatttgagcaaatgaagaagatgggcggcatgatgggcttcttagacaagttgccaggcatgagcagtgcaggaattcagcaagcaattgagcaggcaaatcctgaaaagcaggtcaagaaaatggaagctattatccagtcaatgaccatcaaggaacgccgtaatccagacctgatgaacccaagccgtaaaaaacgtattgcagctgggtgtggtatggatgtagctgaagtgaataaactcattaagcaacaagcacaaatggctaaaatgatgaagaagtttgcgaatccatctggtatgagcaaaatgatgcgttcattaggcaatatgcaaaaacaatttggcggtggtggcggtatgggaccactgtttggtaacaacgaccaaaagaaataa

SEQ ID NO: 44168 - DNA, 810 bp, Acinetobacter baumannii
atgattagcctccccttggtttacacaattttggcactcatcgcatataccacttctttctggtatctgttcatacgtttaatgtcaaaacgtgaaccaaacccatggttatttgcttttgttacgaccttagcactgctgttacatggcacagttttatgtcatgccatgctgacgccatcaggaattaactacgatgtttttaatctggtgtcttttacatcaggacttatgttgttgttaagcttagtttttagtactttccgtccgattgtaccgttaaacttgctcggcattcctgtagcagcgattggtcttattttaggttttgcatttagccgtcccgatcagtttattgaacagcattcattaggtttagatactcatattattctttcactttctgcttatgctgttttactgatggcaaccatacatgcgatcttgatatggttccaaaaccgtgaactcaaaaagaaacaaaaaaaacgtatttgggtcaatttacttccatccattcaggccatggagtctttattatttgacctcatcattactggttttattctattaaccattgctctcgcgtttggtttcttaacagttgatagcttctttgcccagcatctcgctcataaaaccgtatttagtattatttcatggtttatttatggctctttattgattggccactataaacttggctggcgcggacaaaaagcgattcgttttaccttaattggttttgcattattagcgatcggttttattggcagtaaatttgtgcttgagatgatattgggccgataa

SEQ ID NO: 44169 - DNA, 945 bp, Acinetobacter baumannii
gtgaaactcatactcgctccaatggaaggtttaactgacccgatcatgcgggatacactcacatctgttggtcacttcgactggtgtgtaaccgagtttattcgcgttacagacagtattttgccagaccatatttactatagtttttgtcctgaacttaaaaatgatggtaaaacagctgctggaacacctgtacacgtccagttcttaggcaataatccagagatgctggcagcaaatgcggcaaaagtcgttgagctgggtgctcctgcaattgaccttaattttggttgtcctgcaaaaaccgttaatcgacatcgaggtggttcggtacttcttgatgaaccagacgtagtacatatgctgattaaagcagtccgtgatgcagtacctgcgcacatccctgtttcagcaaaaatgcgtttaggttatctagatgaaaaccacaccatggaaaacgcctatgctgttgaagatgcgggtgcaagctggttaactgtacatgctcgtactaaagcagatggttatacgccaccagcttattgggaaaaaattctgcctattaaagaagctttaaaaattaatgtgattgctaacggcgaaatctggaccaatgctgatgctagagcttgccagcaacaatctggctgtgaagatttaatgattggccgtggtgcagtgactactccagatttaacacaatgtattcgccaaaatatggatgaagcactgtttacttgggaacaactggttgacttacaaatacgttttttaaatggtcaagcaaaaacagaaattgggatggttggccgttataagcagtggttaggtatgatgaccaaagcctatcctcaagcgaaagaattatgggaccaagtgaaacgcattaaagctttagatgaaattgttcagcagctagagcaaaccagttcttctcgtatttaa

SEQ ID NO: 44170 - DNA, 954 bp, Acinetobacter baumannii
atgaaaaataaaaatatagggtgctggctgttacttgccggtagttcaagtgtttgcgcgatgcaaccgttggatgatcaaagtcttgcagctgcgacgggtcaaaatggtctaactttaggtattcaggccgatcaagttaaatttaatcaagttgccttgattgatacgaacggtattgcatctacgtcttacaacagtaaagcaggtcttatcattgcaggaaactctactaatccggttcctggcatagagtttattaaagctgctgtatctgcaaatccttcttttaatattgcaatcgataccgatgctggtggtggaaatccttttttaaatttagctgtcacgatggggagtgacgtaaatggtattcggcttttaccattttcagtttatttagcaccaagtacatctttatctagcccatccgattatgcattaacaagttatgcaccaaaatcaatttttagttcgggcacaacggtgaataccggggtaaaagagctgattcgttctactggtaatcttgatattaactttgtacaaaccaataagcctcgtttaaatattcaattgggacatgctgcccagtcggttatggttaaatttggaggagctattcaatcgatttgttctactgcatctggctgcccgattactttagtttccgataacacaggtgctacatttgggtttaaatttgcaggtacgaatgcgtcaacgggttttgttcttgatggattttatgctggagttgacccgacaggacttactattggaaatataggtgtatctagtaaatttgatgcatcacttaacaatgtaactttaggaaatttaggtacacaaagtacaacaacatttaataatttacccaatgggtctatggggagttttggagttacgggtgcttcggtgaccgactttaaaatgaaagtaagtggtttttaa

SEQ ID NO: 44171 - DNA, 2412 bp, Acinetobacter baumannii
atgaacaaaaataaagaaagtcacggctcaaagtttattttaaatacattaacagccagtatgttgttagtgagcggacaggtttttgctttagaagcgttaacagacgctgatttgagtgccgtgaatggccaagatggtatatcgatccagacgacttataatgaaattaatatagacaatgcctattgggacgatcatgcaggaacttcaaatagtgcagatcaggttttgagagcccaagctggtggaataaaagtacaaaagagtaatgcttccacacaaacattaggaacaaactaccgtttggatgtgggtagtaatccaacgacaggaaaaactggtctagatttctccttacagagtaatccttctcttattactgtgaatagttttaaggtctgtaatagttcgtcaatttgctcacctacaatgggacaactggctattcagacttcttcacctttgagtttggcccttactacacaagatggcttatttaatgcaaatagccagtcaagcatgagacttggcctaaataatgcgaatatttatttaggacaagtagatgcacgtacgcaacttaaccaattaattttaaaaaactttaattttaattttgttggtaaaggcgctatgttaattgaccctaaccgaggtctggttttacaaaccaatacggggtctaatactgctgcggttgggcaaactccaaatagtacctatggctatgtcgattttaatcgtgtcgccgattctgcttctggtttaactgctggtacatatgtagacagtagtgggaaagtaaccaattcaggtctaaatattgaggtaatgcttagctcaaatgttgataagtcaaatccttatgccctagacacgacaaatagcccacagaattctaaaggcttgattcgtttaggtgctagcggccgtatggtcaatagttacttacaagtccgtggtatggatggttcttcagataaaacaacattaggtactgctaatacagcttcaggtacgggatcaagtaatagtattttaggtaactctggaattgcctttcgtatgaaaggggagttcactaaagataatgattcgatgttaggttcagatggtaaagcaactaccttggaaattggtggtgcaggtctgaatgcttatggttttgaattcggtaatttaacggggctgaactcggctacacgcggttattttgacagcggaaatatttatctaaatcttgctgatacaaaaactttattaatgccaaataacgcaacgttaaatgcaattcgtttaggatccggcactttaacaactgctgccgattatcaacataatattcatcgtgatacggtgactaatccatttagcttaattcttgccatgcgtggagcagagtttcaggcattttcaagacgaggtcgttttaccaccagtgcaaatgtcgctgctgctaatcaatttgcagataatggtttaaataaccagtggggtttggcattacctttttataatttaaatgcgaatgccgctgtctatggtgtagatgcgcctgcaaatagtgcttattactatacaaaagatgccaacggtaaaccgattcaaaatttagttgcaacatctggtacaacttcacgtttaggttttggtatagctgtcggaacgacaggtcgagatgcaggcggtactaaaacaacttcaattttattaattgatggttctccaaatgctaataatgcgggcaaccctaccgattattatatgggattacgtaatattgatatgttcctcaaaggcaatggcactattggtttagaaaatggcagtttaaatatcggtttaaaagatatgttacttgctttatcaaccgaaattgcggcaggttatttaccgggagctaaatataaaacttgtccagcaaccgggtcttgtacttcgccaatcgataactttgccaaaaataatgatgtcttatttggtttaaaactacgtttaggcggcgatcttaatttatcgatagtgccgaatagttcaattgcagatggtagtgctttaactgtactaggcgattttacaatgcctgcgacagcaactggaaatactgtacaaattagtgacccgattgatggttctgcaattggttttgacaatattactggaaagttagcgtttaataccgctttagttgtgggtaaagataccgcaagtggtttaggtaaagttggtgtaaataccgcggtttattttaatcctgataagagtattgacggtgcattacgtgtgaaagatattaatttctatccaccttcaacgggtgcaggagcacgtttaggtgagcttgcaattacggggggacgtctaaatagtagctttagcattgtgcctagaaatggcgcctttaactaa

SEQ ID NO: 44172 - DNA, 726 bp, Acinetobacter baumannii
atgaaaaaaataactgctttactctttgctctttgtgcaactgtgactcatgcagagttacagaccttggataatgatgcattacaggcaatcaatggccaagctggtgctgatttatcactcatgcttaatttaaaccagaccagtaacggtatatttgataatggcagtggtggcgtatgtgaaaacgtagagttttgtcacattggtttagcaattaacaaacgttttgtgcaagcagacacgactaagccaagtggttgggctgaaaatagtgatagcggtaataaactttggttagtatttaaaggcgtacaaggcactttaaatattcaaaaaatgggtttagatggtgctgatttaaagtatcttgataaaagtaatactgaaattataaaaccggctattcaacttagttttagtgcagcacagccaattttaattcgtaattttggttttaatgctctgtcaattgagcaggataactttacgagctcaacaacaacgcaaggctcgagtgcaaatatgtatgattatgcatatttcaaaaaaccaacctatgcagcgactgctaatagtgcgaaccagcaagtagctactgcgaccccatcggcgtatgactatggtcgtgaaacaggttttatgggcttaatgatgagcggtaacatggcaattcaaggaaaagtcatggtctttagctgtgatggtagccatccacgttgttaa

SEQ ID NO: 44173 - DNA, 2034 bp, Acinetobacter baumannii
atgactacacttaattatacggtaaggtttcaaaaaaccgttttagcaagtttaattggtctttttataagccaatcgagttttgctcttgaagaactttctgatgctggtttgagtgaaactactggtgaaggtattgctattttacctcaaaatacttatatggtatttcgtggagcaggagcgaacgaaaccacaaatcaaattttaactgaccgtactaaggatacaggctatatcaattatgtacctgttgggccgttaagtatgacggctgcagataccaataaaaatggtacgattgattcgggtgaccgtgcagtaggtaaagctgatatttttctttatggtttagctctttctaaatctgataacgatacaaatacccgtctcgcttctaccgaggcagcagcggccatttcgagttggggtacggctgttaatccgtggatttttaaagttgcgacagaaaattctgtgccgaatttcagtgcgacaaattgtagtggtgcagctgatccaacttgccaagtaacctatttagctttagaagcgcctttatatgaagtagggacaagagatactgctgggcttgatgcctataaacttaaattaggtttatggtcagatatttttgttcgaaatccaaataaaataaatggtgcgacagatcaatttaattatggtgactctaatggtttgatcggtacgagtactgatgcaagccgtgcgaatcgtttacgtttgcaagctatttggaataactttagtttaaacggtagtcgtctacagctcttccaaactttaggtggtgcaacatctgctggtggaatgagtcccttttataatgatacgttaggtttcgctggtgttattcgtttaaacagtggcgatgcttctaatttaagggcaacaattactgcaaatactccaacctctacagtagggccatgggtaaaccgttatagtacccaatatacaggagcgcctagcaataattcccctagttccgattggttatatcgtattcgtagtcaaacgactactattacttcaacaggttcatggactgcgccaactgacagtacaatgaataatgtattgcgtttgagtactcgtgaatctggtactggtcaggggaatttaattactccagctattaatggagggcttgcaccaacctttgatgcaaacgaaggtttatatctttataacccgaatattaatcttgtattagggtctttatatcaacctctagttttgagttcagatggtaaaaactttagtttggaactagcgcgtattccgaataaacctgaaatttataagaaaatttatactgattatactggtaatgatagtagttatctcggctctacctgtaatgtttaccaatgtggaaagaatgtaactttaggaggaagaacttatcaaggttcgagtgcaacacatagtagtatctcaattggttctactgtttataatgcaaccacaaatactctagaggcatttaaaggaaataatactcaagatgctgtaggtatttcttttggaaaactaccaacaggaacagttgctgctacaacacaaactagaaatttttatcaattacaaaatcaagaacgtcgtgtaaacagctatacatgtagtttaatttttacttgttatgattggcaataccgtacagcaacaggctggacaggaaatgctggttcaggcttaagattcgattcccaaggagcaaactgggcgaatattgatagtactgcttattataatccaacaacaaatacgacaggttataccactactgatgcggggaatggtgctcaatttgttgtaccaaatggtacgcctttacctgatgcactgtataacaatgcacgttggtatacgactacaccaaatgcagatataaacacgtataaattatcgggtgcacagattagctcttcagttagtaataacatgggttcagctgttattgatggtgttttaattcagcatttaaaactgacaactaaaggtctctaa

SEQ ID NO: 44174 - DNA, 1341 bp, Acinetobacter baumannii
atgcgacagtttacgtctcttcaggttgcgatattagcactcggaagtttatgcttttcttcagcttatgctggttctacattagttccaatgactgatgctgagttgtcagctactcgtggtcaggccttaatgagtatgtcttatattgcgcctaatgattcggcaaatctggaaaaattgcgtgatagcagtagtaatgtaggcttctttaaattaagtttggatgcagatattgaacttaatactaatatccggaaactccaactgggctgcggtggtgcaaatggtgctggagcatgtgatatcgatatcgataacttaagtttaagtggtttatctaatacaaatgatgggcgtgctagttcatctgcaaaaattactaatccgtttattgagtttgcaattaaaaatcctaacagtactgctttacgtgaggtgacgggattaagagtaagtgctgaggctattgaaggtttattaacatttggtactgaaaacagtcaaacgaaaaatggtattaattccttaagtggttatatggaagttgcacaagcggggggtacagttaaagtaaaccctgtaaatggtttgagaccagcagatgtaaataatactcaaatttctggggaagcttgtggctatttagcatgtgtaccttttcagacttatgactatacattgaacttaacaactgatgcagctggtacttcaacagataagttaactggaaccctatttcttccacagcaaaccatcactggtaaacgtatttctgtggcgcctttgaaagcaacagccactgtaagtggtattaatgtgtctggtaatattaaagctattgcagccgggttattaaatctagataaatctgtaactggttcaattaataatttagctgtaaatgtagatatttcagaagatctaggatttttccataaagctaacttaaatggttcgcctgtttcattgtctttacaaggaaatgatatacgctggccaggaactaaatcagtagcagaaagggggtggtggttagagctttcaaatccaattgatattggagatattactccagctgaatctgtaagtatcgcaaataaaacaattgaagaaactttagcattagtaagtcagaaattgagcacaggtacgagaggtaatacaaaagtagactgtggtgatttgggacttctaagctgtattggtggtagtactattaatattggtaacttaaatttagcaggtgcaactccagtacaaatgtctttaagcaacttagttctaaaaaatcaaacttttgccaccaattgtcatggagcagatgtaaaattctgttaa

SEQ ID NO: 44175 - DNA, 570 bp, Acinetobacter baumannii
atggctattaagtctgatcgttggattcgcgagatgagcgaaaaacacggcatgattgaaccttatgcagagaatcaagtccgttttgataagaatggcgaaaaattgatttcctacggggtctctagctatggttatgacgtacgctgtgcccgcgaatttaaagttttcactaacgtacattctgcaattgttgatccaaaaaatttcgatgaaaaaagttttatcgatattgagtctgacgtttgtattattccgcctaattcatttgctctagcgcgtacaattgaatatttccgtattccacgtaatgttttgactgtgtgccttggtaaatcaacttatgcacgttgcggtattattgtaaatgtcactcctttagagccagaatgggaagggcacgttactttagaattttcaaataccacgaacttacctgcgcgtatttatgcgggtgaaggtgtagcacaaatgctattcttcgaaagtgatgaaatatgcgaaacctcttataaagatcgtggtggtaaataccaaggtcaaactggggttacacttcctaagacataa

SEQ ID NO: 44176 - DNA, 594 bp, Acinetobacter baumannii
atgatttcatggctttttattggcttggttgccactattttacttacccctggcccaacaaatactttacttgcatcatcaggagtacaagtaggccttaaaaaatctgctaaattaattccagcagaagttctagggtatgtgatttcgatttcagcttggggaatgttaatcgggaaagtttctgcaacgcttcctttattacctcctatacttaaattgctcagtgcttgttatattatttttttagcaattaaattatggcacacggcaaatcaacagcttgaactagatcagccaactattcgcccacgtgaattattttgtgcaactttactaaatcctaaggcattactttttgcttcagcgattttccctgttgcagcgtggactaattttcatatttatctcattcatatgctggcttatttagctttaattaccccaattgccttattctggatttttttagggtcagtcttggctgcaaataaagtacgttggttaaatcaatcaaatttacaaagaacagcctcgttggttttagttagtttctcaattccaattagctattctgctttattaaatctttaa

SEQ ID NO: 44177 - DNA, 747 bp, Acinetobacter baumannii
atgagaaggtatgacaatgctacaacggtagagaatgaaggtgaaatactagcaggcttccaatacagaagcttgctgagttatcgggcctatcatcatataaaagatataaagtatggttcgaagaaccgatcaacgctggatttttttcctttagaacatgccaataaaaccgtaatttttatacatgggggatattggcagtggtgtgataaatcggactttgcctttatagcgccgtatatattagcaaaaggagcacagtgtgtacttttagaatatgacttggctcctcaaagtcatatttcacaaatcgttgctcaaactcaacaagcgctcgattttgtcgctgaacaaaattggaaaacaggcgaagtagtattggttggccattcagcaggtgctcatcttggtgctttatgtttaaaccatccgttattatccaaggcaactttattaagtgggatttatgatttattacctatacaagagactcatttaaatcacgttttaaacttatcgcaagaggatattttgaaatatagtcctattcatcagcaggaacagatcaatattccttgtacgattttgtgtggtgggttagaacttagtgaattaaaatggcaaagtcaaaattattttgagtaccgacttagtcaaggtgacgatatgatttcttttgaaattattcctgagattaaccattactctattttagagcactattttaaatttatatttaagtga

SEQ ID NO: 44178 - DNA, 1407 bp, Acinetobacter baumannii
atgagtagttttgatgaaatacaaaatagagaagctgggctgcataaaaagttatctgcaaaacagatggggatgattgccattggtggagcaattggaaccggattgtttatgggaagcaaatttgcaattagctttgcaggtcccgcagtcatagtcagctatgcgattggtggtttaattgcttttgcgcttatggcttgtttggctgaaatgacagttcagcatcctacttcgggctcatttggtgcatatgcagaacattatataagtccacttgtcggcttcttagttcgctactgttactgggcttgtattgtactggcggtaggtacagagattaccgccgttgctgattatatgaagctctggttcccgaatgtaggctcttgggtctggattggatttttttcactgaccttacttgttgtaaatgcctatagtgttaaagcttttggactagtggaatactggttttccacaattaaagtttttgccattatcgtgtttattcttttgtctattggtatcttgacgcaaagcaatcagggaatgacgcaagttgtaactcatttatcaggacatgggggcttttttccaaatggttttagtggggtatggattggtgtcattatttcaatatttagttatttaagtatagaaatgattgctgtcgcggctggcgaagctaaacacccggaaaaggcagttaaaaaagcattcaaaagcacagcacttcgactcattttgttttatttattgtccttattcctaatcgttactttggtgccgtggactgttttgattggagcagatgcaacaagcccttttgttatggtcatgaagattgtcggtatcccgtatgcggatagcattttaaactttattgtaattgtagctgccttatcagctatgaatagcatgctttatatttcaactcgtatgctgtttagcttgtcacgtgcaggtgatgccccaaaagtctttggtcgaattagtagtaatggggtgccggtaaatgcgctgttgttatctgcggtagggattggtattgctagtatcgtttatacgattaatccagcttccgcatttccaattatgattgcgctatccatgtttggtgcgttgttcacgtggggaagtatatttgtgactcatatgttttttagaagacatatggttcagcaaaatatacaactaaaatttaaaattcctgctagtcgatttatctctttgtttgggtttattgcgattttaagcattacagtgactacctggtttaccagtgaatttaagtctactttacaatttggcgtacctttagttctggttcttatatttttctattatttgaaacgttctaccgtaaagttaaatctcaactctagtgaagaaacattgaagtga

SEQ ID NO: 44179 - DNA, 1251 bp, Acinetobacter baumannii
atgattactcgtgaacagtgtttgtattgggatcaggaagatgaactcaaaaaatttaaagatgaatttgcattgccagaaggcgtcatttatttagatggtaactctttaggtgctagaccaaagaaatctttggctgtcgctcagcatattatttcccaagaatggggagaagatctgatcaatagctggaataaggcagactggtgggggctaccaacacggctgggtgacaaagtcgctaaactgattggtgcggaaaaaggtgaagttgttatttcagattcaactacactgaacttatttaaagttttatctgcagcggtaaaaattcaggctgataaattccctgaacacaaaattattgtggcagaaaaagatgcttttccaacagatatttacattattgaaggtttcattgacttaattcaaaagggctatcaggttgaattaattgatggcgtagaagacttatctcgtgctttagagaaagatgttgctgtagtggtactttcccatgtgaattaccgcactggttatttttatgatatggcatctattaatgaacaaattcattctaaagatgctttggtgatttgggatttatgtcactcagtcggtgctgttcctatgcaccttaatcaaactgatagtgattttgcgattggttgtacctataaatatttaaatggtggccctggttctcctgcattgctctgggtcaatgaaaagcaccgtgatcagttctggcagcctttatcaggttggtggagtcataaaaaaccatttgatatggcacagcattatgagccagcgaatagtatccgccgatatttatgtggaactcagccggttatttctatgagtctgattgaatgcggagtggatattttcctgcatgctgatatgcaaaaaatccgtgagaaatcgttgaaattaacagatttatttattcaattggtacatcaagaatgttctgaattcggatttgagttaattacgcctttagatcataaacatcgtggtagccatgttagttatcgtcatgaattcggttatgaaattattcaggcacttattgcacgcggtgtgattggtgattatcgggaacctgcagtcttgagatttggtattacacctttgtatctgggctttgaagatatttggaatgcagtacagcacttaaaagaaaccatgctgaatagtgaatggaaaaacaagcagtatttagttcgcggtgaagtgacctga

SEQ ID NO: 44180 - DNA, 450 bp, Acinetobacter baumannii
atgaatgtagatgcgatcgatctaaaaattttgaagtatttacaagacaatgcccgtttaagtaaccaagaacttgctgatcttgttaatctttcagcatctgcttgtcacagacgcgttaaaattttagaaaccaacggaatcattgaaaaatatcaagcaaaagttaattatgaaaaattaggtataaaaattgaggcaatagttgaaataaaacttgctcaactcaccgaaaatgaccacaacttttttttaagccaaatcaagaattttgatgaagtcatcaatgcttatatcattacaggtgaatctaattatgtactgcacgttgccactaaagatctaaactctttttctcattttgttattaatacactcaataaaattaaaggtgtggtaagcattaactcaaaaattatcttacagaaaattatacaaaagccactgtag

SEQ ID NO: 44181 - DNA, 537 bp, Acinetobacter baumannii
atgatcgaaactgaacgtttaatcttaagacaatggaaagagtctgattcagagccatttatcaaaatgggtttagacgaaaatgttatgcgttttttcccaaagcttttatctgctactgaaagtataagtttaattcaaagaatatcagctcttattgatgaaaatggctggggattttgggcggtagaattaaaagaaactcaagaatttataggctttattggcttacacaaccaaccagaacaatttgatttttctccctgcattgaaattggatggagaattgctacagaacactggaaaaaaggttatgccactgaaggagcaaaagcagcattggactatgcctttaatattctcaataaagataaagtggtttctttcacagcaacagtgaataagccatctcaagccgtgatggaaagactaggaatgcgcaaagttaaatactttaatcatcccaagcttccagatgaacatgccttacaaaagcatgttctttatgaaatatatcatcctaagcttgagttatga

SEQ ID NO: 44182 - DNA, 294 bp, Acinetobacter baumannii
atgaaaattggatttattggaggagccaatgatggcatagtgatcaatgctgccaatggtattgatacttataaacttgaatggcattacaaggctgagaagcattgtgaagaacagccatcattagggctaaatggccctgaatatgactattacaatttattaattttgagaaaaaataaagaggcaaaacttttctacgttttaactaccatggacaaagaagatattgcggataagattaatgagtattgggagcactccacctctgtaggttatgactttgatgagtag

SEQ ID NO: 44183 - DNA, 237 bp, Acinetobacter baumannii
gtgggattatatacaattagatatggttatcgtaacaacagtttttttattgcttcaaacatggctggacagtttattgtgattgatgcattaggagcagatttccagattggtcatcaaatttcttatgaagggagcaaaataataaacgaaacattaaatgatgaaacggaagcaaaagttcatcttgagagcaacgaaaaagaagcttatgagtatttacggacaatgaaataa

SEQ ID NO: 44184 - DNA, 360 bp, Acinetobacter baumannii
atgaaaaattctaatttctttgttgtttttatcggttctatttgttttacatttagtgcaaatacattggcacaaaatacaactgcagttttttcacctaaaagaggtgtagtctgtgataaatatatttgtgcagataaaaagggagtttccaaatccttaactaatcaatatttaggtgcaaaaaaagcaaaacaagctttttcacaaggtgactttgatacatctgcttttactttttctaatggtgtattttgtgataccactactaaattatgccatgtgaataaattttttgaaaatggccatagaagtagagtagataaaaaaatgactgataaaatttttaaaaatagatag

SEQ ID NO: 44185 - DNA, 687 bp, Acinetobacter baumannii
atgaataaggtagtgctgtttgacatggatggaactttactagatttagcttttgatgactttatctggaacgaatgcttacctaaaagacattctgaaacacatcatctatctttaactgagagtcaagaaatattaaaccagttttatcgcagccataaacatacgcttgcttggtactcatcaaattactggacacaaacaactggcgtggatgttttaaagctccagcaagaatttcagcataaaattaaagcgagaccaggatgcatggagctgctcagcgctttaaaagcacaagattatcaatgttggctagtcaccaatgctgactgtgcaagcctaaaattaaagcttgataacgttcctatccaagatttttttgaagtcatcgtatctagcgaacaaattggttacgcaaaagaagacatccaattctggaaagagttgcaacgcttgcatcattttgcgccagaaagcactatttttttagatgacactcttcctgttttaaaaactgcagaaaaatttggtataagacacttgtttactatcttacagccctcaagtcttaagagtataagacagccacaagatttagagtataaagctctaggtcagcttacagagctactgtctattttgaatcaaattgatagaaaggataatgatgtcaaaattgcgtga

SEQ ID NO: 44186 - DNA, 441 bp, Acinetobacter baumannii
atgtcaaaattgcgtgaagacgatgctgtagaaaccatgcgtgtcgacaaatggttgtgggcagcacgtttttttaaaacccgttctattgctaaagctgcaattgaagggggtaaagtacatcacaataatgaacgtgtaaaagtttctaaagaaattcgtgtcggtatggagctcgttgttcaacaaggtttcgataaaaaaacagttgttgttaaagcgctctccaatacccgaggaccggcccctgttgcacaacaactttacgaagaaacagaagtaagtattgcaagacgggagttgattgcttcccaacgaaaattgcataatctagcacgacctgaccatagaccaagcaagaaagatcggcgacaaatcaatcggtttaaacaggataatgatcaacattatgaagatcactggtcttataatgatgaataa

SEQ ID NO: 44187 - DNA, 1050 bp, Acinetobacter baumannii
atggatgagaataaaagcaaagcattacaagccgctttgagccaaattgagaagcaatttggtaaaaatacggttatgcgtcttggtgataacactgttcaagcagttgaagccgtatctacaggttctttaactttagacatcgcattggggattggtggtttaccaaaaggccgtattatcgaaatttatggtcctgaatcttctggtaaaaccacaatgacattgcaagcaattgctcaatgtcaaaaatctggtggtacatgtgccttcattgatgctgagcacgccctagaccctcaatatgcacgcaaacttggtgtagatattgataacctacttgtttcacaacccgacaatggtgagcaagcacttgaaattgctgacatgcttgtccgttcaggcgcaattgatttaatcgttgtggactcggtagctgcacttacacctaaagcagaaatcgaaggtgagatgggtgactctcatatgggtctacaagcgcgtcttatgagccaggcacttcgtaaaattacgggtaatgctaaacgttcaaactgtatggttatcttcattaaccagattcgtatgaaaattggtgttatgtttggtagcccagaaactaccactggtggtaacgctcttaaattctacgcttcagttcgtttagatattcgtcgtatcggtcaagtaaaagaaggcgatgaaattgttggttcagaaactaaagttaaagtcgttaagaacaaaatggctcctccgtttaaagaagctattttccaaattctatacggtaaaggtactaaccaactaggtgaacttgtagatttagctgtacaacaggatatcgtacagaaagctggtgcatggtattcatatcaaggcaataaaattggccaaggtaaaaacaatgtaattcgctattttgaagaaaatactcaaatagctgaagaaattgaacgtaatatccgtgaacaattgctgactacaggcacaaatggtgcagttcaaattgaagatgaagaagagccagatcttttattagaatcgtaa

SEQ ID NO: 44188 - DNA, 483 bp, Acinetobacter baumannii
atgttcaaaagaaacgatgagcaatctcagcagcgccctcctcttactggccaacgtttacgctcatatgcttttgctttactcactcgccgagattactctaaagcagagcttatcgagaaattagcccgttacgcacaaaatatagaagaagtaaaacaactggttgaggaattatctgaacaaaattaccagagtgatcagcgtgttgctgagcaaatgctagcaagccaaattcgtaaaggtaaaggaccgaaacggattcaacaagctttaaaaactaaacaaattgaaaatgatttaattgcagatgaaattcaagaaattgattgggtagaacaagcttatcaacttaaagttaaaaaatttggagaagctgtagagaaagatccaaaacttaaagcaaaacagatcagattcttacaatatagaggatttgatttagatgtaattttaaaagcaatccaaagaaaattggattaa

SEQ ID NO: 44189 - DNA, 885 bp, Acinetobacter baumannii
atgcaaatgaagaagcattctttattatttattgccttaatgagcaccacttctctatacgcaaatatccctatcgagtctcgtggtttaagtcaaaatgatggtagtgcatctaatacttcttcaagcaatatttcagttcctacaaatttaaactgggaactcatgcaaaaaaaccaacaattagaaaatgatattcgtacattaagaggtcagcttgaagaacaagctaatgatattgagcaattaaagaaagatctagcaaaccgatataccgatttagatcaacgtttagaattattacaccaaaaagttgaccctgacagtgctacacaagacgatagttcaaatacaacgtccgataacactactcctgctagtgcaccagcccctcaaaccacagagagtaataaagtagcggcagtaccagccacacaaacttctgagcagcagcctagcgcactaacaaccactactcaaccagcaccagctgctgcgcaaaaccagtcaaattccctcgaattagaaaaagctgcttatactgtagctttagatgcatataaacaaggtggtgctaaaaaagcaattgctccaatgcaaaactttataaaaaaccatcctaatagtatctatacaggtaatgcttatttttggttagccgagtttcatttagccacagatccagtaaattataatgaagcaaagaaaaactataatgtcgtagcgaaccaatacccaaattcaagtaaggcacctcgagcattgtaccaactttatagtatcgctaaagatgttgataagaatactgtgtcagcaaatcaatacaagaacaagttacttagccaatatccaaagtctgaagaagcaaaattctttaacaaataa

SEQ ID NO: 44190 - DNA, 789 bp, Acinetobacter baumannii
atgagcaatcacgatttaatccattctaccgccattattgatccatctgcagtgattgcttcagatgttcaaatcggaccttattgtattattggtcctcaagtgactattggtgctggtactaaattacattctcatgtggttgtaggtggttttaccagaattggccaaaataacgaaatctttcaatttgcaagtgttggcgaagtttgccaagacctcaaatataaaggtgaagaaacgtggcttgaaattggtaacaataatctaattcgcgaacattgcagcttacatagaggtacggtgcaagataatgcattaaccaagataggtagtcataacctattaatggtaaatacacatattgcacatgattgtatcgtaggtgactataatatctttgctaataatgtaggtgtcgctggacatgtacatattggtgatcacgttattgtgggtggtaattctggaattcatcaattctgtaagatcgattcttatagcatgattggtggagcttctttgatccttaaagatgttccagcctatgtgatggcgtctggtaaccctgcacatgcgtttggtataaatattgaaggtatgcgaagaaaaggttggtctaaaaatacaattcaaggcttaagagaagcttataaattgatatttaaatctggattaacttctgttcaagctattgaccaaattaaaagtgaaattttaccttcagttccagaagctcaactcttgattgattctcttgaacaatcagagcgtggaattgtgcgctaa

SEQ ID NO: 44191 - DNA, 486 bp, Acinetobacter baumannii
atgaccgagtctactacacctaaatttgccatccctgaattaccaatgcagattcaaacgattcgtcaatatttgccgcatcgttacccattcttattggttgatcgtgtgactgaagttactgacaatagtattgttggttataaaaatgtttctatcaatgaagagttcctacaagggcatttcccagaatatccaattatgcctggtgttctcattgttgaagcattagctcaagtttcaggcgttcttggttttattatgaacaatgaaacgccaaaaccaggttcattattcctgtttgctggtgcagaaagagttagatttaaaaaacaagtagttgcaggtgatcaacttgtattaaaatctgagttggtaatgcagaagcgcggtatctacaaatacaattgtacagctagcgttgatggcattgtagcagcaaccgctgagattatgatttcacaccaaaaaacagagcaggcatga

SEQ ID NO: 44192 - DNA, 1071 bp, Acinetobacter baumannii
atgaaagtgcaacaatatcgtttagatgaattagctcaccttgttaaaggtgagctaattggtgaaggtagtcttcaattttcaaacttggcgagtttggaaaatgcagaggttaaccatcttacttttgtgaatggtgagaaacatctcgatcaagctaaagtaagccgtgcaggtgcttacattgttaccgcagctttaaaagaacatcttcctgaaaaagataattttattattgttgataatccctatcttgcgtttgcaatccttacccatgtatttgataaaaagattagctcaacaggcatagaaagcactgcccaaattcatccatctgctgttatttccgaaactgcttatattggtcactatgtggttattggtgagaattgtgtagtgggcgataataccgtcattcagtcacataccaaacttgatgataatgtagaagttggaaaagactgttttattgattctcatgtcactattacaggtggttctaaattacgagatcgcgtccgtattcattcaagtactgtcattggtggagaaggttttggttttgctccatatcaaggaaagtggcatcgtattgctcaattaggttcagttttaattggaaatgatgtccgaattggatcaaattgtagtattgatagaggcgcacttgataatacaattttggaagatggggttattattgataaccttgtgcaaattgcacataacgtccatattggttcaaatactgctattgcagcgaagtgcggtattgccggaagtacaaaaattggcaaaaactgtattctagctggggcgtgtggagtggcaggacacctttcaattgctgataatgtgactttgactggaatgtcaatggtcacaaaaaatatttctgaagctggaacttactcttcgggaaccggattatttgaaaataatcattggaaaaagacgattgtacgcttgcgacaattagcagatgtgccattgacccaaatcactaaacgacttgatcatatacaagctcaaatagagtctcttgaatcaacttttaatttgcgtaaatag

SEQ ID NO: 44193 - DNA, 504 bp, Acinetobacter baumannii
atgaataaattaaataaattaatgttagggttaggcctgacggtggcttctgtagcagctaatgcagctggttatggggtaattgatctagctaaagttgttgaaagtagtacttatttgaaacagcaaaatgcaagcttaaaccagtcagtgaaaccaactacaactaagcttgagcaattaggtaaagagttagaagggcttcaacgtcaagcgcagactcaaggccaaaaaatgaaagaagatgagattaaaaaattacaatctcagtatcaatcaaaattaaatgaatttaattcaacacagcaaggcttacagtcaagagttcaaacgagcttacaaagtatgaatacaacttttgagactagagttaagcaagctgctgagcaattacgaaaagaaaataatcttgactttattttgaataaaaattcgactgttgcctatgacgctaagtatgatttaactgataaaatgatacaaaaggttaattcaatgaaataa

SEQ ID NO: 44194 - DNA, 2511 bp, Acinetobacter baumannii
atgcggcacacacattttttaatgcctttggcacttgttagcgctatggcagcggtacaacaagcatatgcagctgatgatttcgttgttagagatattcgtgtaaacgggttggtccgtcttacccctgcaaatgtttataccatgttgccaatcaacagtggcgatcgcgttaatgaaccgatgatcgccgaagcaattcgaacattgtatgccactggactttttgatgatattaaagcatcaaaagaaaatgatactttggtttttaatgttattgagcgcccaattatttcaaagcttgaatttaagggtaataaacttattcctaaagaggctctagaacaaggcctcaaaaaaatgggtattgctgagggtgaggtttttaagaaatctgctttgcaaaccattgagacagaattagagcaacaatatactcaacaaggccgttatgatgctgatgttacagttgatacagttgctcgcccaaataaccgcgttgaattaaaaattaatttcaatgaaggaacgccagcaaaagtctttgatattaatgtaattggtaatactgtttttaaagacagtgaaattaaacaagcatttgcagttaaagaaagtggttgggcttcagtagtcacacgtaatgaccgctatgcacgtgaaaaaatggctgcaagccttgaagctttacgtgccatgtaccttaacaaaggctatattaattttaatattaataattcccaactcaatattagtgaagataaaaagcatatctttattgaggttgctgttgatgaaggtagccagtttaaatttggtcaaactaaattcttaggtgatgcgctttataagcctgaagaattacaagctttaaaaatttataaagacggtgatacctattcacaagaaaaagtaaatgcggttaagcaattacttttacgtaagtatggtaatgcaggttattactttgcagatgtaaatattgtgccgcagattaataatgaaactggcgttgttgacttaaattattatgtgaatccaggtcaacaagttaccgtacgtcgtattaattttactggtaatagcaaaacttctgatgaagtattacgtcgtgaaatgcgtcagatggaaggtgcattagcgagcaatgaaaaaattgacttatctaaagttcgtttagagcgtacaggtttctttaaaaccgttgatattaaacctgctcgtattccaaactctccagaccaagttgacttaaacgtaaatgttgaagaacaacattcaggtactactacattagcagttggttattcgcaaagtggtggtattacgttccaagcaggacttagtcaaactaactttatgggtacaggtaaccgagttgcaattgacttatctcgttctgaaactcaagactattacaacttaagtgttactgacccttactttacaattgatggtgtaagccgcggttataatgtctattatcgtaaaacgaaactgaatgatgactataacgttaacaactatgtaacggatagttttggtggtagtttaagttttggttaccctattgatgaaaatcaaagtttaagtgcttcggtgggtgttgataatactaaggtaacaacaggtgcatttgtatccacttatgtacgtgattacttattggcaaatggtgggaaaactacttctacaaatacgtactgcctcgttgatcttgttcaagatccccaaacaggattatataaatgcccagaaggtcaaacttctcaaccttatggaaatgcgtttgaaggagaattctttacttataacctgaatttgggttggtcgtacaatactttgaatagaccaatctttccaacatcaggcatgtctcaccgtgtaggtcttgaaattggtttaccgggtagtgatgttgattatcaaaaagtaacttatgatactcaagcatttttccctattggaagtaccggctttgtacttcgtggttatggtaagcttgggtatggtaatgatttaccattctataagaacttctatgcaggtggttatggctctgtacgtggttatgataacagtactttagggcctaaatatgccagtgtaaatctacaagaagagaaaaaaaatgactcttctccagaagaagtgggtggtaatgctctagtgcagttcggcacagaattggttttaccaatgccatttaaaggtgactggactcgccaagtacgccctgttctatttgctgaaggtggtcaagtatttgataccaagtgcgacgttcgatcttattctatgattatgaatggtcagcaaatttctgatgctaaaaaatactgtgaagataattatggatttgatttaggtaacttgcgttatagtgtgggtgtcggtgtaacctggattactatgattggtccattgtcacttagctatgcattcccgttaaatgataaaccgggtgatgaaactaaagaaattcagtttgaaattggtcgtactttctaa

SEQ ID NO: 44195 - DNA, 1356 bp, Acinetobacter baumannii
atgaatgcactgtttatgattgcagcggcagctcttttacttgggcctctaattgcaatccatgagtttggccattactgggttgcgcgaaaacttggtgttaaagttttagtttactcaattgggtttggaccaactttactgaaatggacgtctaagaagtctggtattaaatatcagctttctgccttacctttaggcggctatgtcaaaatgttggacgagcgagaaggtaatgtggcagaacaagatctaccatatgcttttaaccggcaaaaaccgtggaaacgtatagcgattgttgctgctggaccattaattaacttgatttttgccgtactcctcttttggattttgtttttaccagcccaagaacaattaaatactaaaattggcaaaattattccaaactctccagctgcagcagcccagttacatgtaggtgacaaaattattgctgttgatgggaaagagacaacaacatgggaaaagctaaactttgctttgattgatcgagttggggaaacaggtactgtaaatattgatgtggaccgtgctggttccgaaaaaaattttgtattaccaattaaagattttttaaaaaatcaaaatgaatctgcactggacgtattaggtttcttaccttatcgacctgtgattcctgctgttgtaacagagttaacggaagatggtgcggcgattcgtcaagggatgaaagtgggcgatcgtattgttgcgattgatggccagcctatgaaagattggttcgacgtggtagaagttgtccagcgttccccagaaaagttacttaagattgatgtcttacgtcatgaacaactagtacatttacaagttatgccacaaggtaagcgtgatagcatggggcaggtaaatggagtacttggtgtaaaaagtgatgctggaaaaattacaattcctgacgaatataagcaaacaattcaatatactccaatacaagcttttgaaatggcacttgataaaactggccaaatctctagcatgattttgaactcaatagtaaaaatggttaagggactaattggattagaaaatctttctgggccaattaccattgcaaaagtagctggccaaagtgcagaaatgggttgggaaacctttatctcttttatggctttaatgagtgtaagtcttggaattttaaacttattaccaattccaatgttagatggtggtcatctagtgtattacattattgaagctattcgtgggaagcctgtttctgaacaaatacaaatgtttggtctaaaaattggtatggtactgctcggtagtatgatgcttttagctttatttaatgactttatgcgtttgtaa

SEQ ID NO: 44196 - DNA, 1197 bp, Acinetobacter baumannii
atgacacaatctgtttgcatattgggtgtaaccggttctattggacgaagtaccttaaaaattttaggtcaacatccagataagtattcagtctttgcagtttcggcgcatagtcgaatttctgaacttgttgaaatctgcaaacagtttcgacctaaagttgttgttgttcctgaacagaaaatagctgaattaaaaacactatttgctcagcaaaatatatcggatattgatgttttagctgggcaagagggtttagtcgatatcgcatctcatacagatgtggatattgttatggctgcaattgtaggggcagctgggctgttgccaactttagcggctgttaaggcaggtaaacgagtactacttgccaataaagaagcattagttatgtctggtgaaatcatgatgcaagctgctcgtgatcatcaggcattgttattgccagttgattctgaacataatgcaattttccaatcattacctcataattatttacaagcagatagaacagggcaaccacagctaggtgtatctaaaatattgcttacagcatctggtggtccctttttaaatcactccttagaacaattgactcatgtaacgccgcaacaagcatgtaaacatccaaactggtcaatgggacaaaaaatttcggttgactcagctactcttatgaataaagggttagagttaatagaggcttgtcatttattttcaatatctgaacattttgttacagttgttgttcatccacaaagtatcattcactctatggtgcagtatgttgatggttcaacattagcacaaatgggtaacccggatatgtgtactccgattgcacatgcattggcatggcctgagcgtttacaaactaatgttcctgctttagatttatttgagtattctcaacttaattttcaggcaccggatacccaaaaatttcctgcattaaatttggctagacaagcaatgcgtgcgggaggtttggcaccaaccattttgaatgcagctaatgaaattgcagttgaagcattcttaatggaaaggattggatttacaagtattccgcaagtggtagagcatactttggaaaaattagagaatgcagcggctgaaagcatcgagtgcattttagataaagataaagtggcccgatctgtagctcagcaatatatatcaagtattggaggctga

SEQ ID NO: 44197 - DNA, 825 bp, Acinetobacter baumannii
atgttagagcggattgttaccgcattggtacttgttgcagttgttttgggctgtatgtttgctacgcaatcacattatccaatgttggtacttatgattgtagcagcaggagttgcggggtatgaatggtataagttaatgcctcgggaagttggtgcagtagtaaaacctaaagcttggggttatggtctacttgttgcctttgtttctggtgttgccttattctttcatgacattgctttactgttatggtctgcttcaattttaacttggctcgttagtgtttattgggttaagtcttttcctgaattcgatgggtggtataacgcgaccctatatgtcattggtttgattcttatctgtgcagcagtgactgcaatctttgtagtatggcaaagctcaccatggtggctgatgtatttgttcttgcttgtgtggggtgcagatagtggagcttactttgtaggccgtaaattcggtaaaagaaaattggcgcctacagtaagtcctaataaatcagtagaaggtttatatggcggtattctcactacaattattgtaatgcttgtggtgcaatatcaatatttaaacctaacttgggttcaacaacttctattcttgattttgtctttaattacagtgttcggttcagtattaggtgatttatttgaatcaatgatcaaacgccgtgctggtattaaagactctggccgtgttttgccaggtcatggtggtgtattggaccgtattgattctttactcgcagcagccccgatttttgcaacgggaatgtatatattaaagcttattggtgtagatttatag

SEQ ID NO: 44198 - DNA, 753 bp, Acinetobacter baumannii
atgaccgattcagaagagtatcatcttcctcagcatgttgccatcatcatggatggcaacaatcgctttgcaaagaaaaatcaaatgcaaaaaggcgatgggcacagagagggtaaaaatgttcttgaccctattgttgaacattgtgttaaaactggcgttcgtgctttaactgtttttgcattttcgagtgaaaattggaatcgaccacaatatgaagtcgatctgcttatgaaacttcttgaagaaacgattcatgagcaaatacctcgcatgaagaaattcaatattgctttgcgctttataggggatcgttcccgattaccttcacatttagttgccttaatggaagatgcagagcaacaaacagcacatcatgacgccatgacattaactattgcggtaagctatggtggtatgtgggatattgcaaatgcagctaagcaggttgctcaagcagtttcccgtggcgaaattgacgctgatcaaataaatgttgatttgttcgaaaaatatgtcagtctaaacgatctgccagctgtggacttgttgatccgtacaggtggagatttccgtatatctaacttcttgttatggcaagcggcttatgcggagctgtattttacggatactttgtggccggaatttacagtggaagaattcgaccatgcattgaatgtcttttcagggcgtgaacgtcgtttcggtaaaacatctgaacaaattcagcaagagaaaatcgagaaattataa

SEQ ID NO: 44199 - DNA, 555 bp, Acinetobacter baumannii
atgattaacgatctgaaaaaagacagcgaacagcgtatgttaaaaactcttgagtctttggaacaagggtttgctaaagttcgtaccggccgtgcacacccatcaattttaaatggggtaatggttccttactatggttctgatgtgcctttaaaccaagtagcgaacgttggtgttgaagattctcgtacgcttatcgttcaaccatttgaacgtacgatggttgctgcaattgataaagcaattcgtgaaagtgatttaggtttaaatcctattactgctgattcaatccgtgtacctttaccagctttaactgaagaaacacgtcgtgatatgcagaaaatcgctcgcagtgaagctgaaaatgcgaaagttgctatccgtaatattcgtcgtgatgtattaggtgatatcaaggcattattaaaagagaaagaaatttctgaagatgatgagcgtcgtgcaggcgatgatatccaaaaaatcactgataaatatgttgcagaagtagacaagcgtctagcagcgaaagaagcagaattgatgaaggtctaa

SEQ ID NO: 44200 - DNA, 729 bp, Acinetobacter baumannii
atggcggaaacaatcagcccccgttattcacgaattttattaaaattatctggtgaagctttatcaggtaataaagatatgggtattgatgctcaagttttagatcagatgtcactttctattgcacatttggttggcttgggtgtgcaagtaggtatcgttgtgggtggcggtaacttatatcgtggtagccagttacaaaaagacggtttggttggtcgtgtaacaggtgatcagatggggatgcttgcaactgttatgaatggtttggcaatgcgtgatgcattggtgcgccgtaatatcagaactcgtcttatgtcagcgctaccaatcggtactgttgtagagtcttactcaagtcgtgatgcgattcgtcatttaagccaaggcgaagtgtgcgttttcgtagcaggaacaggaaatccattctttacaactgatacagcagcatgtttacgtggtattgaaattgaagcaaatttaattttgaaagcgaccaaagtagacggtgtttataataaagatccgagtaaatacgaagatgcggtgaaatatgaccatttaacatttgaccaagtgttagatgaaaaactgggtgttatggatttaacggcaatttgcttatgccgtgaccataatgttccattacaagtatttgatatgaataaatctggtgcgctattgtcagtggtaatgggtgaaaaagagggtacacgcgttactaaataa

SEQ ID NO: 44201 - DNA, 1344 bp, Acinetobacter baumannii
atgaagacccccaaagtcggttttgtttctttaggttgtcctaaggcattggtagattctgaacgaattttaactcagttaaagactgaaggttatcaagttgcatcagattatgatggtgctgatttagttgttgttaatacctgtggttttattgaatctgcagtacaagaatctttagatgcaattggcgaagccatgagtgaaaatggccgagttattgtgacgggctgtttaggtaaagacgaagataaaattcgtcaaatgcaccctaatgttctaaaagttactggtgcagcagcttatcaagacgttatggaagctgtacatgaatatgtcccagcaccgcctaaacataatccgtttattgaccttgttcctgaacaaggtatccgtttaacaccgaaacattatgcttatttaaaaatatctgaaggctgtaaccaccgttgtaccttctgtattatcccgagcatgcgcggtgatttagtatcacgtccggttggaagcgtattagaagaagctgctgcgttaaaacgtgcaggtgtaaaagaaatcttggtcatttcccaagatacctcagcttatggcgtagacaccaaatataagctcgatttctggaatggacagcccgtaaaaaccaaattctttgacatgtgtgaagcacttggtcagcttggaatttgggttcgcttacattatgtatatccatatccacatgttgatgcagtaatcgatttgatggctcaaggtaaaatcttgccataccttgatattccattccagcatgcaagcccacgcgttcttaaattaatgaaacgtccggcgcatagtgaaaatacattagaaaaaattaaattatggcgcgaaaaatgcccggatcttgtgatccgttctactttcgtggttggctttccaggcgaaactgaagaagacttccagattttgctcgattggttggttgaagctcaacttgatcgtgtaggctgctttacctattcaccagtagaaggcgctacggcaaatgatttaccagatcatgtgccagaagaaattaagcaagagcgttacgagcgctttatgcaagtgcagcaacaaatctctgctgccaaattacaaaaacgtattggtcaaacgatgactgtattggtcgatagtttggaagatgaatatcctgttgctgttgcacgttcttatgccgatgctccggaaattgacggtaatgtctttgtagaagatatcgataagagcactattcaaccaggcgatatgttggaagtcgaaattaccgatgcggatgaatacgacttatttgcaaagttaattaaaattaaatcggtctaa

SEQ ID NO: 44202 - DNA, 1110 bp, Acinetobacter baumannii
atggatcaacacacacctatcgactatcgcctattggtagacaatttaactactgcgattttattaatcgatagtaactttaatattttttatttaaattccgcttgtgaagcactttttgacattagtttgcttcgcgcttctggacaaccggttttaaatttacttcatgcgcctgatgatacctttaatacgcatgaagccttattgaacacattaaaaacgggacaaccttatacacgtcgtgaagccatcattaatgtcaattttaaagatttacatgtggattatacggtctcgcaattaaatgcaggtaaaagctaccacccgctgttacttattgagttaaatcctattgatcgtatgttgaaaatttctaaggaagaaaacctaattcaacaacatcaagtggctagacaactggttcgaggcgttgctcacgaaattaaaaatcctctggctggtattcggggggcaactcagttacttgctcgtagtttaaatgacgagagctatgctgaatttacagatatcattattaacgaggtagatcgtctcaccaatttggccgataccatgttgggctcaagacaattgccaagttatgaaaatgtaaatgtgcatgaacctctagaacgggtacgctctttaatcgcaaatcagaccaagaaaaaaatcaaaattacgcgtgattatgatttgtctctacccgatgtaaaagccgatcgtgaccaactcattcaagtcatgcttaatattagcgttaatgcgattcaagctattacagaaaataaatcattttttacagatcaagagcctgaattaattttacgtacccgtattcaacgtctagtcactattaatggagtactcaaccgctctgctgtacgagtcgatattgaagacaatggaccgggtattcccgaaagcattttagagtctgtgttctatcctttggttacaggacgagcaaaaggcacagggcttggcctgagtattgcacagaacatcatgcatcaacataacggaatgattgaatgccaatcagttcctggaaaaacaatgtttagcttatatttaccttgggagtcagaccgtgtcgcgaaataa

SEQ ID NO: 44203 - DNA, 1494 bp, Acinetobacter baumannii
gtgtcgcgaaataaaatatgggttattgatgacgatcgcgccatgcgatgggtacttgaaaagacctttaaagaagaaggatttgacgtcaccaattttgaagaagctcaaacagcacttgaacgtttacatcatgatgcgcccgatgtcatcttaactgacattcgtatgccaggtattgatgggttaactttcttatctaaagtgaaaaactctcaccccgacttgcctgttatcattatgacagcgcattcggacttagagtctgctgtatcaagctatcagactggtgcatttgagtatttaccaaaaccattcgatattgatgaagctttagctttagtcaatcgagcaattttgcatatcaataagttgcagcagcaagaggcgacaaaaacagcttcaccactacaatcaacagaaattattggcgaatctcctgctatgcaagaggttttccgagcgattggtcgtttatctcagtcgcatattaccgttttaattaatggtgaatcaggcacaggtaaagaactggttgcgcatgctttacataaacattctccacgacgcgctaagccttttattgctttaaacatggcagcaattcctaaagatttaatcgaaacggaattatttggtcatgaaaaaggtgctttcacgggtgcaaacacccaacatcaaggtcgatttgaacaagcaaatggcggaacactattccttgatgaaattggtgacatgccctttgaaacacaaactcgactactgcgcgtactcgctgatggtgagttctatcgtgtaggtggacacattccagttaaagttgatgttcgaatcgtggcggcaacccatcaagacttagaaaaactggtgaatgaaggtcgttttcgtgaagacttataccaccgtctaaatgttattcgaattcatattccgaagcttgcgcatcgcagtgaagacatcccgatgctggctcaacatttcttggctcgcgcgggtaaagagctaggcgtaagtccaaagattttacgtactgaaacaactgactatatgcaacaattaccatggcctggtaatgttcgtcagcttgagaatacctgccgttggttaaccgtcatgattactggtcgtgaggtttatccggaagatttaccttctgagcttaaacaggttccacttcaaaaaagtagtgagactagtcagccaacaccatcttttgaacgtatttctttgcaccattgggatgagctactaagccaatgggcaattcaaaaacttaaaaatggtgaaatgaagattttagacattgctactccaatgtttgagcgcaccttaattaatgcagcactacagcaaactcgtgggcgcaaacgccatgcagccgagctgttaggttggggtcgtaacaccctaaccagaaagttaaaagagctgggcatggactctgctgatgacgatgatgaggacgaacataaagcaactttgtcagaagcttaa

SEQ ID NO: 44204 - DNA, 654 bp, Acinetobacter baumannii
atgcatgatccagtccttgagtcacatcatctcgtatgtgaaaaaccccaaacacgccgcggtatagaacgtcgtttagctctattgctaagcgcaaccgagctgtttttggaaaaaggatatgatgctgtctctcttgacgacatcgttaatcatgctggtggttcaaaaacctctatttataaatacttcggtaataaagatggcttatttactgcaatctgcgattatcgccgtgaaatgttttttaaagatatctgcattgcatttcaaccagagcaaacttctttaaaagattatttaatccaaactctcatccgtttttataagcacattattcaacctgaacacattgcctttttacgtttggttattgaacaaactcaatgtaatgcaactttgagccaatacttatatgaaaaatgtgctctggatgtccaaaatacaattgctcaagccttactcatatctcatcaatcaggtgaaattacctgtacatctcctgatcattcctctcttatgtattttggaattttacgtgatattgaatggcgaatgattatgggaatgcctctcccacccaatgagacagaagttattgattatattaattattgtgttgatattttcttaaaggggcatcataaagtctaa

SEQ ID NO: 44205 - DNA, 921 bp, Acinetobacter baumannii
atggctctaagacatttcctgactttacgtgatctatccactctagaacttaatcgcattttggaacgcgcaagcgaacttaagaaaatgcagcaaagcaataaggtatatcaaccttttgttggtaaagtattgggaatgatttttgaaaaatcgagcacacgcactcgtatttcttttgaagctggtattaatcaatttggtggtagtgccattttcttatcaccacgtgatacgcaattaggccgtggtgaaccgattgaagattcagcacgtgttatttcaagcatgcttgatatcgtaatgattcgtacttttggtcacgatattgttgaacgttttgcatcttattcaaaagttcccgttattaacggcttaactgacgatcaccatccttgtcagttacttgcagatttacaaacttatattgaacatcgcggcagcattgaaggcaaaaccgtagcttggattggtgatggcaataatatgtgtaattcatacattgaagctgcacacatgatgggtttcaaactcaagattgcatcaccaaaaggttatgaacctaaacctgaatttttagcagagtttgggcattgtgttgaactttttgataatgcggaagatgcggctgtaaatgctgatcttatcgttacagatgtatgggcaagcatgggacaagaagaagaacagaagctccgtgaaaaagcctttgctgattttcaggttaacgagaaattaatgggacttgcacacccggactgtttattcatgcactgcttacctgctcatcgtggtgaagaaatttctgaaaccatgctcgaccataaaaatgccgtagtatgggacgaagcagaaaaccgtctgcatgcacaaaaagctttaatggaatttttactcaacgaaaatttgaaaaaagcttaa

SEQ ID NO: 44206 - DNA, 525 bp, Acinetobacter baumannii
atgacaacccttgaacaatcattatctgaaatccctgcattttcgatcattcatgaacatttatttagttcagcgcaaccttctaccgaacaacttaagctcattaaagagtatggttgtagcactgttataaatttagctttatcgaattcaccagatagtattaaaaatgaagatcaggtctgtcttgaatatggtttaaattatattcatattccaattgactgggaaacaccctcttctgaccaatgcttattagttttagatttgattgatcatttagtgcagaatgaaattgtttggatacattgtgccaaaaataaacgcgtaagttgtcttatgtatgtctacagacaattttatatgaatatggatatgtcaacctgtcaggatttgcttcatgaaatttgggagccaaatgaaacatggacaggactcattcatagtattaccttacagcttcaaggccgtaaggctaccttagaacttcaacaatctttgcaacaaaccaatgatttagtttaa

SEQ ID NO: 44207 - DNA, 483 bp, Acinetobacter baumannii
atggttgctcaaattcgtattggacaaggaatggatgtgcatgcctttgaagagggtaacttcgtaaccttagctggcgttcaaattccgcatacgcatggtttgaaggcacattctgatggcgatgtcgtgctacatgcattatgtgatgccttactaggtgctctagcacttggtgatattggtcagcattttccggatacagatccagaatttaaaggagcggatagccgtgttctacttaaacatgtttataaattaatattagaccgaggttatcatttaaataatgctgatattacggtagcttgtgagcgtcctaaattagcaaaatacaatttggaaatgcgtcaaagcattgcagatgttttaaatgtagatttaaatcaaattagtatcaaagcgaccacaaccgaaaaacttggatttactggtcgccaagaaggaattttagcaacagcgacggtgttaatatctcattaa

SEQ ID NO: 44208 - DNA, 645 bp, Acinetobacter baumannii
atgccgtcgaatactgatatgaatcaattgaaaagattaagttttgtcgtgacattgagttgtttatgctcatcgcttgtttttgcagagtctatcgactgctccaactcaaaagcagagctaaaaatctgttcaaaaacctttagcgaagcacgaaagcagctcaacaataaatatctttctgcatacttggtcacagatgcccccctgcagcttctacaagatactcaaacattgtggcttagacaaacacaacaatgcaaaaccaattcatgtattcaacaacagtttgatgtacgtggtgatgatttaaatttttatgcttcacttaaacaaaccctgactcagcattatcttaaatttgaaaatggacatattgcatctcagcccgttcatttacaaatacatcaacttgctaaagataaaatcaaaattgaaggtttagcttaccgtaatccgaataaccgaaaagaaacccaaacggtttcacttatggcttacagctctcctgaacagaaaagtgaaattttagataatgaacataactgtaaatataaatttgactttcagaaagcactgctcatcgtaaaaacccagcaaaaaggttgtgagcgcttcacaggaatttatcgtctgtatgactag

SEQ ID NO: 44209 - DNA, 1245 bp, Acinetobacter baumannii
atgccacatgttattgtgattggtgcaggaatcacaggggttacttcagcctatgaattatctcaattaggttaccaagtcacagtgattgatcgccatctttatccagccatggaaacatcatttgcaaatggagggcaattatctgcttgtaatgcagaagtctggaaccagaaagcgaccgttataaaaggttttaaatggatgaggcaaaaagatgctcctttattattgaatccttcttttagcctacataaatatagttggttggttgagtttttgtctcatattaaaaactatgaagccaatacaatagaaaccgttcgcttggcattgcttgcgcgtaagcgcttgtttgacgtagctgaaaaagagcagcttcaatttgatttggagaaacgcggtattcttcatatgtaccatacaaaggatgattatgacatcgccaagcgagttaatgatgtcttaaataaagggactttagaacgttactcggtttcacctgaggaaatgaaatcaatcgaaccttctttaacgggtgagtactttggtggctattacacaccaagcgatgcaactggtgatatccataaatattcaacctctttagctgaaaagactaaacaatatggcgttcagtacaaattcggtttggaagttactgatattaagtgtcatgcagataaagtggtactgaattgtcagccaagtgctgagcatccgcatctttcccaaacagacagctttcaattagaaggtgatgttttggttgtatgtggtggtgtaggaagttatcagttagctgatatgattggtgagcgtgtaaatgtttatccggtcaaaggttattcaattaccgtccaattaaaagatgaaaaaagtataaaaaatgcgccgtgggtaagtttgcttgatgagagtgccaaaattgtaacctctcgtttaggaccagatcgtttacgtgtagcaggtacggccgagtttaatggttataatcgagatattcgagccgaccgtattcaacctttggtaaattgggtaaaccgcaattttgacatttcaactgagcatgttgtgccttgggcgggtttaagaccaatgatgcctaatatgttgccagttgtgaaacagtctaaacagtctcgagttttctataatacgggacatggtcatctaggctggactttgtcagcagctacagctgttttggtgagtcaagatattcaacaaaaatatcccgcataa

SEQ ID NO: 44210 - DNA, 492 bp, Acinetobacter baumannii
atgctctctatttatttaacagatactcaacaacatgtgcaatttaatgattacccaagtgatcagcctgttaaatttctgttaaatcttaaaaagatttttccaagcactggtgatttattattacctgttttacctgaagacaatgatcttgaaaatgtaacttgggaatcaacctcaaaagactttgaaatcttcaaaaagttattggcaggttggggggtgattgagcttcgtttaaatgccattaccgcttataaagataaaaattttgcaaatgagctaattaaacaagctcaagcgaaacgtaaaaaagtagcacaaaaaaatcatcaactttctttagttgcattggattatatttttatgcacgaaattcatgcactcattgatgctgaactgttcacaataggcgagaaattttatttgccaaccttgcgggagcaatggaaaggtaccgtttcggaccaagtgcttaatggaaagctctaa

SEQ ID NO: 44211 - DNA, 126 bp, Acinetobacter baumannii
atgaaagattgggtctacttttatattgagtacacaataaaatatggtgagccattttacaaagagataggatggtcattaggattaagtaataattttatggtagtaagtttaaaacttagctga

SEQ ID NO: 44212 - DNA, 1353 bp, Acinetobacter baumannii
atggctcaacacattaaatttactaaatcggtaatagactctattcctttgtctgaagagaaacaaatcttttacagagatacagtaactataggatttggcttatgtgtgggtaaaactaaaagctattttgctgaaaagaaaatgcctaatggcaaatcaaaacgtaaagtcattggtaaacatggtgtctatacattagaacaagccagaactgaagctaaacgcttgctaatcttaatggatgaaggtgtagatccagttaagcaaaagcgtgatatacgagcttcagcaattcaaaatgatgccttacaaaagttagtacctaccctttctgaagcttaccaatactataaattacgtaagaagcttgctgaaactactttaattgcctatgacggatgcatagagaactacttcagtgattggaaagatgtaaaacttgatcaaatcaccagtgcaatgattattgatcgtcatctgaagctttcggaagcaagcccttcccgagctaatcttgcatcaaaatttttacatgccctctttaaccatacaattagcagatataaagatgagtcaggaaacaaaattctaaatattaagaacccggttgttatcgttaaagaagaaaaggctttcaataagattaaacgcagaaaaggccacgttcgtgcagatcagcgcgaagcatgggcgcttgcagttgccactacttactggatgggtgagcaaaataatgattttagagcctacacaaatcaagactttttatttttacttgctttaactggttttagacgcagtgaagcagaatctgttgaatggaaaaatgtagatcttcaattcggtaccatcaaaatcattaatacaaagaaccatgaggatcttttgctacctatgggtgataccctttggcacattatgcgtgaacgtaaaaaacgtgccggtgataataaatatgtctttaccgatagaaatggtgtttctcatatttcagatcgccgagcagcacgagaaaaagtaactgagaattctggtatagaatttacgttccatgatttacgccgaacctttggcactatcgcgaacagcttggccataggaagctatacgatcaaaagactaattaaccacaccacggacgatgatgataacgatgtgactgatggatatattcaagtttctttcgatgatttaaagaaagctatgaatatgattgaagacgttgtgttaactgatatttcaaaagctttgattaaaaacagaatctattttgatcaaaaatcaataaggaatattcaagaaaagtggattgagcataacaatattattataagcaaatattatgaatag

SEQ ID NO: 44213 - DNA, 285 bp, Acinetobacter baumannii
atgagtgaacaagtcatggtagagcttcggctgattgaacaaacttttaggcttgcaacgacttctgataaaagagaagagcttgaacgtgcagctgagcttctcaatgaaaaatttaacgatatgcgccgtagtgcacctcgtgttgagcataataaacttgtcatcatggtagctctacagcttactcaagaagtattaagtttaaataaatctttgcaagaatatgcgcattgtgaacgtttactccagactattttggaagatgttgaacaaatagtgtaa

SEQ ID NO: 44214 - DNA, 561 bp, Acinetobacter baumannii
atgttagaacaattacagcgtctacaagcgcatattggcgttttaaaaacacgcttacatcatctagagagtgaaaattctgctctctcggaagctaaagaactggctgaaacagagcatcacgcacaagttgtgcaaaaaaatagcatcatcactaaaaaacaagaggaaattgagacattaaccgagcaactcactcagttacaaggccaatttcaacaattgaatcaagatgctaacacacttgcagagcgttacagccgcctagaaaaaagtacgaccgatttaaaaaatcgttttcaggaaattttggcagagcgtaatgaattacgcgttaccaaagaaaaacttcagtcacagcaacgtcaaactcaacaagagttacacgacttgcagcaagatcgtgaccgtttgttacaaaaaaatgaacttgccaaagcaaaagttgaagccatcattcaacgtttagcaattttaggtactgctcaagatcaacatgcgcaagaaattcagcaacttgctcatccaaatgctgaagctggtgaggagacacaatcatga

SEQ ID NO: 44215 - DNA, 633 bp, Acinetobacter baumannii
atgcaagacgatatttcaggctggacagaatggaacgctcattttgaaggaattgaagaaatttcaagccctagtgagttacatggtttattaacaggtattgtttgtgtgacagaagcgcctacgcgtgaagaatggacacaaatcttaacaactcttaatgtgcctgagttaaatgaagaagctttagcgcttttaacagatgaagcagaagatgtagcacatgcattatcggaagatgaattggactatttaccaatgcttccagatgatgaacatcttcttcaagaccgtgtacaagcattgtcagattggtgtgctggcgttgtgctcggttttggtttggcatcgggccatgttcgtacagatgagcgtgagttgatcgaacatttgcaagatgttgcagcagtagaatttgaagactctgataacgatgaagaaggcgaaagcagttacgaagaattgtatgaatttgtacgccttattccagtaagcttatctattggtagaaagaaagtaacagtggctgaaagttcattgttgaaaaacttttatgcaaaaagtaaaacttctactgtaggcaccgcagatcaaaatattgtagaaatgtttacaccacatcgcccaagttaa

SEQ ID NO: 44216 - DNA, 1323 bp, Acinetobacter baumannii
atgaaattgcctcaagctgattttcaacatcgcagaaaccgtctagcagaaaaaatgggtccaaacagcattgcgattattgcgacgcgtgaggaaatgtaccgtaatcgtgatgcggattataaattccgtgccgatagtagttttttctatttgacgggttttgcagagcctgaggcagtcgctgtcattgaaacgtttgatgacgttacagactatagctatagtcttttttgccgtgaacgcaatcgtgagatggaaatctggaatggttatcgtgcgggaattgacggcgcaattgaagagtacgaagcagatgaagcttatgcaattgatctgcttgatgaagaaattattgaaaaattattaaataaagagcgtctttattatcgaatcggacacaatgctgcatttgatgccagagtaagccaatggatcaaaaaagcgaatgccgagcatcgtcatgaagccgctccagcccagttagttcaacttgatcgcattgttgatgaaatgcgtttaatcaagtcaccgcaagaaattgagctgatgcaaatcgcttcaacaattagtgctaaggcacatactcgtgcaatgcaaactgttcgccctggcatgatggaatatgcactagaagctgagcttaattatatctttgggcaaaacggctgtgtgccttcttacaacagtattgttggtggcggtgccaatgcttgtattttgcactatgttgaaaataaccaagctcttaaagacggtgatttggttttaattgatgctgcatgtgaatatgagttctatgcatcggatattacccgtacttttcccgtaaatgggaaatttagccccgaacaaaaagcattgtatgaagtggtattagcctctcaatatgcggcgattgatgcagtacgtataggtaactcataccgtgagcctcatgaggtggcagtcaaaattttaacggaaggcttagttgatttaggtttcctcaaaggtgatgtgagtgagctgattgaaacagaagcctatcgtcaattttatatgcatggtacaggccactggttaggtatggatgtacatgatgtcggttcttataaaaaagatgacgactggcgccaatatgaagagggcatggttgttactgttgaacccggtttatacattgcaccagatgacgaaactgtagataaaaaatggcgtggtattggcattcgtattgaagatgatgtagtcgcaacctcaaaaggcccacgagttttaacggccgatgtggttaaagatattgcagatattgaacatttaatggcgcaagctaaagcataa

SEQ ID NO: 44217 - DNA, 1209 bp, Acinetobacter baumannii
atgcaacaacaagtgattattgtaggtgggggtatggtgggtttaagcctttccctcatgctggcgaaggctaatatcgcggtaaagctattagaagctgtgaaatacccaaactatgatgatcaaaatgttgccccttatcattccagttttgatgcgcgaaatacggctttatcacgtcgtagcgtacagatttatcagaagttagggttatgggatgccttacaacagcatgccactccaattttgcaagttcacattactgagcaaggcagttttggtaaagctcgtttagttgcagaacaagaaaaagtggaaagctttgggcaagtcattgaaaatgcttggcttggtcgtgttttattaactcaagtacgccaacaaccgttgattgaactgattgatggcgtacaagtgactgctttaactcaagacgctgaacaggtacatatcgaagctcagcgtggtgatgaacttttaaagcttgagtcaaaattattaattgcagcagatggacgcgattctttctgtcgtcaagcaattggtgttggtgtagatgttcatgattatgatcaggttgcaattgttacgaccgttcagacttcaaaaccgcatgagaatgtaggatttgagcgttttagtgcattaggtcctttagctttattgcctttaccgggtgagtatcgtcgttcggttgtatggcctgttaaaaaaggcactgaaagtgagtggttaggcgatgaaaatgatcagcatttcttaagtgctttacaacaaacttatggtgacagagcgggtaaatttgaaaaaacgggtaaacgttttagttatccgctttcacaagtgctcgcacataaacaagctgtcggacgagttattttaatgggtaatgcagcgcatacaatccatcctgttgctgggcaaggttttaatttatgtctgcgtgatgcagatgtattgctgcgttatttagtgaaccagttaagcgcatctgatgatattggtaacccagataatttgcttgcctatgaacaagcccgtttgtcagatcaacagcgagtgattaagttctgtgacaccgtggttcgtggttttagtaaccaaaatccattattaaaattaattcgtaatacgggattaattgcatttgatgtcattccgggtgttaaaccactggtagcgaactatgcaatggggttaaaagcatga

SEQ ID NO: 44218 - DNA, 1233 bp, Acinetobacter baumannii
atgagtgaaatactagatgttgtcattgttggtggtggactggttggtggcttaactgctttattacttgctcaaggtggggtgcagcctactgtgcttgatgcggttcctatactggatgttggaaaaacactaagtgtgatgaatccgcgtgttttagcccttagccaagcgaccattcatttacttaaaactgtcaatgtttgggatgatttggcacgtcaaatgccttatacaggcatgcaggtgtggaacttaaatggctatggtgaaattaattttggccatgagtctgtacaaagaccaataccagaacagtccttgggttctatggttgagccaagtgtattgaatgttgctattcaacaaaaaatgcttgagcagttaacagattatcgcactcaagttcgcgtgactcgcattgagcagggagttgggtgttggcatattcaattggcagatggtacgacacttaaaacaaaactacttattggtgcagatggtgcaaattcatttgtacgtgagcaagcttttattgacctcgacgtactagattacaagcaagcagccattagctgtgcaataaagacttccaaacctcatcactatgttgcccgtcaaatcttcttacctacagggcctttagcatatttgccaatggcgagtcttgaagaaagtgaaaatggctactggcagtccattgtctggacactaccagatgattatgccgatgaatattcagctttaagtgatgctgagtttatgcaacttctaactcgtgaaagccaacatatgttgggtgaagtgctcgatgttcgttcaagagcccaatttccattgaaagcgcgtgccgcaaaacaatacgttaaagatggcctagccctcattggcgatgcagctcatgtgattcatccacttgctggacaaggggtgaatattggttgtttagatgcagctgtactctgtgatgcactattgcatgatttaggtcgtggtgtatgggcgcatgaacaaaccttaatgcgttatgaacaccgccgtaaaggacagaatgatgcgatgatgcatagtatgtcggcaattggttggctagaaagcagtgagctatttccattgatttgggcccggaatgtgggactcaagcaagttgaacaaatttcgttcttaaaagagcgttttatgcaacaagcaaatggtttaggggctttacaaaacacccagtatagtcgttaa

SEQ ID NO: 44219 - DNA, 252 bp, Acinetobacter baumannii
atgacagatatcaatgattatgaagatgcagaagattctgctgtagatgaagatgaagccaaagcggctgaaagtggcgcagctgatgaagaagcaggcaacttaactgatgccgatcttgcagaagcagaaacgcttactgtaactgcgaaacaaaaacaacgccaagcgttggaagatgaagtcgctgcgtttttagctcgtggcggaagaatcacagaagttccaccagatgaacatagcgatcgttaa

SEQ ID NO: 44220 - DNA, 402 bp, Acinetobacter baumannii
atgagtctttctattggtcaattatcaaaaaaagcggatgtcccgatcgatactattcgttattacgaaaaagtaggtgtattggaccgcattcagcgctcagaaaataattatcgtgtttacacagatcaaacactcgcagacctattatttattaaacattgccgtgaattagatatttctctcagtgatattaaaacgctaaaagaaatgaaagctcagccgaaacgggcttgtacggaagttgataatttggtgaataaatacttgatagaagtatcggaaaagattgagcgactgttgcttttaaaagaaaccctaatcgatttaaaacaacactgttctaccgaccgtacagtagatgaatgcggcattttaaaagaactacaaaaccatccttaa

SEQ ID NO: 44221 - DNA, 642 bp, Acinetobacter baumannii
atggctggatgtggatgtgcttcaacctgctctcctacaaagaaagcaagcccgcgctttagaaaagcgttatggattgctcttgtaattaatgcactcatgtttgtcgttgagatagtcggcggttataaagcccaatctgtttcattatgggcagatgcattagattttgccggagatgctgcaaattatgctctgtctttagtcgtgctttcgatgagcctttactggcgtgcaaccgcagcacttgttaagggtataacgatggccgcttttgggttcttcgttattgcaaaagtcgtttggtcattttttcatggcgtttcacctgaaccgatggtcatgggggcaattggggtaatcgctttaattgctaacgtttctgttgctttaatgctttatgcattccgcgatggcgatgccaatatgcgctctgtctggttgtgtagtcgaaatgattctatcgccaacattgctgttgttttggctgctgtaggcgtgtttggaacaggcactatatttcctgatttgttcgtagcctttgttattgcatatttaggtgtatcttcgggttatgctgtgattaagcaatcattacaagaaagaaaacaatcaaagttaatgttgggttcagaagcttaa

SEQ ID NO: 44222 - DNA, 609 bp, Acinetobacter baumannii
atggttatgctttctctgagtgtgttttttaaaggtttaggtattggtagcggcctaattgtagcgattggcgcccaaaacgcttttgttctaaaacaaggacttaaacagcaatatgtattttggctatgtttaatttgtgccctgtccgattcaattttaatcgcctgtggtgtattaggttttgccgaaattatgacagcatcacccatcttaatcacagtcgctaaatatttaggggcaacgttcttattcgtctacggtgcaaaagccttctatgccgcgtttaaaactacccaaggcatggagcttgatagcagccaaaagcagactttaacccaagcacttataacctgtcttgcctttacttggctgaatccacatgtttatttagataccattgtactgattggttcggttgcgacacagctagaagataaaatcagttttgccttaggtagcattcttgcctcttggatcttctttttcagtctaggctatggtgcaagatttctaaaaccattatttatcaatccaaaagcttggaaaattttagatttcatgattggttgcgttatgtggagtatcgcaatatcacttctcatctaa

SEQ ID NO: 44223 - DNA, 891 bp, Acinetobacter baumannii
atgttggatagtaagcagtgtgaagcttttctggcggttgcagaagtcggaagttttgatgcagcaggagagcatttatgtataactccctctgctgtatcactacgtgtacaagccctagaaaaatatttagggcagattttaattatacggggccgtccttgtgtactcacacaagcagggcaaaccttgctccagcatttacgtcatacaaggttaatggagcaaaatctattacaaggtttaatgggcaaatcttctgaatcagaattttataaaattgcgttggcttcaaatgcagactcattagcaacttggcttttacccagtattcagcaaacactttttaaagaaaaaatcgtattagagctaaaaattgacgatcaatctcacacgcatactttgctagaaacaggtcaggtcaatgcatgtattacagcagaagagcaagtgatggcgggttgcttagctcagcctcttggtaaaatgcgctataaaatgctggcatcggccgagtttgtaaatcggtggtttagtggtggaattaaccgagaagttttaagaaaaacaccggcggttatttttaaccataaagatttaatgcattcagaggttttattaaaaggatacggtttaccaatgcagagttatccttatagttttattccggcgacagatgcttttgttaaagcaattcaactaggtttgggctatggcatggtgcccgagcttcaggttcaaccattactcgaaaatggaacacttattgatattatgcctgaggctcaacttgatgttcctttatattggcatcactggaaaagacagtcgaaacaacttgatgtactgactgagaccattgttgaatcagcaaaacagatattgagataa

SEQ ID NO: 44224 - DNA, 387 bp, Acinetobacter baumannii
atgactgaatcacttggaaaacttggcccgcatgaaggacaagaactagaattattactttcaggcaaaaaacctatcgcttatttttatgagttattacccattgaatttataaagcatcttgaacaagggtctttatctatgatcagtaaagacattgaaacttctctgtctctccccttttcaattatgttgatctataaagatgcgtctttagcagatttgaatgaactcatgttatgtattgaaaaatcactaaaggagactcagctcgaagatcgcttagagcttgaccgtagaatcggacaacttttaggttactcaacacaagatatagagttttatattcaacacatttcaaatcgacatttaaaaactaagatctaa

SEQ ID NO: 44225 - DNA, 837 bp, Acinetobacter baumannii
atgagtgctcagttatttgttgtagccaccccaatcgggcacttagatgatatgactttccgtgcaattgatatcttaaaatcagtttctgttgttgctgccgaagatacacgccaatcagctcaattattcaaacactataatatatctactccacttaccgcatgccacgaccataatgaaagcaacaaaattgagcagttagttcaaaagctacttgctggtgaaaatattgctttgattagtgatgcaggcacaccacttattagtgaccctgggtttaaactggtccgtgctgctcaagaaaatggtattagggttgtacctgtaccgggtgcatgtgctgcaattgctgctttaagtgctgtaggcctaccaagtgaccgttttagttttgaaggctttttaccatcaaaggcttctcaacgtatttcgcaactcgaaaagcttaaaaatgaaactcaaaccttaattttctatgaagcgccacatcgtattttagaatgcgtaaaaaatatggctgaagtatttggtgaaaaccgccctgtaggcttcgcgcgtgaaattaccaaaacatttgaaacaatcaaaaaaatgaccttaaaagatttggttagttttattgaaaatgaccataaccaagaaaaaggtgaaattgttcttgtagttggcggtgcaccagaaaaaaccgatctggaacaagaaaaactagatgaacttttaaagcgcttacttcaagatttatcagttaaagcagcatctcaactggctgctgatttaacgggtattaagaaaaaagtcgcttatcaacgtgcgcttgagttaacacaatcttaa

SEQ ID NO: 44226 - DNA, 402 bp, Acinetobacter baumannii
atgttagttgcacagcagttgggccaatgggcggaacaaacagcgctaaaacttttaaaagaacaaaattatgaatgggtcgccagtaattatcattcacgccgtggagaggtcgatctgattgtaaaacgcggtaacgaattgatttttgttgaggtaaaagcgcgagggcagggaaattatggtcaagcttgtgaaatggtgaccttgagcaaacagaaaaaaataattaagacggcgatgaggtttttacagcgctacccatcttatcaggatttttattgtcgttttgatgtgatttgttttgattttccacagaaaattgcaaaaacagtacagcaagacttttcaaaattccattatgatctgcaatggatcgaaaatgcatttactttggattaa

SEQ ID NO: 44227 - DNA, 708 bp, Acinetobacter baumannii
gtgttgaaacgtattgctgtaacagcgctttgtgtcgcaagtttgtcaggttgcgcaagttttatttctggtggaacaggtacagctccagttggaacagatagtggtgtacgtagcttaggccaagtatttattgattcttcaattaagcgtacagcgaatattaacctctataagcttgatcagcgttttaaacaatctcgtattaacatcgaaagcttccatagcacagtattgttaactggacaggtgccagacccatacttaaaacagttggcagaagacaacgttaaagccatgagtgatgtgaaagccgtacataactatattacggtgggtaacaaagtaagctataacacgatcatgcaagatgctggggtaaccgcaaatacacgtgctttattaatgaaagcgccagtagtatcggacagtaaagtactggttcataccgaagatggtgttttatatgtgatgggtcgtttaaacacagctgaaattaatgacttaaacaatgtgcttcaaaatgtcggtaatgtgactaagattgtaacgctcattgataatattgatttggcgcctgctccggcagcaagtactgccagtgcaacaactacaccagtaattaataacgttcttgctcaaccaacagttcaaactcctgttgcaattgatccggaccaaacagatccagcatcttctgcacaataa

SEQ ID NO: 44228 - DNA, 864 bp, Acinetobacter baumannii
atgaacctgattgaacaattacaaagcaaaattgagcaggcgagaactctttataaagagttccgtctgtatgatttggggagctttgctttaaaccgttttacaccaaaagatggttttgagcaggttttaaatgtgcgttatggcttaaagcctcgccatcgtctagatatttatcgttctactaagcgcttagctcatcgaccactcattgtttttgtacatggtggtgcttggcaacatggtaataaacgagactatttatttataggtgaagcgtttacgaaagaaggttatgacgttgctgtcattaactatcagctcgcaccgaagaatatttttccaagttatgtagatgacttaacgcaagcgttaaactatttacaccagaaccaagaaaaactggaaatctcgacagagaatattgtgcttatgggacattcggcaggtgcatttaatgtgatgtctgctgtttatcatccaaagccaaatacaattcaatgtttaggtaatattaaagcaatttttggtttggcaggtccttatcattttgattataaaggtgatccgcttgccgaagatgcttttgatcaaagcatttcttataaagaagtgatgccatattattttgtaaatcaaaatcatattaagcattatctgctcatggctgaaaatgatcagcttgtaaaaaaagaaaatacctttgatcttgatcaggcacttagacaaagcggaaatcacagtcatattgctgtgattcctaaaacaggtcatattacaattttggctagtttatcgagttttgtaagtcattacttccgaactaaacggaccattttgcactttctggatgaagtattttaa

SEQ ID NO: 44229 - DNA, 744 bp, Acinetobacter baumannii
atgtctgagttatcacttgcttatatttttcatcatcaacaattattggttgaccaaaaccttcaattacctaaagtcgaaaagttagcaagtgatctgcttttcactcatgatgaacaggtcattgcacgtgacctgttgagtgaagaagccattccggaaggactgcaactcgttccaattcgtcaacttatttccaactggtcaaaagaacaatttttacaggcaagtcgtgctgtacagttgctcgaatggcgacgtaatcacaagttttgtagccactgtgggcatgctaccgaagtacaccctacagaatatgctatggtgtgcccttcttgtcgctaccaccaatatccgcgtgtaaacccatgtattatcaccatcattactaaaggtgatgatgaaattttattggcgaaatctattcacaataaaaccaatatgtatggcttgatcgcaggatttgtagaagttggggaaacgcttgaagaagctgttcagcgcgaagctttagaagaagtgggacttaaactcaaaaatatccaatatatgtcaagccaaccttggccttttccaagcaatctcatgattgcatttagagctgaatatgagtcaggtgaaatttctttgcaagaagatgaaattgccgatgcacaattctttaaatttgatcagttacctgaaattccatttaaaggcagtattgcacatgcaatgattacgcagattactcaagcgaagtaa

SEQ ID NO: 44230 - DNA, 1644 bp, Acinetobacter baumannii
atgtctgagcataattcgattcaatttgatccaacagcgttgctcatcattaaaaatgaaattgataattcaataaaactggtggaaggcgctgtaagtaccttaattgaagaacaggctctcccttttggtattgatgatgcattagaacaatttaaacaatgtactcaagtcttacgtctcattgatattccgtatttggcaaaaatcactcaatattcaaccgagttgatgcaaaagattatggcgaatccagagcgcatcaatacagatgacgttgttgctttaagtgaaggcacaaccatggttaaacgttatattgagttcatctgtttacgtgaagtcgaagtacctcagtttcttttagacaccttaaataatttagaaaaagccttaaataagccactaacctcttctggacaacagattgcgtcaaagctttcaacagtttcacttgagttaccgttacccgaagtgcttattaatgaaagaactcagtttatccatcagctttataaattatcactacatcaatttttaaataaaactgaaagtgctcgagactttcaagcgtttaaactgattggcagttatttagtgagcatggctcaaggtcaaccaagccagcaatactggcaattggtgaactctgcctttagtcatattgatgaacttgttttaaatgatgctcgcctacgtgtgttcattaaccttgaaaatgccataagtttatttttagcttcacctgaaggctttgaagcaaacttaactgctctagcagatatcctgagtattgtgattggacaagaagaccaacttgcgcagcaaatccgtagtcagttaaacattggtcatgagtttctcaccgacactcaacttaaagcactgagccaacacttgtatggtccagactttgataccatgcaaacggtaagtcaattaatcttaagcgaaatgaataaagttcgtaatgatattgaatataactaccaaaacatgtcaccagaaaaagctcagcaactacaaagcaatcttatgcagcttgctcatacttttaaattactcaacttaaatgaagctgcttcagagctttctcaacaagccagcagtttaagccaaatcaatatcttgagtaatgaaaactatgctcagcagttgatgaaaagcattttatctgccatgaatgccattggtattttggtgcgccattattcatctaaccgtctacaaattcgtgtgaacaataccaatatctctctagatcgtttagatgaagcacatcagacattattgaatgagaccaaaaatttaaccgattttgtatgccaaagtttgactctctatgccaacgatcaaactcaaaatattgaagcaattgcaggctctttaaaagagttggctggcgcggctgaatttttaggaagcacagttcaacaaaatgctttgcttgaaactgccaaatttgtacaaaagcaaatcgatcaaaatcagcctttcaatcatgatcagattcactgtatttttaacgttttagctgggctagatatgttagttgacaatttaaaaaataaacagcctgttctacaatccatgtttgatgtagcattgctaagtagtcaacaacttcaaaaaaaggcagcttaa

SEQ ID NO: 44231 - DNA, 1380 bp, Acinetobacter baumannii
atgtctcaaacaatcacactgtatgttgatggtgcatgtcgtggcaatccgggtttaggcggttggggtgcatatgtcattaccgaacaggatgaacataaattatttggcggtgaacccgacacaacaaataaccgtatggaacttactgcggctattgaaggaatttctttttgccctcctgatgctcaattaattgtctggacagactcaaattatgtgaagcaaggtattacagaatggattcatggttggaaaaagaaaaactggaaagatgttaaaaatcctgacctatggcaaaaactcgatgccgtttgtgcgggtagaaatattgaatggaactggattaaaggccatgcaggacatgcaggtaatgaaatggctgaccaacttgcgaatttaggtgcagacaaaactgctcaagaacttaagcaaccacagtcagccactgtatcgcaagatataaaaaagcctgaacaggactggttactagacgatcctttcggattcgatctggttgaaacaaccgaagatgaaacagtcactttagagcagacacaagaagttgagatgattgttgtggatgaagaaatgaatgtagttgaagctgtagaacaagaagaacaacagcaaaataccaatattcatccacaaattgtgatgactgaagccaagcttaaattacaaggcccaagacaactcatactcgatacggaaacaactggtttctattttcaagatggtgaccgcattattgaagtcggtgccatcgaaatgattaaccgtaagcttacgggcagttcgattcacatttatattaatcctgaaaaaccagtgggtgactctgttcaagtccacggtattactgatgagtttttggtcgacaaaccaaaatatgcagaaattgcagataccttatttgaatacctaaaaggcgcagaaattattgcccataacgcaaccttcgatatgaacttcttagatatggagtttaaacgtgttgggttacctgctctttcagaagtttgtgaagttaccgatactttagctttagcgaaaaataagcatcctgggcagaaaaactcacttgatgccttagttagacgttatgaaattccagcgcgtgaccgtactttccacggcgcattactcgatgctgaaattctttctgatgtttacttggcaatgacaggtggtcaagtttcctttgatatggatgccctatcgcaaagtgaaagtgaccagcaaaaaacgaccaaagctagagttcaaattgaattacctgttatttacccttcagatgaagagctaaacatacatgagacttgggtcaaagaatttgagaaaaaacatggagaaccttgcctttttgcaaaataa

SEQ ID NO: 44232 - DNA, 3216 bp, Acinetobacter baumannii
atgtataaaccaaccacatttgtgtggcagccatctgcagcatcattattcaaaattacagtccttagctctgctttagctgcgttgggtattacaacaggctgttcttcgactccgcaatctgcaaaaacctcgaaaacaaaacaggtgagtggagcaggctatcttgatgcaagcagtctggactctttagaagacttactttcagcaacagatatgcgtgctgtagagggcgaccgtttacttattttaaaacacggtgatgtctggaagcgtatggccgtaggcttcaaaatggaccttaatcattgggatccacgtattgaagcacagcgtagttggtttatctcacgtcagccctaccttgaccgcttaagtgctcgcgcaagtcgttatttatatcatactgttaaagaagcagaacgccgtggtcttccaaccgaacttgcgttattaccagtgattgaaagttcatatgacccagctgcaacaagtagtgcggcggcggcgggtttatggcaatttattccaagtactggtcgtatttatggtttacaacaaacgggtatgtacgacggacgccgtgatgttgtggaatctactcgtgctgcctatgagtttttaggaagcttatataaccagttcggttcatgggaattagctttggctgcctataacgctggtccgggtcgtattcaacaggcgattaaccgaaatcaggctgctggtttgccaacagactattggtcactaaaattaccgcaagaaaccatgaactatgttccgcgtttcttggctgttgcacaaattattaaaaacccacgcgcttatggggtttcgttacctccgattgcaaacagaccccatttccgtgaagtcaccttatctgcaccattatctttaaatgaaatcgcgtcggtgacgggtcttagccgtgctgagttatatgcattaaacccaggctatcgtggtgaaacagtagacccagcaagtccaatgcgtattttgattccagctgatataagtccttcagtggataacaagttaaaaggaatgaaagcaggtggaagttcaggctggtgggcaagtgttacttcgccgtctaaaccgaccacaacgacttcaacttcagtcacagttagaactactccatcaactccagctcagccagtaagaccatcgacacctgctaaaacaagtagcagctcggtaacggtaaaaactgcaacacctcgtggttctgatgcgctagctgcttttgcagcgtcagctgatgtaccaagtgcaccacgtattcctgttgctgtcactccggctgcaaatatcaaacctgtgagaacggaaccaccaatttcagcaactgaacgtgagaaaattttagcggcagtgcgtgctgaaggggaaaaggaaacagttgatcaggctttggaaccacaagctactcaagctgaaaaagaccaagttgttgccgagttaaaagcacttgcacctcagggtacagaaattgtcgatccgtatgatggcaaaattaagttaaccgcaattcagaccagccaatctgttgctgagcagcaaggtaaagaagtaagtaaaggttttgcttatccaaaaactttagctgaagatgcaactcttgcaaactctgaagatgctcagcgcaataaagataagccttatatcaagactgatacagatgttgtggttgtacaacctaaaggtaagcgtagtacttatacagtacaaccgggcgatactttagcagttattgccatgaagaatggtgtgaactggcgtgatgtagctaaatggaaccagattgaccctgaaaagactttatttgtaggaaccagtctatatctctatgatgctaagcctcaagaggcggaaactacggcaaaatcggcagctaaacctgatgtctatgttgttcaagcaaatgacagtttaacaggagtggcaaatcaatttaatttgtcagtgaaacagctagctgaatataacgatttgtctgtaacagatggcttgtttgtagggcaaaaattacagttaaaagaacctaaaggtaatcgtgctgctaaagtagagctaaaggcaattcaagcaagtacacgtcgtattgcaacgaagagttatacggttaaacgtggcgaatacttgaaattaattgcagaccgttatgcattatctaatcaagagttggcagacctaacaccagggttaacagctggtagtaatttaattgtaggccaaaaaattaatgtacctgcaaaagaaatcactgttgatgaagttgatgacagcaaggcttctggtaaatatgaaaagcttgcagcaggtccatcatataaaactgaaagttataaagtgcagcgtggcgatacattatcaagcattgcgaccaaatctaaaattagcctagctgagcttgctgaactgaacaacttaaaagccaacagtcatgtccaactgggacaaactctaaaagttccggctggtgcatcagttcctgatcaatatgttgtgcagtcaggcgatagcttaaatgcaattgcagctaaatataacttacaaaccagttatttggcggatttgaatggcttgtcacgtactgcaggccttcgtgctggtcagcgtttaaaattaactggtgaagttgaaacaactagcaaagtttcggctaaaaataccaaagaagaaacaccagagacctacacagttaaatctggtgatagcctaggaaatatcgctaaccgctatcatttacagttagattacctcgctgcattgaacggtttgtctcgcaacagtaatgttcgtgttggtcaacgcttaaaattaacaggtgatttaccaacagtagaaacagctaaaacggatacagcaaaatcgtctccaaaagctgtagttgcaggaaaaaatactgaaaagtacacggttaaggctggtgagtcgttaaatgctattgcgagtcgtgcaggtatttcagttcgtgaacttgctgaaatgaatgcattaaaagcaaatgccaatttacagcgtggacaaaatattgtgattccaaaaactgtagtggaatacaaagtcaaacgtggtgataccttaattggtcttgcgagtaaatatggtttagaaaccactttactggcggaacttaacaacctaacaccgtcgactcaattgcgtattggcgatatcattaaagtgcctaatttatag

SEQ ID NO: 44233 - DNA, 1836 bp, Acinetobacter baumannii
atgcaaaagttatattctcaactgagcctgctagtcgggctcagtgttttttcgcaagttatattctctgctcagcaaaccacgccgtatatcgcaattcattctaagcctaaatatctggcaatggctgctatgccttatgccaacccgaatgcacctaaaggcggagtattgagtcaggctgcgcaagggacatttgataacttaaacagtatgaacggtaagggaaatgcgacagaaggggtaaattatctttttgatactttaatgacccagtcacttgatgaagtgggggtgttatatccacttctggcagaaaaagtttcgtatgatcctataaaaacccagtcagttactttttatttaaacccaaaagctcgatttagtaatggactgcccgtaacagctgaagatgtgaaatttagctttgatacctatcaaaccaaatctaattttggtctacaaatgtatcttgcagacttagcgaaaacagaagtgataaacccacatcaagttaaattcacttttaagtccagccataatcctaaaatgccatttgttgtagcgagtttaccgatttactcaaaagcagattggcagaaacgtgattttacccgtattagcttgcaaccgattataggttcagggccttacgtggttgagaaaattgatgcaggacgaagtattagttataaacgtaatccgaattattgggcaaaagacttacctattaataaagggcgctataacttcgatcatttaaagtatgtttattaccgaaattgggatattgcattcgaaggttttaaatctgggcaatataccttgcatgaagaaactaatcctaaaaaatgggtcactgactatcattttccggctgtaaaagcaggtttggtaacgcaatataaatttagacatcataaccccattgcaaccgagagttatgtttttaacacacggcgcaaacctttcaatgacatccgctttagacaagctttaacttatgcctatgattttgaatggcaaaataaagctttgttttacggacaatatcaaagactacaaagttattttgaaaatagtgatttggcagcgacaggtcgaccttcaaacaatgagctggccatactaaagcctcttttgccaaagctctctccagtcatgcaaaaagctgttttggctgattggaaatatccagcctcagatgccagtggttttaaccggcaaaacctattacttgctagacagttgctgattgaggcgggttataaaattaaagaagggcagttatatacgcccgaaggcaaacctgtacaaattgagtttctcattcagcaagatggcaaacaaagaacattgatgccatttgtaagaaatttaaaaaaattaggaattaatattaatttaaggcaggttgatgcgccgcaatatttagagcgtacacgccgttatgactttgatatgactacgatgaatttgccgcaatctttaaacccgggcaatgaacaggctcagttctggggaagtgcagcagcagttcaagatggtaactataactacgctggtattcgtaatccggtaattgatgaggtgatttcaaaactggtcactgccagagaccgtgaacagcaaatcacttatactcatgttcttgaccgattgcttcgtgcaggatattaccagatcccgacttatggaaaaggggattattggtatgcgtactggaatatgtatcagcagcctaaggtgaaacctgtgctctctgccggtatagagtattggtggagtaatgcaaaccaagctaagaaagttgctcaatatttacatcaacaataa

SEQ ID NO: 44234 - DNA, 1053 bp, Acinetobacter baumannii
atgggttcatatattctaaagcgacttcttttaatgattccaacgttgttcattattttattgatcaactttgtggtcgtgcaaattgcgccgggtggaccagttgaacaggcaattcatgaagtagaaagtggcttaggagcagggcgtatattaggcactgaaatgtattatcaaggtgctaaaggattaagtcctgaaatggtcgagcaaattaaagcacagtacgggtttgaccattctccagtagaacgttttttactgatgttaaaaggctatttgactttagactttggacaaagcttttttaaagataaatcagtggttgagctgctctgggaaaaaatgcctgtgtcaatttcacttgggctatggagcactttactgatttatcttatttcaattccacttggaattaaaaaagcgaagcaacaaggtacatggtttgatcgttccacttctttattgctagtggtgggctatgcagtacccagctttgtctttggtatactacttattgtcttttttgctggcggttcatattttcagtggtttccattacaaaacctagtgtcagataatttttatcaattgagttggttcggaaaaattacggactatttatggcacatgacgttgccgcttattaccatggtgttgggtggttttgccagcctaacttatctaaccaaatattcatttttagaagagcttaataaaccttatgtcttggcagcttatgcaaaaggtttaaatagccaacaagtcttatataaacatgtattccgtaatgccattttagtggttcttgctggattgccggaagctttagcaggcattttctttgtgggaaatctttttattgaaattatttttcacctagatggtgtggggttgttgggctttgaagcaattgttcagcgagactatccggttatttttggcgtattgtttttcttcacgctgtttagcctgcttttacgtcttatttgcgatgtactgtatcaatggattgatccgcgtattcactttgacgcacaaggaggcaaataa

SEQ ID NO: 44235 - DNA, 1011 bp, Acinetobacter baumannii
atgtcttttattgtgcggtcacggctgcaaaagtttaggcaacataaattagggtgggcaagctttgttttgtttagccttattttgatgatgtccttagctgctgagctcattgccaacgacaaaccattgttggtgaaatatgaggacgcttattatttgcctgtctttaaaacatatcccgaaaccacttttggtggcgtgtttgaaacagaagcagattataaagatcccgctgtacaagaactcattaatcataaaggctgggctatttggccccttataagattttcttaccagactcctaatttagacttggctgtacctgtgccatcgccaccttctaagcagaactggttaggaacagatgaccaagggcgagacgtgcttgcacgtattctctatgggcttagagtctcattacttttcggcttggctttaacaggttgtgcagcgctacttggtatttttgtgggtgctatacaaggctactatggtggctgggttgatttgttggggcagcgactggtagaagtctggaatggtttacctatgctctttatggtcatgattttggtcagcatgtttaccccaaatgtatattggctattttttattatgctgttctttagctggactgtacttgtgggaattgtccgtgccgaatttttaaaagcgcgtcaacttgactatgtgcgtgcggctcaggctttaggtgtaactgatagagcaattatctttaagcacattttgccaaatgccataagttctagcctatcgcagttaccttttattttgaccactaatattattgctttaaccgcacttgatttcttgggctatggtttgccgccagatgcagcctctttaggtgagttgttgttgcaaggtaaaaataacttagacgcaccgtggttggctttatctgggttttttagcttagcttttgtattgtcattattaatttatattggggaggcggcacgtgatgcatttgacccaagaaaataa

SEQ ID NO: 44236 - DNA, 1590 bp, Acinetobacter baumannii
atgcatttgacccaagaaaataacttaaatgtagatgctagattgctaaatatagaaaacctttcaatctctacgcaagatcagattttattggaaggtctcaatttacacttacaagccagagatacgcttgcaattgtaggtgagagtggttcaggtaaaacaataagctgtttggcgatgatgggattactaccagaaaaattaaaaacatctggtcgtattattattgattcaaaaaatattttagaaatagacgaaaagacgcaaacacacatacgcggccgccaaattgccatgatttttcaggagccttctacggctttaaatccattgcatcgtgttgaaaaaattgtcggtgaaaattttattttacaaggtgggtcaaaagcgaaagctcaacagcaggtaattcaattattaaaagatgtaggaattgctaatccagagtacattttaaaacgttatccgcatgagctttcaggtggtcaaaaacagcgggtgatgattgcggctgcgctagctcttcaacctaaaattttaattgcagatgaaccaactaccgcgcttgatgtgattttacagacgcaaattttagaattattaaaatctttgcaaagcaaatatggtatggcgctgattttaattagccatgatttgaacgtggtacgccgttatgccgatgagctgattgtattacacaaggggcaagttgtagagcaaggtcagcttcagcaaatctttaaaaatcctgcgtcaatttatacccagcaattgttagatcatgatcttggtttcgctgagcgatattcaaccagccataagattttatctgttcaacaactcaatgttaaatatccaatacgacgtggtttctttaaccgaattcagggttataccaatgcggttgaaaatgtaaattttgagcttgctcaaggcgaagcattaggcattgtgggtgaaagtggatccggaaaatcttcattggctttggctctggttcgattaattaaaagtgagggacagattaactttctagggcaagatataaaccgcttagaacaaaaagctttacgcaagatcaggtcagacttacagattgttttccaagatccatttggtagtctaaacccacgtatgacggtagggcagattattgctgaagggttaaaagtcaaagcgatagctgataaagaaattaaacagcaagttgaatcagcgttgataaaagttgagttggctgagggctttcaacatcgctatccacatgaactttctggtgggcaacgacaacgtgttgctttagcgagagctttagtagttcaacctaaacttttaattttagatgaaccaacgtctgccttagaccgaaccacgcaaaaagcgatgattcaattattacgacgtttacagcaaacagagtacttgagctatatttttattagtcatgatttaaatgtggtcaaagcactgtgtcataaagtgatggtattacgacatgcaaaagttatggaatatcagccgactgagctgttgtttaatgctccaaaaactgaatataccaagcagttaattgcggcaagttgttaa

SEQ ID NO: 44237 - DNA, 1245 bp, Acinetobacter baumannii
atgagccagattgcacaaccaatcacaattcgaaataccacatttaaaaaccggattattaaaggtgcaatgagtgaggcacttgcaaactatgaaggccagccgaatgacttacatttaggcttgtatagtgcatgggccaaaggtggtttgggctgtgcgattactggaaatgttatggtcaatgtagaggccaaaaacgaacctggggtagtggtgattgaaaccgagcgtgacctagagcgtttaaaagaatgggcagcagtcggtaaacaatatggaatggtacagcttattcaattgtctcaccctggtcgtcagtgtccaaagggcctaaataaagaaacagttgcaccttcggcagttccttttagcccagctttagcgactatgtttggtactccacgtgctcttaagcatgaagaaattttggatattattaaacgttttgcgacagctgctcgtatttgtgaaaaggcgggttttgaaggggtacagttacatggtgcacatggctatttaattagccagtttttatcaccattaaccaataaacgtacagaccagtggggtggttcaatcgaaaaccgtactcgctttttactagaggtttataaagcagtacgtgaagcaacttctgataattttattatttccgttaagcttaactctgccgacttccagcgcggcggtattagcgaagaagatgtgatttcggtatttaaagcagttgatgaagctgggatcgatttaattgaaatttcaggtggaacttacgaagcacctgcaatggctggtgccaaagtggataaacgtaaggcaagtaccattgcacgtgaagcgtatttcttagacttcgctgaaaaaatccgtcagcatgtaaaatgtaaacttatggtgacgggtggcttccgtacagtcgaaggtatgaatgctgctttggcaagtggtgcatgtgattttattggtattgctcgtccacttgctgttgaaactgatttaactgaccgtttaattgcaggccaagacgttcgctacgccgtaaaaccgattaaaacaggattaccttttgtcgataaaatggcaattatggaaatcatttggtacgcagcacaatttaaagccattgggcagggtaaaaagccaaatcctaaactgtcacctttaattgtgtttttaaattatgccaagggtaatattaaggctgttgttcaaggacgcgtaaattcacgtaagtcagcgtaa

SEQ ID NO: 44238 - DNA, 2115 bp, Acinetobacter baumannii
atggatcttaagcttcgccttctctccctgagtattgcacaactatgctgtattccagctacttttgcagacacgaacaactcttcaactactcttgcaactatcaaaattaaagcccaacaggcatctgaccagacttataaagtggatagttccagtagtgctacgcgtagtgaaattgcattacaagataccccgcaatctgtgagcgtggtaacccaaaaagtaattgaagatattggtgcaactcgcttagttgaagcacttgatttagctggtggcgtgactcgtgctaataactttggtggtcaaggtttaactggttttaacgtgcgcgggtttaccagtggtgagttttatcgaaacgggtttccaattaaccgtggctatccaaatgcgccagatagtaacaccattgaacgtgtagacgttttacgtggcccctcttctagcttatatggacgtggtgacccaggtggtacgtttaacttaatttctaaaacaccaaactctgagcaacaaaccactttaggtgcacagctcaacagtgaaggtttatatcgcactactgtcgatacaacaggtactatcccaaatgcagaaaatattggttatcgtctaaatgtgattgcagaaggtggggatagttaccgtgaccatgtcgaatctaaacgttatggcattgctcccgtcattcaatggcaagctactgatgccaccaaagttacttttgaagccgatattttaagaaaccaacatccactcgaccgtggtcatacacgttatccaacacagaaatcctttaatagctcaccagaaacctatttatgggaaacgggtaaatactacaatcgactctacaatgataacaatatgactcaattacgagttgaacatgaccttgggaatgactggaagctaaatgctggcgtgcaatatttaaatggcaaattgcatggctatgcagtagaagcaaatggcattcaaaatgacggagaaacattagggcgaaattacaattatcgcgaattaaaatggcaagataccgatgcccaaattaaccttacaggcaatttccagcttttaggtttagcacatactttagtgactgggcttgaatatgaaaattatgattataagtcgtatattattcgctcaagcgaagatatcggtagctattctattaatatttataatccggttttagggcaaccactacctgaacttaatacagttactacacatgaccgcgaaaacttaaaaacaacggccctttttgtacaagaccaactcgaattaaatgaacgtttaagtgcactattaggtttacgttttgagcactatgaacatgattatcaggatttgcgaccgggtaaacccaattggaacactagtcatgatgcatttattccacgtttaggtttagtttataaagccagtgatgacctttcactctatggcaatgctgcaaagtcttttaaaccaaatactggcgcaagtcatagtggcgaaggttttgatccagaagaaggtatggcttatgaactagggtttaaatggttggctctcaacaatatgctgtcagtcgactctgctattttctatgccaataaagaaaacgttttaacaaatgatcctttattcccaaattataaagtggctgctggtgaagtccgtagccgtggtattgagttaaatattgctggtcaaattacaccagcttggaaaattattggtggatatgcttatacagatgcggaagtaactaaagacaatactttgcaaaaaggaacagctctagccaatattccaaagaatagttttaatcttttaaatatctatgaatttcaggatggtcctttacaaggcttaggtctaggcatcaatcaaaaatatattgataaacgtgcaggtcagacagccaatagtacctatatcatgaaaggttatgcagttacagatttggtttcttattatcaggcgacaccaaaacttcgtcttaacttagatgtgaagaacatttttgataaagtttatgatgaaagtgctttcaatttatatgcttatccgggtgaatcacgtaccgttcaattaggtatgagctatacgttctaa

SEQ ID NO: 44239 - DNA, 336 bp, Acinetobacter baumannii
atggaatataaaggaagttgtcattgtggtcaggtaaagtttgccgcggaaggtgagctaacagaagccttatcttgtaattgttctgtctgccaaaagaaagggtctttactttggttcctgccgactaatcaggttaccgttactttagattctcctgatattttagcgaattacacttttaacaagcatgtgattaatcatcatttctgtaaaaattgcggtattcatccctatgcccaaggtaattcgatctttgcgattaatgttcgatgtatagatgatattgatttagaaaagttaaaaataaattattttgatgggcgttctgtttaa

SEQ ID NO: 44240 - DNA, 564 bp, Acinetobacter baumannii
atgatgactaaaaaacaattaacttcaaaacaaatagatatgttgcttgaattattaaaaaatagatttgaaaagaatatacatcgacataaagaaattgattggatgaatgtgcgaactaaactcattgagtcgccagacaaactatgggcattgcaggaaatggaaaatacaggaggagagccggatgttattgcttatgaccagcagaaagatgaatatttgtttatagattgctctgttgagtcaccgaaaggtcgtagaagcctttgctatgatcgagaagccttagagtctagaaaagatcatcctcctaaaaatagcgtaatagacttagtccaagaaataggggctgaactcctaacagaagagcaatatcaccaattacaacagctcggggagtttgatctaaaaacatcaagctggcttgctactccagaggaaatccgaaaattaggaggagctctttttgcggaccgtcgctatagtcgagtcttcatctatcacaatggagcccagtcatattatgcagctcgtggttttcgctgctgtttaagggtatag

SEQ ID NO: 44241 - DNA, 1164 bp, Acinetobacter baumannii
atgcagctcaatccaatttactataatgaacaacatatagcttttgccgataatgttcgtagatttgtacaaaaagaaatggcacctttcgttaatgaatgggatgaggctgagacattcccaagagaactttataaaaaggctgccgaaattggattactgggtctaggtttttcagaagaatatggtggtattccagatgcagatccattctattcattactggctggtatcgaaatggcaaaggcgggttcaggtggggtgcatatctcgctcatggtccataccattggcgcccctcccattcagcactttgggagtgaggagttaaaggctagagttctgccaggtattatttccggtgagaaaatttcggctttagcgattacagaacctggtggcggttcagatgttgctgcattacagactaaagctgttagagatggggattattatattgtttcgggcgagaaaacatttattacatcgggaattcgtgcagactattatacagttgcagtgcgtactgatccgacaaaaacgggtgcagaaggcatttcaatgttactcattgatgcacatagtgaaggtattactaaaacgcctttgaagaaaatgggatggtgggcatcagatacggcacatttgcattttgatcaagtacgagtacctgcatcaaatctacttggcaaagaaaatgccggttttaaagttattatgaataactttaatatggagcggtttttcttgggagtagtcgcttatgggtatgcattagtctgttatgaagaagctttagagtgggcacagcaacgtaaaacttttggtaagcgattaatagatcatcaagtagtacgccataaattggtagatatggcaacccaactgacctcaacgcgggcattacttgaagaaacagcatggaaaatggctcagccgaagttacaaggacctgagttggtggcgcaaatttcaatgcttaaaaatgttgcgactcgcactatgcaattttgtgctgatgcggctgtacaaacattaggtggtatgggctttatgcgaggtaccaagtcagaacgtatttaccgtgaagtgaaggtcaatatgattggcggtggtgctgaagaaattatgaaagatttgattagtaaacagtttggttattaa

SEQ ID NO: 44242 - DNA, 600 bp, Acinetobacter baumannii
atgattgccacctcaattgaacagattccaaatatcccctgctttgatgacagtccacgtggccgtttattgcacggtgcagcctatctttttcataagcaaggctatgataaaaccactgttcgtgaacttgctcagtttattggaatccaatcgggaagcttatttcatcatttcaaaagtaaagatgatatcctcgctcatgtgatggaacagaccattatctataatcttgcccgtttaaatgatgcagcaactcaatatacagacccagaacaacaattacgtgctcttattaaagccgaactgatctcaattactggagatactggtgcagccatggctgtgttggtgtacgaatggttcgctctatcaaaagaaaagcaagattaccttttaaaaatgcgtaatgaatatgaacaaatctggctcgacgttatagaaaagttacgcacgcaaggtaaagtcaaacacgatgcttttatttggcgacgcttaattggcggtgcaatttcatggactgtaacttggtataaatctgagggtaaagtcaaaattgatgagttaaccgaaatggtctgggaaatggctttgaaataa

SEQ ID NO: 44243 - DNA, 1806 bp, Acinetobacter baumannii
atggcaaataatcagcaggatgatcatcgagtcgtaaaaatagggtgtgcctctgggttttggggagataccaatactgccgcttttcagttagtgcatttgaccgatattaattatttggtttttgattatttgtccgagattaccatgtcgattatggcaaaagcgaagatggtagaaccgaaacatggttacgctttagattttgtcagccgagtcatggcacccttactaaaaaaaattgctgaaaaaaagattaaagtgattagtaatgcgggtggtgttaatccattggcttgtcgggatgccttgcaaaaaattattaaagagtatggtctagatctgaaagtggctgtggtgttaggtgatgatcttttgccaaaacatgaacagctaaaatcacagaatattcaagaaatgtttagcggagaagcgttgccagaacaggtggcaagcagtaatgcttatttaggcgcggttgctattcgtgacgccttagacttaggtgcagatattgtgattacgggtcgtgtagttgactctgctgtggtacttgcacccttacttcatgaatatcagtggcctttagatgactatgacaaattggcgcaaggttcgttagcaggtcatgtgattgaatgtggagcccaatgtacgggtggtaattttaccgattggcaattggtacagggcttcgacaacatgggctttccagtggttgaagtgagtgaagatggctcatttgttgtaactaagcctcaaggtacaggtggtctggtttctactgctacagttgcagagcaaattgtttatgaaataggcaatcctcaagcatatttactacccgatgtcattgctgatttcagccacgtgcatttagagcaagtcggggagcaccgagttcgtgtgacgggtgcaaaaggacaagcaccaactacacaatataaagtcagcgcgacttacccagatggatatcgggttttagtgagtttcctcattgcaggacgtgaggcaccacaaaaagcacaagtcattgctgatgcgattttgactaagtgcgaacgtgttttagcaatgcgctcagtgccgccatttagtgaaaagtctgttgaaattttaggtattgaaagtacctatggcgaccatgccaaaacattaaatagtcgtgaagttgtggtcaaaatagctgtaaaacacatgtttaaagaagcatgtatgttctttgcatctgaaattgcacaagcttcaacaggtatggctccagccttggcaggaattgttggaggccgacccaaagcatctccagtgatcaaattattttcatttttaattgataaaaatcaggtgaatgttgaaatcgattttgatggccaacgttacccaattgagattccacaaggggtttctacagagcaattgcttacattgacggcaggtgaaaatgcagtttatcaaggagatgaaattgaagttcctttgattgaaattgcgcatgcccgcagtggtgataaaggcaatcatagcaatattggcgtgattgcacgtaaagcagactatttaccatggattcgtgcagcactaactgaacagtctgttgcaagctatatgcaacatgtcttggatgctgagaaagggcgagtaatccgttatgagttaccgggtttaaatgcactgaattttatgttggagaatgccttaggcggtggtggtattgccagcttacgtattgatccgcaaggtaaagcctttgcccaacagttattggatatgcctgttaaagttccggcacatcttttagaaaaataa

SEQ ID NO: 44244 - DNA, 912 bp, Acinetobacter baumannii
atgagttatcaatcaatatttagaccagatgctttcgccaataaagtcattattgtgacaggtggtggctcaggaattggacgctgtactgcacatgagcttgcagccctcggcgctcaagtagtgattacaggacgcaaaattgaaaaattagagaaagtaagccaagaaattatagaagatggtggtttagttcatttcattgtttgtgataaccgtgaagaagaacaagtgaaaaatatgattgccgaagtgattgaaaaattcggcaaactcgatggtttggtaaataatgcaggcgggcagttcccctcagctttagagaatatttcggcgaatggtttcgatgcagtcgtgcgtaataatttacacgcaactttctatctaatgcgtgaagcttataaccaatggatggctaaacatggtggcagtattgtcaatatgactgctgatatgtggggcggtatgccgggaatgggacattctggtgctgcgcgttcaggggttgataacttaactaaaacagcatcggttgagtggggcaaatctggtgttcgtgtaaatgcggttgcaccggggtggattgtatcatccggtatggataattatagcggtgattttgccaaagtaattattccaagtcttgccggcaatgtaccgttaaaacgtatgggaactgagtcggaagtctcatcggcaatttgttatttactgtccgatgctgcggcttttgtgtcaggtgtaactttgcgtattgatggcgctgcatcgcaagggacacgcatgtacccactagccgaagcgacaaatagtcagtcttataatggtttccatcgcgcgtttattcctgaaatttttaaaaaagataagactgagaaagtcgagcaaagcaataattcaggctcggagtga

SEQ ID NO: 44245 - DNA, 1614 bp, Acinetobacter baumannii
atgaccattcttcaatccgaaattactgttggtagtgaacagtatcaaaagaataaagaggcactacttgctcaactgagtgaagtccgtgcaattcagcaaaaaagtattgataaatcgtatgctgctaaaccgaaattcgataaaaagggcaagattctgccgcatgagcgtatacggttattgctcgatgccgattcgcctttcgttgagctttgtggtttggttggctacaacatgcatgatgacaaggatggctccgaagctggtggtggtgtaattgctggcattggttttgtcagtggtgtgcgttgtctggtctctgcaagtaatagcgcgattaaaggcgggaccatgtctcctatgggcgtacagaaaactttgcgtttgcaaaaaattgccttagaacaaaaactcccgctgattacgctgaccgaaagtggcggcgctaacttaaattatgcagctgaagtatttacctatggtggtatgacttttgccaatcaggcacgtctgtctgcggcaggtattccacaacttgcagtggtacatgggaatgcaacggcaggaggagcttatcaaccaggtctttcggactatgtgattgctgtacgtaaacagactgaaatgttacttgcaggcccacctttacttttggctgctacgggtgaagtcgctacagcggaggaattgggtggggcggaaatgcatgcgcaggttgctggaaccgcagaatacttagcagaaaatgatgccgatggaattcggcttgcacgtgaaatttttgaacacctcaactggaaagagcaaatcaaaccagttgatgtgacttataaagagcctcgttacgataccgaggaactgttgggtgttattccaagtgattctaaacaaccatttgatatgaaagaagtggttgcccgccttattgacgattcagattttctagaatttaagcaggaatatgatgatttaacggtatgtggctgggcaaaaattggtggtttgcatatcggtattattaccaataatggtccgattacccctcaaggagcagtgaaagcagcgcagtttattcacttatgtgaacagactaaccgcccgttattattcttacataacactactggctttatggtgggaaccgatgccgagcaaaatggcattattaagcatggctcaaaactgattcaagcggttgccaattgtactgtacctaaaatttcaatcgttgtggcagggtcgtatggtgctggtaactacgcaatgtgtggtcggagtttatcgccagattttatttttgcttggccgaactcgcatgttgctgtaatgggggctgcacaggccggaaaggtactacgtattgttgctgaagggaaacaaaaagcttccgggcaggaaccgaatccgcaaatgctcgattttcttgagcaaagtactgcgatgaaattagagcagcaatctaccgcgcttttcaatacggccatgctacatgatgacggcattattgacccgcgagatacccgaaaattacttatttttcttttagaaactatttatgaagcgcagcaacgcgaactaaatccgacccgttttggtgtgtctcgtttttaa

SEQ ID NO: 44246 - DNA, 1158 bp, Acinetobacter baumannii
atgaaatttactgccgaacatgaagcattacgtcgcacagcgcgtcaatttgttgaaaatgaactgaatccgaatattccggaatgggaagaagctggacgtttcccgatccacgatgtatttaaaaagatgggtgatcttggcctattggggatttgtaagcctgaggaaaatggtggtctggctttagattactcttataacttggttgttgctgaagaaattggacgcgcagcttgcggcggtgtgcctttagccattggtgtacaaacagatatggcaacacctgctttggcgcgttttggtagcaaagaattacgtgatgagtttttaacaccagccattgctggggaatatgtggcatcgattgcagtatcagaagtacatgctggttcggatgttgctgctattaaaacgactgctaaaaaagatggcgatgactatgtcattaatggcagcaagatgtggatcaccaactcattgcaggctgatttcttctgcctattggccaacacatctgacgataaacctcacgtcaacaagtcgatgattattgtgccagccaaaactaaagggattagtttttcagagccgttaaataaattagggatgcgttcaacgaccacagcgcaggtttatttagacaatgtacgtgtacctcagcgtaacttggttggcgttgaaggtatgggcttcatgatgcagatgatgcaatttcaggaagagcgtttatgggcttgtgctaatgcgattggtggtttggaaaatttaattcaaaagactatcgcctataccaaagagcgtacgacatttggtcaaccactcattaataaccaatatatccattttcgttttgccgaactcatgactgaagtagaagcgcttaaagccttaacctaccaagcgtgtgaacagcatattgcgggtgaagatgtgactaagctggcatctatggcaaagctcaaagcaggccgtttaagccgtgaagttgctgatagctgtctacaatattggggtggcaatggctttatgtgggataaccctgcatcccagctatatcgtgatggtcgtttaggctctattggtggtggtgcagatgagattatgttggggattatctgtaagttgatggatattttaccaaaaaaacaaaaataa

SEQ ID NO: 44247 - DNA, 837 bp, Acinetobacter baumannii
atgacactttcagcatcgcttcaagctatagatattgatgacagcattcaattagaacaagacggcagtattttatatctttggttaaaccgaccagagagccgtaatgccatgaacttgaatatggtcaatgcgattcaacaagtttttactgccattcgcaatgacctttcaatccgtgcagtcatcattcgtggtgaaggtgggactttctgcgcaggtggtgatattaaagacatggctgctttacgtgttgaagcaactaacattggtagtctacaaccttatactaattttaaccgccgttttggtgccatgcttgagcaagttgaagctgcaccacagactgttgtggtcattttagaaggtgcggtgttaggtggcggttttgggctggcatgtgtttccgatgttgccattagccgtgacaatgcgcagtttggtttacctgaaactgggcttggtgtgattcctgcacaaattgctccttttgtggtgaaacgtattggcctgactcaggcacgtaggctggctttactcggcatgcgttttgaagggcatacagcactgagtgtcggtgtggttcatcaaattgcacataatgaaattgaacttgagcaagctttagaggaaaccattcaacacattaaacgagcagctcctctagcttcacgtgtgactaaagcactgttacatcgaacactcaatgaacctttaaatcagttgctagatgatgctgcacagcagtttgctcaagcggttggtagtgctgaaggacaagaaggaacgatggcttttatccagaaacggttaccaaattgggccgatgaatcataa

SEQ ID NO: 44248 - DNA, 1941 bp, Acinetobacter baumannii
atgaaattttcaaaaatactggttgccaatcgtggtgaaattgtagttcgggtgatgcaaacagccaaggcaatgggttaccaaaccgtcgcagtttattccgatgcagaccgtaatgctcgccatgtgcaagaggctgatgaagctgtttatattggtgcttcaaaagtatcggagtcttatctctccatcgctaaaattattgaagcttgcaaaaaaacaggggcggatgcagttcaccccggctatggttttttgtcagaaaatactgattttgctcaggcatgtatcgataatcagattacctttattggacctaccgcttctgcaattgagttaatgggcagtaaacgcctttcaaaaatcgccatgattgaggcgggcgtcccttgtgtgccggggtatgaaggtgaccgacaagatctcgaatatttaacaactcaagctgagcagattggctttccaattatggtcaaagcttcttcgggtggtggcggtcgtggcatgcgtttggtacagcaaacatccgagttgtttgaggcattacaaaccgcacgttcagaagctgaaaatgcttttggttctggcgagctcattttagaaaaagcagttattgctccgcgtcatgtcgaaatccaggtttttggtgatacacatggtaattatgtgtatttgtttgagcgcgattgttcaatccagcgccgtcatcagaaggttgttgaagaggcaccgtgtccagtgatgacgcctgaactacgtcagcaaatgggcgaggcagctgtagcagcggcaaaagcatgtgcttatgtcggggcaggtacagttgagtttttgctagatgcatcgggtgcattttactttttggagatgaatacccgtttgcaagtggagcatcctgtcactgagcttattacggggttagatttagttgaatggcagttacgtgtggcgaatggtgagcagttacctttaaagcaacaggaattgaccttaaatggacatgcgatagaagtgcgtttgtatgcagaagacccacgtcaggactttttgccacaaacaggaaaagttttacgctggaagcctgcaactttgccaaatgtgcgaattgatcatggcatgttagcaactgatgaagtcagtccattttacgatccgatggtagcaaaggtgattgcatatgggaaaacccgtgaggatgcgattcgcttactggctcgtgcagtcgatgatagtgttttacttggagtgaatagtaataaacagttcttggtcaatttactgcgccatccagttgttgttacaggggataccaatactgcattcatccaacagcatttccaaaatgatcccagcttacaccatcaagttttatctttagaaaccttagcgattgctgcagcactatttagccaaagtaaaggtactagagtgtggcaaactgggcttggtgtgccattaccgttaaaattacaagctgccgatcagcaaattcaattgcagctttcatctgtaaataacacattcacggtacagttctgtgatcaagtagtttgtattgatgtgcttgagaaaacgccagagcaactagtttacctaattgatggtgtacgtcgtcgtgtgcagtatgtattagatagtgatcagctttatctagatcgggataatggtaatgttttgatacgcaatatgacttacgctgcaccagaagctaccgatgtagcgggagacggcaaaattcgagcaccgatggatggggctgtggtgaatattctggtcaatgaaggcgatcaagtagtgaagggccaaacattattgattcttgaagctatgaaaattcagcaacagattaaatctgatgtggatggtgtagtcgatgaaattttaggtcagcaaggtcaacaagtgaaaaaacggcaaatgctgtttagtatccaaatttaa

SEQ ID NO: 44249 - DNA, 657 bp, Acinetobacter baumannii
atggcatttgatttagtccaatactttgctgagcaaataaaaattcaaaaacctcagcttttaaatcaatatccagccaatgagaaaaataagctgattgacgaagtgaatatattgacgcttggtaaattaatcagcttatggcgtcaggacgacaataaaatttatcatgaaatcaaaactgccgatccattgtatattcaagaagttgcacgtcatctaactacgtcaaaaaacaataagtcagttttaaaaaatgctgaacttgagcaaagtatttctgagattctggcattacagttaacagaacttaatcagcttgatgagactggtggtttcggccaaagtggtttaaaagagctcattttagggcaagttgaacatttatctggccaagctgaagattgggtttggtcaacaaaccatctaacagagctcattggttctaaacctgttgaacaagaagagctatcattggatgcaacaatgaaggagttcaaccaaatggttcaccaagcccaaccacatcatgaagatttacatgttgaagagcaacctatcgaaacttttattcctggatggtcaaaagttatcgctcctcttgttgctttagctattttaggctatctctattgtatgtatacacagcttgtataa

SEQ ID NO: 44250 - DNA, 429 bp, Acinetobacter baumannii
atgtctgagcaaactattgaattaacccctacacgtccttatcttgctcgtgcaatctatgaatggatttgtgacaatcaactcacaccttatttactcgttgatgcaacacaaccgcacactgatgtaccacaacagtttgtgaaagatggacaaattgttttaaacattgtgcctcatgcggtacatcaactactcattagcaatgatgcgattacattttcagcacgttttggcggtgtttccaaagatatttacgtacctattcaagcagttttaggtatttatgcacgtgaaaatggacaaggtttattctttgaccctgaagaatatgccaatgtagcgcctgtagaagataagttagactcagaaacacaagaaacatctgaaccaaccaagaaaaagccaacattaagaattttagattaa

SEQ ID NO: 44251 - DNA, 654 bp, Acinetobacter baumannii
atgtcggtcgaaaacacctcaattcagggaattaccctttacagccatgctgatgatttccgttcacactggatccgttttttattggcagaaaaacaaattaaatatcaattaatcgtgactgatcacgaagatgaagatctcgcaagcctaaatccttataatcaattgccaatgctggttgagcaaaatcttaaattattttcagcacctatcattgctgagtatctcgatgaccgatatcgtcagaataaactatatgccgatgcccctatggcacgtgcagagcaacgccaatatatttggcgtcttgaaaatgattggtttaagttggccgatcatatgctcagacatgcagatacgttaaatgtagaacaaaaacaaaaagcacaaaaagaattgcgtgacaccttaatatcgcttacccctttatttcagcatttcccttattttatgtccgaaaatttttcaatcctggattgtatgcttgctccaatttttgtgagacttaatagcatgggaattgatttaccaaagcagcagtgtcgacctatatttttgtattgtaaacgtatctttagccgcccttcttttgttaaatcaatgacgccccaagagaaaacccgttacaatgaactattaaatatggaatag

SEQ ID NO: 44252 - DNA, 387 bp, Acinetobacter baumannii
atggctactaattatggtacaggtcgccgtaagaccgcaactgcacgtgttttcttgtcagctggtacaggtaaactcgttattaacaaccgtactttagagcaatatttcggtcgtgaaactgctcgtatggttgttcgtcaacctttagagcttttagaagctactgaaaaatatgacctttacatcactgttaaaggtggtggtatcggtggtcaagctggtgcgatccgtcacggtattactcgtgcacttatcgctgctgacgaaactttaaaacctgttcttcgtcaagctggtttcgttactcgtgatgctcgtgaagttgaacgtaagaaacttggtttacgtaaagctcgtaaacgtcctcaattctctaaacgttaa

SEQ ID NO: 44253 - DNA, 429 bp, Acinetobacter baumannii
atgaaaactctcagcgcaaagcctgctgaagtacaacacgattggttcgttgttgatgctacaggtaaaactcttggtcgtttagcgactgaaattgcacgtcgtttacgcggtaagcacaaaacttcttatactcctcacgttgacactggtgactacatcatcgttatcaatgctgaacaagttcaagtgactggtaacaaagcgcttgacaagaaatactatcgccacactgaattcccaggcggtttaaaagaaactaatttcgaaaaattagttgctcacaaacctgaagaaatctttgaacgtgctgttaaaggcatgttgccaaaaggtcctcttggttatgcaatgatcaagaagatgaaagtgtacgctggtagcgagcatccacacgctgctcaacagccacaagttttggacatctaa

SEQ ID NO: 44254 - DNA, 975 bp, Acinetobacter baumannii
gtgattgtgctgcctttatatgtcacttccggtgaacctgccggtattggtccagatatttgtttaagtctggcaaaacgggttgatgaacgtcctgttgtggttttggctgatcgaaatctattacaacaacgcgctcaaaagcttggtctagacattaaatttttagagtatagcggacaagctgaatcgtctttgcaaggcgagctttatatagaacatgtacccctagaaactatagtcgttgatggacagcttaatgctgctaatgccgcttatgtattagagcaattacgtcgctcagctgattatgctatgtctggtaagagcgtcggtgtagccactgctcctgttcaaaagtcggtgattaatgatgcagggattttatttagtggacatactgaatattatcaagaatttgcaggtgtagagcgtgttgttatgatgctggcaacgaaaacgttgcgggtggctctggcgaccactcatttaccattaagagatgtcgcggatgcaattaccaaagaacgcttgcatcaagtgattgatattttacttcacgacttaaagaccaagtttaaaattaatgatcctcgagtcttagtatgtgggttaaatcctcatgcaggcgaagatggttatttgggacgtgaagagattgatacgatcaatccggtacttgaaagctaccgatcacagggatttaaattaagtttaagtttgccagctgatactttatttacgcctgaacatcttaaaaatgctgacgctgttcttgcgatgtaccatgatcaaggcttacctgtgttaaaatcacagggttttggtgaagcaatcaatatcacattgggcttaccatttattcggacttcggtcgatcatggtactgctctgtctttagctgggacaggattggcaaaaagctcaagtttaaatgtcgctgtcgatttagctttatctttggcagcgagttaa

SEQ ID NO: 44255 - DNA, 813 bp, Acinetobacter baumannii
atgtatcaaattaatgccctaaacccgaaagatgaagggcataaagctcgtaaacgttttggtcaaaacttcttacatgatcaacgagtcattgccaaaattgtacgctcagtcaatccgcgtacgggtgataatatcgtcgaaattggtccaggtttagctgctttaacttctcctctaattggagaatgtgatgcattaactgtagttgaattagaccgtgatttagctgccggcttacctgaacgcgtgccacatccagaacgtttaactatcgtagaagctgatgcattaaaatatgattttagtcagcttgtaaaagatgggcgtccattacgcgttgtcggcaatttgccttataacatttctacaccattactttttcatctcttggaatttggtagccaagttaaagacatgcacttcatgttgcaaaaagaagtggtagaacgtattactgctgaaccgaatacaaaagaatatggccgtttatcagtcatgatccaatattattgtcagcctacctttttatttgaagttccagcaggcgcatttaacccgccaccaaaagtgacaagtgcagtatttcgcttggttccttacgaacaaaaaccaattacggcgaaagatgaaaaagctttagctcgcttggttgcccacgtctttactcaacgtcgtaaaacgctaagaaacagtcttaaaggtatgttagcagaagatggtttcgagaaagcaggagtcgacccaatggctcgtccagaaactttaactcttgcagagtttgtggctttggcagatcaaatggtggcataa

SEQ ID NO: 44256 - DNA, 840 bp, Acinetobacter baumannii
atgactaagcgctataactatgtaattggagatgtgcaaggttgttttgaggcactcaaagcgctattaaaagaaatacgttttgaccctgatcaagattttatctggtttgctggtgacttggttgcacgtggtgaaaactctgtaggtgctctacgttttattaaaaaactagctgatcgaggggctgctgctaccgtattaggtaatcatgatttaaccctgattgccggtgctcgtggtcttaaggaaattaaagaaaaagatcgcacgcaggatgttattgacgccgtggatggtgatgatcttatcgattggttacgtaaacagccgttatgtttatttccaaatgggcaaacaatactgacgcatgcaggtgtaccttgtatttgggatgcacaaaaaactgctgcattggcaaaagaagttgaggctgtattggcgcatgatgatttatctgtgctagatgcatttttagctgaaatgtatggttcaaaacccgatctttggacagatgatttgacaggtaatgaacgtttacgttgtattaccaattacttaactcgtatgcgtttaactaatgcagaaggggctttggagtttagttttaaagatactttagatgcaccaatgccagaaggttatttaccgtggtttgaatttccaagtaaggctgcacaaacccatcaaatattttttgggcattgggctgctctagagggtagaactattagtgagcacatccaaaatgttgatggcggttgtgtatggggtaaaaacttaattgcttatcgtcttgaagatcaacaagctttttctgtgagtaaccctgttatgtaa

SEQ ID NO: 44257 - DNA, 444 bp, Acinetobacter baumannii
atggggaaattttttgttggagctttgctcctagtgggaataaatacagctacttttgcagctgatattacaggtctttggcaaacgattgacgataaaacaggtacacctaaagcacatgtagaaatacggaaagaggcaaatggtacttatgcaggtaaaatcgtaaaaattacaccgcgcccaggttatacaccaaaagaaatttgtgataactgccctgcaccttataccaataagcctattttaggcttagatatcgcaaccgggctcaagcaaactgataattcaacctatacaggtggaaaaattctagacccaaatacgggtaaagtttacggattaaaagcaaaactcagtgcaaacggtaaacgtctacatatgcgcggttaccttggggtatctgctttaggccgtaatcagatctggattcgcctagaataa

SEQ ID NO: 44258 - DNA, 675 bp, Acinetobacter baumannii
atgtttatgattctttatggatttttgatcactttagttggctacctttgtgcaaaaccattaaaccgccgctttcctcaagttcctcttttagttttcggcatgttcattgtcattgggctattatcaatcttgaaagttccctatgaagaataccggctttacgtaaatgatttatttagccatttattaggatatgtcacggttgctttagctatacctttggctgcaatgcgttatgacgatttacctcttaaatcggtgattggtattttatgctttgccagcattagtgccgttgctttaccaatgggccttgcttacctattgcatatgtctgagccgactattttggcttttgctacacgtgcagtaaccaccccaattgctttaaacatcgcgaccttattacatgctccagagacattagtcactctcattgtgattttatccggagttattggtgcagcattttcaccatttttacttaagcatatacacgatgaaagagcttcaggtttagctctaggcttagctgcacatgcaattggaactgctcaggcttggcaacgtggacctgtagcaggtcgttatgcggcatttggcatggcattaaacggtgtatttactgctatttggctaccaaccttcatgttatcttttggaatacactga

SEQ ID NO: 44259 - DNA, 372 bp, Acinetobacter baumannii
atggataagatcaaaagaatagactgggcagcatgggtaggaactttactacttattatcggttttcgcgaaggctcagtcgtcgttatgcgtgcttttggtcatccagagctaggcaatctggtaggtttaattagtttacttatcgttttactcatttggcgtaaatttaagaaaatcccgctaagacttgtcgatactaacaataaagtcatgaaagaaagtggttttgcttttttacccatttgtgcaggctccttaattatgctggtgcatatgggtaaagaaattccgctatttctttttgttttggtagtgagcacccttatacccttgtgggtctatgcaaaaatggcaaaacattggttataa

SEQ ID NO: 44260 - DNA, 1335 bp, Acinetobacter baumannii
gtggaatatgttgatcggcatcaaggcggtgaacgcacaatattagtgagtgtgtctgtacaattattagatgatctggatgccgaagaatttgctctacttgcacagtcagctggtgcagatattcttgagcacattaaagttcaacgtaataaaccggaccctaagttttttattggttcaggtaaagttgatgagattgcagaacaagttcaggacttagaagcaagtcttgttatttttgatcatgcattaacccctgcccaagagcgtaatttagaaaagattttaaaatgccgcgttattgaccgcaccggtctcatcttagatatttttgcccagcgcgcgcggacccatgaaggtaaattacaagttgaacttgctcagttaaaacatttatcaacccgtttaatccgtggttggtctgctgattttgaacaacaaaaaggtggtatcggtttacgcggtcccggtgaatcacaactcgaaacagaccgtcgtctcattcgtgttcgtattacccagttaaaagacaagttagagaaagtccatcaaacccgtatgcaagggcgagctgcaagacaaaaagcttcgatcccaactgtttcattagtcggttataccaacgcgggtaaatcaaccttatttaatattttagcgaaaagtgatgtgtatgcagccgaccaactatttgcaacacttgatccaaccttacgccgtctagaatgggatggaattggtacggtggttctagcagatacggtagggttcgtacgaaacttacaacatgatttggtcgaatcatttaaagcaactttagaagaaacgcttgaagctaccctgcttttacatgtcatcgatagcagtagtcatgacatgcttgaccagattgaagccgttgaaggtgtattgaaggaaattggagcggatgcacccgtactccgtgtttataacaaaattgatttgagtggcgaagaagcgaaaattatttattcagagccccatgttccagatcgtgtttatgtatctgcacactcagggttaggtctagatttacttcgccaagccgtacaagaatgtctaatgggacaacttcaacacttctcattggtacttaaacctgcttatggcaaattgcgtactcaactttatgctttaaatgtcattcaatctgagcattatgacgatgaagggctattacatattgatatacgaattgcacctcataagcttgagcagttaattcgccaagccaaactccctatagatgagatattaggtgaacgcgcaagtcagtttaaaaggccactggaagagtttgaaatcaagcactag

SEQ ID NO: 44261 - DNA, 810 bp, Acinetobacter baumannii
atgactcaaacgcaaagtatagtgaattcaacgttaaagaaattttcaaaaataggtttatacggaaaaaaagttacttcagcgactgcggcaatcagtgaaggtttttacttagtttatcgtcatggactttataaagatccaaataatcctgttaacactcgatatgttcaatatttctgtcgtcgtttatgccaagtatttaatcttgaagttcaagtacatggcacaatccccagagagcccgctttatgggtgagtaaccatatttcttggcttgatatcgccgttttaggttcaggtgcacgtgtcttcttcttagctaaagccgagatagaaaagtggcctattcttggcaatttggcgaaaggggggggaaccttatttattaaacgtggatcaggtgactccattaaaattcgagagcaaattaccgaatttttaaaacaaaatattccagttttatttttccctgaagcgactactacagatggccattctgttaagcgggttcatggtcgtttactcggagctgctatcgaagctcagcgtccggtacaggtatgtttaatctgttacgtaaaccgtcatggtgagttagataccgttgcaccatttattggtgagatgtcattcgttgagcatattcaacgtgtgctagaaatgccgaaagtaacagctcatttacttacacttcctcctatttcggtagaaggccatgatgtaaaaagtttgactcaagaagtgcaagaaaaaatggttgaaggattggctcaattacataaaaaagtacttaagccaaaaagttaa

SEQ ID NO: 44262 - DNA, 1626 bp, Acinetobacter baumannii
atggcacaatcctttcattccaaacagcttcaaactcatcaactggctaatggctttttgattaaagcttctatagtcgtatgttcaagtttcgctgtggctttgacaggttgtagcacattacccaaacatagccctgaaccaatccagtacgcacgagatatcgatacatctcaaacttctctttcaaaaattattacgcctttacgtgaaaaaaatccgaatttaacgggttatcatcttttaaatgatcctttagaagcactcgcggctcgcttaaggctgattgataaagccgaaaagactttagatttacaatactatatttgggataacgataaagtcggtgctttagctttacatgcaattattcgtgctgctgatcgtggtgttaaagtacgtttattaattgacgataataatgctaaaaagatggaaggcgtgttactcgcgctttctcaacataaaaatattgaagttaaattatttaatccctaccgtttccgcaaatatcgcgcgatggatatgattttagacttaaaacgtatcaatcgtcgtatgcataacaagagctttattgctgataatcaggttgcgcttattggtgggcgcaatatgacaaatcagtattacaacgttagcgacagttatcaattttctgatgtcgatgtcatgttggttggtgctgccgttgatgatatcgtgaattcttttgatgactactggaatcatgaatatgcatattcagtccaaagtatcgtcagtgctcaacaacaccgtttgcgctatgaaagcttaaaacaacaacttgatgctcattatcaacaagccaccgttcagaacttccttgacttaacctctagatcacatgcttttgataaatggttagaccgtaatattaaatttgattgggttaaagcagaggttgtgaaagactcacctgataaaattagatcaaaagcgaaaaaagaagaacatttaaatttccaattgattaaccatttggaaaaaccagaaagcaatgttgacctgatttcggcttattttattccagaaaagcaaggcgctaaaattttaagtacgcttgctaaagaaggtgtagaagttcgagttttaacaaactcattcaaagcaaatgacgtagctgttgttcatgcgttttatggaaaatatcgtaaagaacttttgaaaaacggcgttcaactgtatgagtttttaccaactccagataaacgcgatttaaataaaaatacggatgagctggcaactaaagcgaaagtaaacatgaaaggtttaagccgctcaagtttacacaccaaacttatggcattagatgaacaggtttttattggttcatttaactttgacccacgttcggcgtatttaaatactgaaattggcgtaattttagatagtccatcactggccaaaacaattcaccatacgatggatgaaaacttaaacaaatatgcttataaattaaagctcgatccaaacaatcatatttactggcaacaggaaactccaaaaggccctgtaatttataaaaaagaaccagaaatgaaatggtggcaaaaggcaggcatgaaactactatcatggctgccactcgaaggttttatgtaa

SEQ ID NO: 44263 - DNA, 1011 bp, Acinetobacter baumannii
atgtggaacccaaattcaatcatcttttgtttttaccttattttttcaatacttgctctctggggaattattgaagcttgggttcatcaatcacgtactgaaacgattcatccatttaaagcttttgttcacttacttgctttttatctatcttatcttcttattccactttggttctttaatttatatgccggttggataggttattactcaattcatgaaaccatttttatctttttattaagcggtattctcatttacgcacgttttatagagccacatatggtacgtgtcgatgttcaccaatatcgtttaaatccagatcgccgttttgctaaacctgtaaaagtcgctttaattgcagacttacatataggcctattctctgggcatgaacgtcaactcaaaatcattgtgaaaaagctcaatgaacaacagccagacttagtagttgtggcaggagattggacttatgagccagaagataagctagtacaggaactgagtgtacttaaagatattaaagctccagtttattcagttcccgggaaccatgacgagcaatatccgggtccgcctattcaacaattattaaaagatgcacttcacttcaatgatgtaatggatattgaaggaaaaattgttgagtttgatgagtttcgtttaatcgggattggtgacttatgggcaggaaaaactgatatgcgttcaatgccagacttacctcaagataaaccatggttaattctttcccataaccctgatacggtagatatggtccctaaattacctaatcgccctttaatgttgtcaggtcatacacatggagggcaggtcgagcttccgtgggtaaccaactatattatgaaaaaagtatcaattttaggccataaacgtggtttctattcgcatgaacatgccgatgtatttgttaccgtaggaacaggtatggttggaataccattaagatttcgtgtaccacctactattgatattattgaacttgtataa

SEQ ID NO: 44264 - DNA, 480 bp, Acinetobacter baumannii
atgaatacaagatctttgaaactctcctttattgcattgctgtgcattgcgcttgcaggctgcttgagttttggtccattgaaatatcgtcaagtaaaaatgctaaaaaaagaggggtttgtacttactaatgaaggctggactctaggtttaccggaacgcttattatttgattttaatgacgcaacattaaaacaaagtcatgaagcagagcttacacgtttagcaaatcaattaaataaatatgatttgaataaattaaaaatcgttggtcacactgacgatgtaggtaatcctgaatacaaccaaaagttatctgaagaacgtgcacaaagtgttgcgaacctcttcttgactcacggttttaaaaaggaaaatatttacgttattggacgtggttcaactcaaccatatgtaccgaatacaaccaatgaaaatcgggcaattaatcgtcgtgttgctatcgtaattattccttga

SEQ ID NO: 44265 - DNA, 1224 bp, Acinetobacter baumannii
atgatatctaagttgtatcaatccacttcgctacatgcactttttagaaagtctcaatttacgatctttgctataactttctttatttgctcttttacatttgtatcaatttccgtttttacgatggaaacttatgcaaaacaaaatttgcaattacttagccatactcttcttgagcgtattcagcctgccgttgtgtttaacgataagatcacgatcgaacaaatcttaaatgaatacacaaatgatcactctattcgagcaattcatatttatgactctgaacatcacctgattgctcaaagttttaagttgtcgagtcaaacttcggtgttagagaaatggtttgatcactggtttttaaatgagccggtacatttaacgatttatcatcatcaacagaatgtaggtgaactcaccctttttggtagctctgaaaaaatattgcaatttttaaagatgattatggtcggccttgctattgcgatgctgtttattgtttgtgcattgtggtggtcagtgaatttgacttatcgtcaaattatgcaagcgatttatccactcacaaatattgctcaaatcgtgagtgaacaaaaagcttataaccttcgttttccttataaccgaattaaagagtttcaagatctaaatacagtttttaatgagttacttgaagaaattcagatttgggataatcagctgcaaaaggaaaatcgtaaattatcgtttcaagctcatcatgaccagctgactctattaccgaatagacattatttttatcaaatattattagatatgtttgaagataaggattttgataataagtcagccttattgtttatagataacaataacttcaaatcaattaatgatcagttcgggcatttagctggtgatgaagttttaaaagagatggcgaaaaggttacaaacgcgtttacgtcatcaagattttattgcccgtttaggcggtgatgaatttgcggttattttgcattccattacgcatgccgatcatttaatatctattgctgaaaatttactcgaaagctgtaaagaacctttgcatctaaatgatcaaacgatttatttcagttttagtgtagggattgctttatcccaatttgcgtctagtccagaagattttattatgcaagcagatcaagcgatgtataaggctaagacttctgagcaacattggtttatttataaaccagagaattaa

SEQ ID NO: 44266 - DNA, 504 bp, Acinetobacter baumannii
atgtggcactccgctaagaaagtattattttgcatacttgtagtgtttgctacgagtgggcctgcttatgccaattcaaaacataatttttatgtgctcactttatctatcttaagttatagcaaatgggagaatgtaagcacacctactctttgcgtaattgataatgcatcaattacttctaccttccagtcttatattcaacaattatcttataattatcgtgtacaaaccgttaatgctaaagatttttctaaatcgcattgccaggctgtttatttctctaccacaccacctcagcagcaacaaaatttaattcagaattatccatatcgttctttgctttctttaagtattaataatccagaatgtgaagttggtagtatcttttgtttatataatcaaaataattacaccacttttaaagttaacttagatgcattaagccattccaaggtccatattgatccaagagttttactcttggctaagaacgcggagtaa

SEQ ID NO: 44267 - DNA, 1122 bp, Acinetobacter baumannii
atgaatataatttttaaaattactagcgtactctcagtaatattacttgtagcctgtggtgatgaaaatagcaacagtgtcagtgaagaaaaaattgcacaatctacccaaaatcaaattgtttataaactaatctctggtactgcattttcaacttctgctttaaatggtgcaaatgtaacagcaatttgtaaagatgggcttggttttaaaaataaagtaattgttaatgcacaagggcaatggcaaggggaaatagactccagtaaatttccttgtcgtttagaggcaaaagctgaggggcaaacttatcatagttatatcgaccatgagggaagggtaaatattaacccgcttacagatatggttgttgcttatgcaagtaatcaggttcctgtaacatggtatcaatctggaagtatgactacagaaaagttaaattcggcaaattctgctttggtcgctgaacttattaaaaaggggtacggtattaataatgatatggatctatttactgctgagatgaaagcaaataaccctattcatcaagctattcaagagttgttggaagctattcagaataatagaaatattaaagattatgattcactgttaatgttaattaaagatggaaatttgtctcaagtacctaagaaaatagagtttttaaataacagcgtagcaaaagtttttggctttaataaagatgcttgccaagtacttccgaaaacagaaaataccgaacaatataataaatgctctgataaggttattgatgatttttcggaaagtaatttagttgctactgattctgatgaaaaatgtattttggtcaaacaagggaataaagtaagtttcactaaagggaatcaaacagtatcggcattattggataaagaacaagaggatggcatggacttcacttttgatgaaggtgaattagaaattatagatcttataattaatacaggaccttacacagatataaatacctatagtcagattggattaagcttttctagtgatgggaaattgagggctgttgttggaaaatctccaatagtgtcttcaatgaattgtgctagcccagagtttaaaaagcttatggagctttataaataa

SEQ ID NO: 44268 - DNA, 933 bp, Acinetobacter baumannii
atgaacgctactgtagaacagcttgcacctgtagaacagcaagcgaccgcgggttgggttgttgcagcactatatcaatttaaagaagttcaagatccagctgatcttcaacaacgtcttttagacttagtgaaaacaattaacctttgcggaactctgattgtagcaggtgaaggaattaatggtaccgttgctggggaccgtgaagcaattgatacgattcatcaatttttgttaaacgaaggttttaacgctatggaatataaagaatcccatagttctgacaaacctttccgtaaaatgaaaatcaagcttaaaaaagaaatcgtgactttaggcgttgaagtaaaacctcgtgatttagtgggtcactatcttgatcctaaagaatggaatgagcttattgcacgtgatgatgtgattctaatcgacacacgtaatgactatgaatataaagccggaactttcaagggggcgattgacccaaaaacagaaactttccgcgaatttcctgaatatgtaaaaaaagagttagaacaacataaagataagaaaatcgcgatgttctgtacgggtggtattcgctgcgaaaaatcaacttctttacttcttcaagagggctttaaagaggtttaccaccttaaaggcggtattcttaaatatttagaagaaactcctcctgatgaaagcctttgggaaggtgaatgtttcgtatttgatggacgtactgctgtaactcatggtgttgaagaaggtgcaaacattaaatgtcatgcttgtggctggcctttaactcctgaagagtctgcgctaccaagctatgaacatggtgtttcttgcttgtactgtattgataaaaccactgaaaaacaaaaagctggtttccgtatgcgccaatcacaaattgctgccgctaaacgtaaacgtttataa

SEQ ID NO: 44269 - DNA, 486 bp, Acinetobacter baumannii
ttgagtagtgatcatcgaatgctctctctcaccccatgtgcagggcgttgttcaacagtttttggtgatcaggtatgtcgtggttgtcgccgctttaaccatgaagtgattcaatggaatacctatacggcagagcagcgtttagctgtctggaagcgtttagatgatcaattggatcagattttggtacctatgttgccgcaggcgaatctacagcatgtagaaggatttatattaggtaaacgtgtcaggttaatggaaggggcgagtaaagggcgtaaactctaccatgccttaaaaatatgtgaaaagaataagcatttagctcatgagagtggtttagggatttcagaagcacaagttaaagaagtatggactgagtttgaaagacgtattttagctttggctaaagcaagttatgagttggcttggttaagagctgatggtattagtcatcacttgttaaatatgtttgaagaagaataa

SEQ ID NO: 44270 - DNA, 1275 bp, Acinetobacter baumannii
atgtctgaagcaactggcaaaaaagccgtattacatcttgatggcaaagaaattgaattaccaatttacagtggcacattaggtcccgatgtaatcgacgttaaagatgtattggcctcaggtcactttacttttgatcctggttttatggcgacagcttcatgcgagtctaaaatcacatttatcgatggtgacaaaggtattttattacaccgcggttacccgattgaccagttagcgactcaagcagactaccttgaaacttgttatttattattaaatggcgagttaccaactgctgaacaaaaagttgagttcgatgcgaaagttcgtgctcatactatggttcatgatcaagttagccgtttcttcaatggtttccgtcgtgatgctcaccctatggcaatcatggttggtgtagtaggcgcattatctgctttctatcacaacaaccttgacattgaagacatcaaccaccgcgaaattactgcgattcgtttgattgctaaaattccaacgcttgctgcttggagctacaaatatactgtaggtcagccattcatctatccacgtaatgacttaaattacgcggaaaacttcttacacatgatgtttgcaactcctgcagaccgtgactacaaagtaaaccctgttcttgctcgtgcaatggatcgtatctttacgcttcacgctgaccacgaacaaaacgcgtctacttctacagttcgtcttgctggttctactggtgcgaacccatatgcgtgtatctctgctggtatctctgctctttggggtcctgcacacggtggcgcgaacgaagcagttcttaaaatgcttgatgaaatcggtagcgttgaaaatgttgctgagttcatggaaaaagttaaacgcaaagaagttaaacttatgggcttcggtcaccgcgtttacaaaaacttcgatccacgtgctaaagtgatgaagcaaacttgtgacgaagttcttgaagcattaggtatcaatgatcctcaattagcgcttgctatggaacttgaacgtattgcattgaacgacccgtactttgttgaacgtaaactttaccctaacgtagacttctactctggtatcatccttaaagcgattggtatcccaacagaaatgtttactgttatcttcgctcttgcacgtacagttggctggatcagtcactggttagaaatgcacagcggcccatacaaaattggtcgtcctcgtcagctttacactggtgaagtgcaacgtgacatcaagcgttaa

SEQ ID NO: 44271 - DNA, 393 bp, Acinetobacter baumannii
gtgaaaagcaacagacctgtcaatttgtccatgggtcaggtgttagcggtaaatttacgctcacccgtggctattgcatcaattttacaccgtttatcaggtgtcatcgttttcttattagtaccagttctcttatggattctagataaatcattatcttcaccagaaggatttgactacgttaaaaatgtcgtttttggaaatatcctcgtacgttttgttgtgtgggtatttgtagccggcttgattttccactttattgctggggttaagcatttgcttgcagatctaggttttgctgaagaactgcaaagcggtcgtattgcagcgacaatttcattgatcttatctgtggtagccattatcgcagcctttgtatggattatgttctaa

SEQ ID NO: 44272 - DNA, 366 bp, Acinetobacter baumannii
atgaaaagtgctacaggtttaacaggttcaggttctcgtgattggtttatccagcgtgtaagtgctgtggtattggcagcttatactgttgttctttttggttggatcctctgcaaaggcggatttgactatcaacaatgggctggcttcatgatgacattaccaatgaagattttctctttattggcaattttgtcgcttatcgcacacgcatggattggtatgtggcaggtttttactgactatgtcactactcgtcaaatgggtccttcagcgaaaggtttacgccttgtactgactacggctgtcattattgcagtgtttgtgtacgcaatctggggtatccagattttctgggcgaattga

SEQ ID NO: 44273 - DNA, 1836 bp, Acinetobacter baumannii
atgggcgcgataaaccctaaagaagattattcaaatattcaaaacctcactttcgatgctgttatcgttggtggtggtggttctggtatgcgtgcatcttaccaacttgctcaagcaggtttgaaagttgcagtacttactaaagttttcccaacacgttcacatacagttgctgctcagggcggtattggtgcgtcgttaggtaacatgcaagaagataactggcatttccacttttacgatacagtaaaaggttctgactggttaggtgaccaagacgcaatcgaatttatgtgtcgtgaggcgccaaaagttgtttatgaacttgaacacttaggtatgccgtttgaccgtaacgctgatggtacaatttaccaacgtccattcggtggtcactctgcaaactatggtgataaaccagttccacgtgcttgtgctgctgccgaccgtactggtcacgctttattgcacacgctttatcaaagcaacgtgaaaatgggtactcaattcttcgttgagtggatcgctcttgatttgatccgtaacgaagcaggtgatgtactcggtgtaactgcaattgaccaagaaactggtaacattgcagtattccaagcaaaagcaacattatttgcaactggtggtgctggtcgtgtttaccgtgcatcgacaaatgcttatatcaacactggtgacggtcttggtatggctgctcgtgctggtattccattacaagatatggaattctggcaattccaccctacaggtgttgcgggcgcaggcgtattgttgactgaaggttgtcgtggtgaaggtgcgatccttcgtaacaaagacggcgaaccattcatggaacgttatgcaccaactttaaaagacttggctccgcgtgacttcgtatcacgttctatggaccaagaaattaaagaaggtcgtggttgtggtccaaaaggtgattatatcttgcttgatatgactcacttgggtgctgacacaattatgaagcgtttaccatctgtatttgagattggtaaaaaattcgcaaacgttgacatcactaaagaaccaattccagtagtaccaacaatccattatcaaatgggtggtattcctacgaatatgcatggtcaagtgtgcttaccagagcctggtacagacaactacactaaacctgtaaaaggtttctatgcaatcggtgagtgttcatgcgtatcagtacatggtgcgaaccgtttaggtactaactcacttcttgacttggttgtatttggtaaggctgctggtgagcacattatcgattacgtaactaaacatcatggtgatgaatatgcaccgcttccaacaaatgtattagagcaaactttagctcgtgtacgtaaattggatgaatcaacttctggcgaaaatgctcaagaagttgctgatgcaattcgtgatatcgttcaagaccacgcaggtgtattccgtactcaagcattgcttgataagggtgttaaagagattcttgctcttgaaccacgcgtgcgtaacattcacttgaaagataaatctaaagtatttaacactgcacgtgttgaagcgcttgaagttgaaaacttatatgaagttgcaaaagctacattaatttcagctgctgcgcgtaaagaatgtcgtggtgcgcatacggtagttgattatgaattaccagctgatcacccaacttattcatacggtcgccgtgatgatgagtggatgaaacatactttatggtattcatcagataaccgtttggaatataagccagtgcgctttaagccgttaactgttgatccaattccaccagcaccacgtacattctaa

SEQ ID NO: 44274 - DNA, 711 bp, Acinetobacter baumannii
atgagtagaggtactcgtacattcgaaatctaccgctatgatcctgataaggataaagcgccgtacatgcaaactttcaagcttgaattgactgataagcaccgtatgttgcttgatgcattgcttgctttgaaggttcaagacgaaacgttaacattccgtcgttcttgccgtgaaggtatttgtggttctgatggtgtgaatatcaatggtaaaaatggtttggcttgcttgcaaaaccttaacgatttaccagagaaaatcgtaattcgtccattacctggtttgccggttgttaaagatttggttgttgatatgaaccaattctatgatcagtatgacaaaattcagccattcttgatcaataaccaacctgctccacctaaagagcgtttgcaatctcctgaagagcgtgaacacttaaatggtttgtatgagtgtattctttgtgcatgttgttcaacttcatgcccatcattctggtggaaccctgataaattcttgggtccttcagcgttgttgaatgcatatcgttttattatcgactctcgtgatactgcaactgcagaacgtttggctcgtcttgacgatccgttcagtttgttccgttgtaaaggtattatgaactgtgtgtcagtatgtcctaaaggtttgaatccaacaaaagcaatcggtcatatccgtaatatgttgttagatcaagcgggttaa

SEQ ID NO: 44275 - DNA, 2841 bp, Acinetobacter baumannii
atgcaagaagttgctgacgcattgcgtcttgacactgaactttccgctgatagtgcagcgtatattgaagaactttacgagcagtacctgacttccccaacctccgtcgctgaggactggcgccaatatttcgataaatatccaaagggtgaccaaccacacagcgctgtgcgtgagcaattcctattactaggacgtaatgctaatcgtgttcaacctgttgtacaaagtactgtaagtactgaacatgagcgtcgtcaaattggcgttttacaactcattgctgcttatcgcaatcgcggacatcaaaaagctaagttagatccgttaggtcttgctaagcgtgaagatattcctgatttagatctttcagcacacggtttaaccaaatcagatttagacacagtattcaacacaggcaatcttgagatcggtaaaagcgaagcaacgcttgctgagatgattgaagcaatggaagcaatctattgtggttcgatcggtgttgaatatatgcatatcgtggacacaaaagagaaacgttggattcaacagcgtcttgaaagtgcccgtggtaaattcaatttctcaaatgaacaaaagaaaggcttcttagagcgtttaaccgctgctgaaggcttagaaaaatatctcggtaataaatacgtcggcgctaaacgttttggtgttgaaggcggcgaatcttttattcctatggtaaatgagattatccagcgtgctggtgccgtaggttgtaaagaagttgttatcggtatgccacaccgtggtcgtttgaaccttcttgttaatattatgggtaaaaaccctgcggacttatttggtgagttcgaaggtaaagcacttcataagaaaggttctggtgacgttaaataccaccaaggtttctcaagtaatgtaatgactccaggtggtgaagttcacttggcattggcatttaacccatctcacttagaaatcgttggtcctgtagtcgaaggttctgtacgtgcgcgtcaagtacgtcgtagagacatcggcggtgatgacgtattaccagttattgttcatggtgatgctgcatttgcaggtcagggcgtgaacatggaaaccttccagatgtcacaaactcgtggctatacggttggtggtacagttcatattattgtgaacaaccaagttggtttcacaacttctgatccacgtgatgcgcgttcgacagaatactgtacagacgttgctaaaatgattcaggctcctatcttccatgtaaatggtgatgatcctgaagctgttatctttgctactcaattagcacatgatttccgtcacgaattccgtaaagatgtagtcatcgatttgttctgttaccgtcgtcgcggccataacgaagcagatgagccatctggtacacaaccattgatgtatcaagtgattgctaagaaagcaactactcgtacactttatgctgatcaattggtacaagagaaagtacttgaccgtgctgaagctgaccaaatggttgaagattatcgtgctgatttagaagcgggtaatcatgtagcgaatgctttgattcttgaaccgaacactaaaatgtttgtagattggactccatatttgggccatgaatatacagacgattgggatacttcatttgacataaaccgccttaaagaattaggcgagggcatgagcaagcttcctgaagggtttgtaatgcagcgtcaggttcaaaaagtaattgaagaccgcgtgaaaatgcaaactggtgaaactccattgaactggggtgcagcagaaactttagcttatgcaactttattagatgaagactatctagttcgtattactggtgaagacgtgggtcgtggtaccttctcacaccgtcatgcaaaattgcataaccaagttgatggttcaacttacattcctctttgccatgtgaaagagaaccaaccacgttttgcgatttacgactctcttttatctgaagaagcagttcttgcgttcgaatatggttacgcaactacaattcctaagagcttgattatttgggaagcacaatttggtgacttcgtaaactgtgctcaagttgtgattgaccagtttattgcttctggtgagactaagtgggagcgtgtttgtggtttaacaatgttgttaccacacggtttcgaaggtcaaggtccagagcactcttcagctcgtttagaacgtttcttacagttatgtgctgaagacaacatgcaagtgatcactccaacgacacctgcacagattttccatgcattacgtcgtcaggctgtacgcccaattcgtaagccattaatcgtaatgtcaccgaaatctttacttcgtcataaacttgcgacttctactttagaagagctagcacatggttcattccaaactgtaattgacgaaatcgatcaaattaacaagtcagatgtaactcgtcttgtactttgtggcggtaaagtttattacgacttactcgaaaaacgtcgtgaacaaaacttaactaatgttgcaattgtacgtattgaacagttgtatccatacccagagcaacgtcttgcggaaatcttggctgcttatccaaatgtgaaagaactcgtttgggcgcaagaagagccgaagaaccaaggtgcttggttgtttatcgcaccgcgtttatatgacgatatcttaaaatctggcaaacaaatccgtatcagttttgcaggtcgtgaagcttctgctgcaccagcttgtggctcaccgtacttgcatgcaaaacaacaagctcagctaattaatgatgcattggcaatcgaagctgaacaatcaggagattctcaataa

SEQ ID NO: 44276 - DNA, 1197 bp, Acinetobacter baumannii
atggcaaccgaaattaaagcaccggtattcccagagtctgttgcagatggaaccatcgcaacttggcataaaaaggtgggtgaacctgtatcacgtgatgaagtaatctgtgatattgaaaccgacaaagttgttttagaagttgttgctcctgcagatggtagcttggttgcaatcattaaaggtgaaggcgatacagttctttctgacgaagttattgctcaattcgaagctggtgctggcgcagcggctgctgctcctgcggcagtagaacaagcagttgctcagactcaagctggtgctgctcctgttgttgagcgtaacgaaactgtatctgatcaagctcctgcagtacgtaaagcgttaactgaatctggcattgctgcttctgacgtacaaggtactggtcgtggtggtcgtatcactaaagaagatgttgcgaaccatcaagctaaaccagctgctaacgttactccattaagcgttgctgttggcgaacgtatcgaaaaacgcgttccaatgactcgtttacgtaaacgtgtagctgagcgtcttcttgcagctactcaagaaacagcaatgttaactacatttaacgaagttaacatgaagccaatcatggaattacgtaagcaatataaagatgctttcgaaaaacgtcatggtgctcgtttaggcttcatgtcattcttcgttaaagcagcaactgaagcgcttaaacgctacccagctgtaaatgcttcaattgatggcgatgatatcgtttatcacggttactacgacatcggtgttgcagtatcttctgatcgtggtcttgttgtaccagtattacgtgatactgaccgtatgagctatgcagaagttgaagcaggtattactgcttacgctgctaaagcacgtgatggtaaattatctatcgaagaaatgactggcggtactttcacaatcactaacggtggtactttcggttcattactttcaactccaattttgaaccagccgcaaactggtatcttgggtatgcataaaatccaagaacgtcctatggcggtaaatggtcaagttgaaatcttgccaatgatgtacttagcgctttcttatgaccaccgtatgatcgatggtaaagaagctgtaggtttcttagtagcaatcaaagaattgttagaagaaccagctaaactcattcttgatctttaa

SEQ ID NO: 44277 - DNA, 1434 bp, Acinetobacter baumannii
atgtctcaacaatttgatcttgttgtcattggcggtggtcctggtggttatgaagctgcgattcgcgctgctcaactaggcttcaaagtcgcttgtattgaaaaacgtattcacaacggtaagccttctttaggtggtacttgcttaaacgtaggttgtatcccttctaaagctttgcttgattcttctcatcgttatgaagatacagtgcatcatttagctgatcacggtattacaactggtgaagtgaatttcgatcttgcaaaacttcttgctcgtaaagacaaaattgttgaccaattaactggcggtattgatcaattgcttaaaggcaacggtatcgagtggttaaaaggtacaggtaaattacttgctggtaaaaaagttgagtttgttccacatgaaggtgaaactcaaattttagaacctaaatatgtaattcttgcgtctggttctgtgcctgtaaatattcctgtagctcctgtagatcaagatattattgttgattcaactggcgcattaaacttccctgaagtacctaagcgtttaggtgtaattggtgcaggtgtaatcggtttagaacttggttcagtatggcgtcgtcttggtgcagaagttgttgtatttgaagcaatggatgcattcttgccaatggctgataaagcactttctaaggaatatcaaaaaatcttgactaaacaaggtttagatatccgcattggtgcaaaagtatctggtactgaagtaaacggtcgtgaagtgactgttaaatacactcaagctggtgaagacaaagaacaaacgtttgacaagttaatcgtttgtgttggccgtaaagcttatgctgaaggtttattagctgaagattcaggtattaaattaactgaacgtggtttagttgaagtaaatgatcactgtgcaacttctgtagaaggtgtatatgcgattggtgacttagtacgcggtccaatgcttgctcataaagcaatggaagagggcgtaatggctgttgaacgtatccacggtcacgcagctcaagtaaactatgacacaatcatttctgttatctatacacaccctgaagcggcgtgggttggtttaactgaagagcaagctaaagaaaaaggtcatgaagtaaaaactggtcaattcggttttgctgtaaatggtcgtgctttagctgctggtgaaggtgcaggttttgttaagtttgttgctgatgcaaaaactgaccgtttattaggtatgcatgtgattgggcctgcggcatctgatatcgttcaccaaggtatgatcgcacttgaatttgtatcttcagttgaagatcttcagttgatgacttttggtcacccaacattctctgaagttgttcatgaagctgcacttgctgtagatggtcgtgcaattcacgcgattcaacgtaagcgtaaataa

SEQ ID NO: 44278 - DNA, 1167 bp, Acinetobacter baumannii
atgaacttacatgagtatcaagctaaagcgttattgaaagaatatggtatgccagtacaagaaggtatcttggctaccaatgcagacgaagcagttgctgcatttgaacagcttggtggtaaattcgcggtaatgaaagcgcaagttcatgctggtggtcgtggtaaggctggtggcgttaaagttgcaaaatctaaagaagacgttatcgaatttgcaaacaatatcattggtactcgtcttgtaacgtatcaaacagatgcaaatggtcaaccagtaaacagcattattgttgctgaagacgtatacccagttgagcgtgagctttacttaggtgcggttgtagaccgttctagccgtcgtattactttcatggcttctacagaaggtggtgtagaaatcgagaaagttgcagaagaaactccagaaaaaattatcaaagttgaagttgatccattagttggcttacaaccattccaagcgcgtgaagttgcgtttgctttaggtttaaaagacaaacaaatcggtcaatttgtaaaaatcatgacagctgcttaccaagcatttgttgaaaatgactttgcattatttgaaattaacccactttcagttcgtgaaaatggcgaaattttatgtgttgatgcgaaagtaggtatcgactctaacgcgctttaccgtttacctaaagttgctgctttacgtgacaaatctcaagagaatgagcgtgaattaaaagcatctgaatttgatcttaactatgttgctttagaaggtaacatcggttgtatggttaacggtgctggtcttgcaatggcaactatggacatcattaaactttatggtggtcagcctgcaaacttccttgacgttggtggcggtgcaactaaagagcgcgtaattgaagcgttcaaaatcatccttgctgatacatctgtacaaggtgttttaatcaacatcttcggtggtatcgtgcgttgtgacatgattgctgaagcaattattgcagcggttcaagaagtaaatgtaactgttccagttgttgttcgtttagaaggtaacaacgctgagttaggtgcgaaattacttgatgaatctggtttgaaattaatttctgcgaacggtttgtctgatgccgcagaaaaagttgtagctgcagttaaagcgtaa

SEQ ID NO: 44279 - DNA, 891 bp, Acinetobacter baumannii
atgagcgtattaattaataaagacactaaagtattggtacaaggttttactggtaaaaacggtactttccactctgcacaagctttagactacggtacaaaagttgttggtggtgttactccaggtaaaggtggtacaactcaccttgacttaccagtattcaacacaatgaaagaagctgtacgtgaaacaaatgcagatgcatctgtaatctatgtaccagctccattcgttttagactcaatcgttgaagcggttgattcaggtgttggcctaatcgttgtgatcactgaaggtgttccaacaatcgacatgcttaaagcaaaacgttatttagaaactaacggtaacggtactcgtttagttggtcctaactgcccaggcgtgatcactccaggtgaatgtaagatcggtattatgcctggtcacatccaccaaccaggtcgtattggtatcatttcacgttcaggtacattgacttatgaagctgttgctcaaacaactaagcttggtttaggtcagtctacttgtatcggtatcggtggtgacccaatcccaggtatgaaccaaattgaagctcttcaattgttccaagacgatccagatactgatgcaattatcatgatcggtgagatcggtggtacagcggaagaagaagctgctgaattcatcaaatctaacgtgactaaacctgtagtaggttacatcgctggtgtaactgcgcctaaaggtaagcgtatgggtcacgctggtgcgatcatttctggtggtcaaggtactgctgaagagaaattcgctgcatttgaaaaagcaggtatggcttacactcgtagcccagctgagcttggttcaactatgttgcaagtattaaaagagaaaggtttagcttaa

SEQ ID NO: 44280 - DNA, 1014 bp, Acinetobacter baumannii
atgagtaatgttgatcagcgtccaattattttgacaggcgaccgcccaaccggacaacttcacctcgggcattttgtcggttctttgcgttctcgtgtaggtctacaggatagccatcatcaacatctcttattagcagatgcacaagcgttaacagacaatgccgataacccagataaagtacgccgtaacattttagaagttgctctagactatttagcggtaggcattgatccaactaaaaccacaatttgtgtacagtcatgcttgcctgcactgaatgagcttacaatgttatatcttaactttgtaactgtagctcgtttggagcgtaacccaaccatcaaatctgaaattcaaatgcgtggttttgaacgtgatattcctgccggtttcctttgctaccctgtagcacaagcagctgatattacggcttttaaagcgactgtagtaccagtaggcgaagatcaaattccaatgattgagcaaactaacgaaatcgtgcgtcgtgtaaaccgtcaaattggtcaagaccttttacctgaatgtaaagcattgctttctaatatggctcgtttaccgggttttgatggtaaagcgaaaatgtctaagtcattaggcaataccattgttttaaatgcttctgacaaagacatcaaaaaagctgtaaatgcgatgtataccgatccaaatcatcttcgcatcgaagatccgggtcaagttgaaggaaatattgtatttacttatttagatgcatttgatccaaataaagaagaagttgaagagctaaaagcacactaccgccgtggtggtcttggtgatggtacagttaaaaaacgtcttgaaggtgtactaaaagaattaattacacctatacgtgaacgccgagaagaacttgctaaagatcctgactacattatggatgttttacgccaaggtactgataaatgtcgaatcattacccagcagactttagacgaagttaaagatggcttaggcttatttaagttctaa

SEQ ID NO: 44281 - DNA, 924 bp, Acinetobacter baumannii
atggcaagtggcttacttttactactagatgatattgcaacaattttagatgacgtcgccttaatgagcaaaatggcagcaaaaaaaactgctggtgttttaggtgatgatttggctttaaatgcacaacaggttacaggtgtccgtgctgatcgcgaattaccgattgtgtggaaagttgctaaaggctcctttgttaataagctcattttagttcctctagctttattaattagtgtgattgctccttggttgattaatcctttattaatgcttggcgggctattcttatgttatgagggtgttgaaaaagttcttcataccattacacataaaaaagcctcaacctcagaagaagcacaaaaagagtttgatagtgaagagttagacttggcaacttttgaaaaagataaagtgaaaggagctattcgtacagactttattttgtcagctgaaattgtggttatttctttaggtactgtggcaactgcaactttaatgactaaagttagtgtcctcagcattattgcagttgtgatgacgatcggcgtttatggtttggtcggcatgattgttaagattgatgacttgggtctatatttaacaaaacaggctgcttcttttaaacaaactattggtcgcgggctgcttgcatttgcgccacttttaatgaagttattgtctatcgtcggcactattgcgatgttcttggtaggtggagggattattaatcatacgattcctttactccatcatgtcactgaaaatacagttgaccatgtggaaactatacctgctgtaggcaacatcattggtgctttaaccccaacgcttattaactttgcaataggaattgttgctggtgcaatagtattgcttattgttagtttgatacaaaaaatgtggccaaaagcttctagttaa

SEQ ID NO: 44282 - DNA, 900 bp, Acinetobacter baumannii
atgcgctggaaaggccgtcgagtcagtaccaatgttgaagaccgtcgaggtggaggcggtgttagggcaggtggtattagtattattggtttggttgtagcatttgttgcatggaaattttttggtgttgacccacaacaagcatatcaggcaacgcagcaggtcactgcttcgcaacaatcaaatgcaactgcacccgaaagtttaacagccgagcaaaaagaagcttcggattttattaggacgattttagccgatacagaggatacatggactcctatatttaaacagttaggtaaaacttatacgccaccaaaattagtcttgtttagtgggatgattcagtcaggctgtggtacagctcagtctgcaatgggtcccttttattgcccggcagatcagaaggtttatatcgatacagaattcttcaaagatatgcgtgagcaaatgggaatatctggcgaacaaaatcagacagaattatcgagacaagatcaggcaggggactttgcccaagcttatgtagttgcccatgaagtaggacatcatgttcaaactttgcttggtatttcatctcaagtacaacaggctcgtgcacaagtcagtcaaagagaaggtaatcagttatctgtacgtcaagaattacaagctgactgtttagcgggtatctgggccaatcataatcaacagcgtactcagtttttagagcagggggacgttgaggaagcaatggatgccgcgcaaaaaattggagatgactacttacaaaaacgagcaacaggacaagtcgttccggatagctttactcatggtagtagtgaacagcgaatgcactggttccaagtcggtttaaaaaccggtgatattagccaatgcgatacttttaataattctatctaa

SEQ ID NO: 44283 - DNA, 1503 bp, Acinetobacter baumannii
atgggtaattttttcttattacaagcatttacggttgtatttgccttatcaattgcgaccaccatatttaataagcgtattttgggctttcctcaggctatcggtgtacctcttgtttctgcgatttttgtcttcattttgcaatggggagccagtcttttaaatggtaatcaattcattactatcaatattcataatattgaggaagcagtacgtcatatcgatttctatgattttttaattaatggtgttatttgctttattctgacgtcttcagcacttaaatttaaaatttcagatctaagaagctattggaaacagattagtattttagccactattgccttggtaatctgcgctgtattgtttggtagcttactttacggtttccaattgttagttgggcatcatgtaccaattttggttcttctattattaggtgcagcattaggcgcaacagacccgatcggtattaaaggtgttttaagttcaattcgtgctcctcatcatctcattgttaaattagaaggagaatctttatttaatgatgcgatgtgtattgccttatttatgacattactgaatgttttacagggtgaacatttttcattggttgcgacattagaagctttgctttatgaaattgtggttgctgttggtattgggtgggcatttgggataggtactttacgcttattgcgtggtaaacacgaaatggaatccctgattttaacaactgcattacttgcaagcggagcatatttggtggctctatttgcccatgcatccgcaccgattgcctgcgtaattggtggtttaatcgtcggcaataaatggaaagaaattcgcgaagagcgtgagatcagagaggttaaccatttttggcatacagtagaagggattatcaattcattcttatttaccttaattggccttgagttatttattcttgacttaaactttagcctgattttaggcggaatagttgctttctttattctgcatatttctcgttttgccgccaactttatgtcttttgctttcttcccaacaatgcgtaagactaaaagttacaatggtagtttaactattttatcttggggtggtgttcgaggagggatttcactcgctttaattttggcggttgcgaatattccggcgctgagtccttatagtagtattctgattggatatacctttattagcgtattgttatctggtgtagtatgtggacttggtcttcctgcggtaatgaatgcgttttattacaatcctaatgaagaaacggaagggcttaaaggcttttatcaaaagctatgccataaaatgaatcgccgtggctttcaatatatagttggagaagatgcattaggaagagaaacaattactatctttaacccagatgttattgttgatcaaaaaacagaagacgggatcgcaaccatgcatgatccaaataagttacaagaagtaaaacgtttcgaaagtcccgataatttctaa

SEQ ID NO: 44284 - DNA, 297 bp, Acinetobacter baumannii
gtgaccactgtatttgctgcatctgccggaacatttttcaatacgcctgtaacagtaacgttgcctgatgcttctgatgcattaatcacattgtcagatgttactgagtcaatcgaaaaatttactgttcctgtatttggtgcagctgtatcaaccgtcacaacacctgtatcagtacctttattgcctgcagcatctgttgcagtcacggtaacggtgtgtgaaccgtctgttaatactggcaaggtattgtctgcaagcgtccatgtaccgtcaccattatttactgctggatag

SEQ ID NO: 44285 - DNA, 354 bp, Acinetobacter baumannii
gtgcctgctgtgctatctacagttgcagtatacgtctggccattgatcacaacagtgaccactgtatttgctgcatctgccggaacgtttttcaatacgcctgtaacagtaacgttgcctgacgcttctgatgcattaatcacattgtcagctgttactgaatcaaccgtgaagttaacaccatctgtatttgggccaactgcatcgacaatagctgtacctggtaaagatgggttgcctgctggatctgtagcaattgcctcaacttcgtcaccatcatttaaacctgggtttggtactgaccagctgccatcaggtcctgctacaactgttgctgtgtcaccattaggatag

SEQ ID NO: 44286 - DNA, 183 bp, Acinetobacter baumannii
atgttcgctttagacgataagaaaggctttgataaaaaaaccatcattttattgtttgataaaatgatgggcggtgaaggccacaggcctgaaaatcttggaccttccaaacaaatgacacttcgattttataagtgtatacagtttaaaatagttcgttctaactgttttatagcaccttaa

SEQ ID NO: 44287 - DNA, 387 bp, Acinetobacter baumannii
atgtccagaatttgttgcccgatctgtggtagtgatgaagttacaattgttgatcaacataatccaactaaaaccaccacgcagcgaaggccattccctaaaccaccgatgcaaagtcttctgcactatgtggtgaactatgccgcaatgggagcatccggtgctcgtatgattcggggacaacgccccattatttttgtgattggcgctttggtcggaggagcgattggctgtgcagcctgcctattaaatcatgttcatgaacagacacctgattcaactctaaaagaatcaccattaccacaaaccttatatcaatgtttggaatgtgagcatcattttgccttgtcgtatgaacaaggtagatatggctttaagagttgctaa

SEQ ID NO: 44288 - DNA, 642 bp, Acinetobacter baumannii
atggtagcagatcctgagaattgtcatgctttgagtcgatccgatcatgaacagagatttaacgtggctgcaagccgcgctcgtgaacggatgtatcttgtccactccgtgagtcgtgatcatatatctccaaaagatctaaggctgaatttactcaatcatttttatgatttgcaagaggatcaaaaagcgtcatttgaagcaaaattagagttatgtgaatcagagtttgaaaaatctgtattcatggtattacatgaaatgggatacacagttactccacaggttaaggttggaagctatcgaattgatttagtcgttgagtcagatggcgatcagcgtttagctgttgaatgtgatggtgatagctatcatgggccagaacaatggcatgatgatatgactcgtcaacgtgctttggaacgcgcaggatggacattctggagatgttttgcatcgagttggtcaattgaacgtgaaaacatggttatgtcattaaaggaaaaacttgatgcaatgggcataaaacctacacatggaatgattagcttaattcaagaggtagaacaaaaactgtgggtagatgaagaatctgaaattaatattaaaagtgattttaaggaagatttattagaagtttaa

SEQ ID NO: 44289 - DNA, 657 bp, Acinetobacter baumannii
atggttggacgtaattatagtgatgtactcaatccgcaaaaggcattgatttggcgtattgtgcatcgtgataatattccgtggatattagaaaatggcttacatagcagcaatagtccaacacaatgtgtaaattgggttcagattggcagtccagaactgattgagaaaagacaactgcatcctgttcctgtagggaaaaagggtgtgctaagtgactatattccattttatttcacaccattttcacctatgctgctgaatataaagagtggccgtggcggtgtacgtcagcgtactaatgatgaaattgttattttagtttctagtttgtatcagctacagcagcagcaaattccttttgtttttacaaatagtcatgcctattaccaatgggctgaattctatacagatttatctagcttaaatgagatcgattggtcaatattacaggcaagagattttaaaagagatatggatgatcctgcgaagtttgaacgttatcaagccgaagcgttagttcatcaacactgcccaacaaaagtattgattggggtgatatgttatactgaaacagttaaagctcaaatagaacagtggctgcaacaagcagatgttaatattcctgtgcatgtgagacaaggggtgtatttctaa

SEQ ID NO: 44290 - DNA, 1086 bp, Acinetobacter baumannii
atgattcgttatacaacaggaaacttattagatgctcctgtagaagcattggtaaataccgtgaataccgttggtgtaatgggtaaaggtattgctttaatgtttaaggagcgttttccaaaaaacatggcagcttatagtcaagcgtgcaaagctggacaggttacaactggaaaaatgtttgtgactgaaactaatgagttaatgggcgcacgttggattattaactttccaactaaacagcattggcgggataaatccaaactccaatggattgaagatggtttgcaggatcttaaaaagttcatcattgatcatcaagttaaatctattgcaattccaccattaggtgcgggtaatggtgggttagagtggagtcgtgttaaatcaaaaattgagacagaattatccgatttagagtatgtggatattttgatttttgaaccaaccacacagtatcaaaacgtggcaaagaaaataggtgtatcacaacttacaccagcacgagccatgattgcagagttagtacgtcgttattgggtattggggattgaatgtagtctattagaaatccaaaaactggcatggtttttacagcgagttattgagcaaaaacaattaccaaatgaattgaagcttaattttcaggcgaactattatggtccttatgcttctaatttagaccatttgttgaatgcaatggatggtagctatctcaaatcggacaagcgaattcctgattgtgaccccttagatgtgatttggttcaatgatcagcaaaaaagtaaagttcaaggttatctgattagtgaagcaaaagagtatatggctgctgtagaaggagctgcaacattgatagagggttttgaatcaccatttggtatggagcttttagcaacagtagattggcttatctataaggaaggttatcaacctaatgttgaatcaattcaagaagggttagcgaattggagtgcaggtgagcgttgggcaagacggaaatctgatttattcaaagcagagcatattcaatttgcattacaaaaattagatggttttgcttattttcatacagatgtaacttaa

SEQ ID NO: 44291 - DNA, 129 bp, Acinetobacter baumannii
atgcgcaagattatcatgagaaagagtaagcattgggtaaatttaccaagattttttcaatatcatctgactgttgaagaattcgtattgcaaggtctctggtgtatgcttgttctgattggtgcatga

SEQ ID NO: 44292 - DNA, 612 bp, Acinetobacter baumannii
atgaaaataaaaaactacacaccaactaaaggttttatatggattttgcttttaattatttttatagcatggcttgtatataaatgtgttcctttaacagagaaagatcaagatgctcttattcattcaaatatggaacgggaaaggattaggctagctgaagagtttgactcttatacacaagaagactttgcacgactaccaaaatttgactctcgtaaatattttttaataaagcgtagtggtcggttttggttaataccaagagagtatcaaggagatagtggatttaaaatcagatggcctacagatgttaataaattattggccaaaaaatggaaaaatgattttgatagggattatgcatttaatgtatttatgtattcacctcaatattataatcgtacgacagattattgggggcgaaaaatttataataatgcatcctgtcaaccaaaaccttatgtaggaaaatttaaatggaatggtgtgctcgtaagaatttatgactcttaccatagaaatattaaagatgagcaatatttggatgtttgcctaactgcattaaaaattttaaatgaagaagtaaaggaaatatattttgttaattaa

SEQ ID NO: 44293 - DNA, 324 bp, Acinetobacter baumannii
ttgatatatcagctattgattgcatcagaagctactgggggtaatggtacagatagttggtcagatttcacggttggcaatgtttcgaccaacatgaatgcggataaaattgactttggtgatttgctcattaatttcactggtaattataatactagtagcttagatccatatatcaaaaccttgttaagtggttctaatacgcagatttacatagacagagatggaagtggagcgagttataacagtaccttactgctgacattaaataacgtgaataccaatttaaatgatctattgaacaatcaacaagttattgtttaa

SEQ ID NO: 44294 - DNA, 195 bp, Acinetobacter baumannii
atgtcagtttcacaaatgtttcaagatttcttaagcaatattaaaattaataacgaagaacagattacgattcgatatcaagagattacgaaagctttaaaccaaaacttccgtaacaaggaatttcaaacagataattgtttgcaagtagggtcttatggacgttggactacattaaaggtatttctgacttag

SEQ ID NO: 44295 - DNA, 291 bp, Acinetobacter baumannii
atgtgttcaatacactattttcatgttgaattacaaccttttttaaaacaagaggatagatcttataaatattcagatacttataatggtggtagttggaaaataatgaaatcacaagctgaaattgacgaaatgaaagtcatgaataatgctaaaaatagaaatttacatcgcttatgcaaaatgataagtgcatggaaaaataagtatggcatatcaatgggagggctactcattttgacgtatccaatcttgtacctttccgttgcaatttggattctaatacactga

SEQ ID NO: 44296 - DNA, 360 bp, Acinetobacter baumannii
atgagtcatgatattcaacgtattgatacaaatccacgattatcaggttgcgtgcttcataacggtttagtgtatgtttccggtcaagttccaacgaatttagatgctgatgccaagcagcaaactttagaagttctggcaaaaattgatgctttactggaacaatctggtagtgataaaagccgtattttaactgcacaaatttggattaaaaatattgccgaagattttgcagtgttcaatgaatgttgggaagcatggttaccagatggtgcagcaccagcacgcgcggctattcaagcagatttagcacgtccgcaagtattagtagaagtaatggttacggcgagtattaaataa

SEQ ID NO: 44297 - DNA, 1242 bp, Acinetobacter baumannii
atgaaaaaacatgtcgttgtcattggtggtggagtcattggtttaagtacagcctatgcacttattcaagcaggtcacaaagttacaatagtggaagcaaatgacaagattggttgccagacaagttttgcaaatggtggtcaactcagttatcgctatgttgcacctttagcggatgcaggcgttccatttcaggcgctgcaatggttaggaaaagcccattcgcctttaaactttaaattgaatttttcacctcttcaatggtcttggttattccaattcctcatggcatgtaatcgtaaagacaatattgtgaacggcaatcatattttacggttatccctatatagtcaaagtattatgtctaaatggcgtgatgaaattgatgattttgactgggtaaaatcaggaaaaatgatcattcatcgcaatgaaaaagcttttaaaaaagcagcaacaggaatagatccaactgtacaaaaagtgctgtcatctgaagaaacagttcaacttgaacctgcattgaaaggtattgaatctacattagtaggttcaatttatacacctgatgatgaaacagcagattgctacaaattttgtttagctctgtataaagcactagaaaagagtagtaacttcacatgtttatatgcacatgaagcgaaagttttttttgtagaaaataataaaattactgcaattgaaacaaatcaaggacgtctagaagcagatgaatttgtcgttgctgcgggcaatggcagtactgcaatttttaatatggtgggtatttcagtcccagtttatccattaaaaggatatagcctaactttaccattcccagaaaaagccaatgttgtacccaatatgagtgtaaccgattatgcaaataaaattgtatatgcaaaattggggaatcaacttcgaattgccgcaatggtcgatattggctatcaagatatctacattcgaaaagagcgaataaatgcattgaaagatacagtacgaacaacatttcccgatttattgggtgtaaatacagcacaagaatggagtggtttacgtccatccacccctacaggtttacccattttgggtcgcacgaaatatttgaatttatgggcaaatattggccaaggtagtttaggtttcacattggctgctggttgtgccatggtcattagtcagttaattagccaagcaacctcgccaattatattagatggtttatctctggagaaataa

SEQ ID NO: 44298 - DNA, 879 bp, Acinetobacter baumannii
atgaatcttcgacacctagagatcttctatttagtcatgctttttggttcactcacagaagcagcatcatcactatgcatttcacagcctgcggcaagtaaattgctcaaacatgcagagcaacgccttggttttgctctatttaaacgagtcaaagggaaattacaacctacgaaagaagcctatactttatatgatgaaattaagccaatttatgaaaaaataaatgaattaaataagttgacggataatttagcaagaaatactcaagggcaaatcacactcggatgtttacccagtttaggtttaagcctcattcccaaattaactgcaaaatttctaaaaaaataccctgatgtttttgtcaatattggtaccgatcatactcaagccttagagcaaaaattattaagacgtgaaattgatattgcggtgacattccagccccatactcagcatggcattattgctacgcctgttctggaaattcctctggtttatattgattctcagcctattagctcaaatcaagatattcattcaattgatgaaaacaggtggattcaaccctacgcagattccctcatgcaagtcgtaaaaaagtacagaacatttaataaaagtattgtgaatgtacaaacttactatatggcgagtgaactggtacgcgaaggtttaggatgtagcattaccgatatttatactgctgcacactccttaccaaatcatatgattcatgaaacaaaaccaagtttatctaccacaatttatattttaaaaaatgccaatgtaagtacgaacaaagcgactgaagattttattgaattaataaaaagagaaattgcttcgatgacgccatcgattaaccaaaagttatga

SEQ ID NO: 44299 - DNA, 528 bp, Acinetobacter baumannii
atgtcagttgagcaatcttctataacaatacctaatataaggacacctaaaaatattgcccttatcaccattattattcttagctttgctttagcattttacgcaaaaggcctgccaatagaggaggttggtttaattgggttattgcccatttttgccttggcgctcttaactgttatcggtctcgatattgtccttgctgttattattgcaattattatcagcgtgataatgacatccaccagtgtgtttgaattaggcggaattcttgcaaagtctacgggctcatttattgcgactgtaggtcttattattatgctaggtgctggggttggtgaagtcgccaaccgaacaggtgcagcgaaagaattggtcaaatttattgtcaataaagttgggctttcaagtattgaaaatgattgtattttgattagaccagatggctatattgcttggcaaagcaacgtaattgaatcggcagataatgagttatacagcgcaatttcatcaatacttagttggaattag

SEQ ID NO: 44300 - DNA, 879 bp, Acinetobacter baumannii
atgaaaaaattatttagcgtactgttcagtgcctctgtactgacactgactgcatgtaataaacagcctgcacaaactgaaaatacagcagcagccaaagataaaactgagtcggttcgtacaattaaattggtttcaacaggttctgatacggacgtatggaaatacgtagcaacacttcctgaaactgctcaagcgggcattaaactcgaagtgaccaatttaactgactatgttgtgctcaatacgtctgtagcaagtggcgaacaagatgtaaatgcgttccagtcattcaactatttggcagcttataatgcttcaaataaagctaaagttgctgctgttgcgacaacttacttggaaccaatgggtatttatgcaaataaagttaaaaccgttgatgagttcccgcaaggcgctactattgcaattccaaacgatactgctaacgaagctcgtgctttaacattattacagtctgctaaactgattaaacttaaaccagactttgaccctgtaaaagggacgaccaatgacgtcgttgaaaacccgaaaaacttacaattaaaaccaattcaaatgacaaccgcagttcgtgttaaaaacgatgtagatgcgattgtactgggtaatacattggcacttgagggtggcctcaatgtaatgaaagacgcaatcttccgtgagccaatcgatcagtctactaagctttatgtcaatttattaggtgttgctgaagcgaacaaaaatgacccgatctatacgaagcttggtgaactttaccacttacctaaagttcaaaagtttgtaaatgaaaaatttggcggcacaaaagttgaagtgaacaagcctgtttctgaatttgcagacatcaaataa

SEQ ID NO: 44301 - DNA, 507 bp, Acinetobacter baumannii
atgaaatactcaagtgaacaaattaaaaaagctttattgcttactccattgccattacttttatggcatttcttttttaaatttatggatgtggataacgttagacttagcttagatatcttttttgcattttttcttagtattgtaggttatagtcttgtttatttagcttattgtattttgaccgtaccctttagctttattttttccattcttttaaatcattataattatctaaacttgtggaccatctgtattaattcggtaattattacatcgctatttttctttttcttaggatggttttttacaggagaaattcctccaaaaataaattatatggaatctatggagggagaagcacctctaaaatggtggatgatgtataccgatataacttttattatatttatattatttcctggtctatgttattggggatttttaattcttcttaaaaagaaacaatcaaagattattagaggtcgcttttcaaactatttctaa

SEQ ID NO: 44302 - DNA, 648 bp, Acinetobacter baumannii
atgtgccaagcacagtctttatggctttgctgtgcctttttttctcccaaaaaagtatctcatttagaaacaacaagaatttataacggtaaaactatgccaaatttagaaacctcttccaaaaaattacacgttattcgtacggctataaacttatttactacctatggatttcacaccactggtgtagatctgattgttaaaaaatccggaattccaaaagctacgctctataactactttcactcaaaagaaggtctaattgaaatgtgcatcgcctttcaaaaaagcctgctgaaagaagaagtgctcgcgattatttactcaaaccgttactgcacgccaactgataagctcaaagaaattgtggttttacatgtcaacttgaatagtctgtaccatttattacttaaagtcttttttgaaattaaagggacatatcctcaagcttaccgtatggcaatcgagtatagaaaatggctaattcgagaactttttgacttaatttttagtttggaaactcgtgccttaaaacctgatgccgatatggttttaaacctaatagatggtttgatttttgggtttataagtaccaatagtttgagtgagagggatgaggtgttggagcggttttttaaaataacttga

SEQ ID NO: 44303 - DNA, 471 bp, Acinetobacter baumannii
atgaaaaaattattacttttaagcttagttagcattttcagctcatatagttttgcagaggacaatagctcgatttatcggggacttggtactggtcctgaagattttttaaagtttcaaactcttaaacaaaaaggtttcttagccaaaaaacctaatgtttcaagagcagactataacgatatatacaaactcaaaaaaccttatgaatttatgggacaaaacgttgtacttatttcagatgaatatatgtctgaatatgtgggctgttgtgtgagtgaaggttggggagctgtatttaagcaaaccaccaatttaaaattaattgaaaaatttgcaaaaaagaatcaatgtaatatcgctccgatagaaaccgatagcacttactatgggtttaaaattagttctctgccaaaaggtaattattatgaattatcatgccgcgaacgtgatttagatgagtctcaataa

SEQ ID NO: 44304 - DNA, 360 bp, Acinetobacter baumannii
atggaaaaaacactgcaatgtccgaaatgtggttctacagaaattgaaacacgtgatcatgacaaattacttaaaaccactggcggtgttttattaacagctgcaggtactacggcaggtactgtaggcggcgccgcaactggtgctactgtaggggcagcgattggtactgttgccggaccattaggtgtaattgttggtggaactgtaggaacatttgtcggtgcaatcagtgcaggtatcactggcggtgtggtaggtaatatttttggtaaaaaagcaggcgtaatgattgataaaaatatatttcaggactatcgctgcttgaaatgtaaataccgttttaaacagaagaaataa

SEQ ID NO: 44305 - DNA, 1296 bp, Acinetobacter baumannii
atgggtggtgctgtgggcacaggactgtttttaggctcagcacaagtcattcaatctgctggtccttcaatcattttgggttatgccattgtcggtttggttgcatttttaattatgcgccaaatgggtgaaatgattgtcgaagaacctgtagtcggttcttttagctactttgcacaaaaatattggggaagatttcccggttttttatcgggctggaattattgggtagtgtacattttggttgccatgaccgagcttaccgccgtagctaaatatgtacattattggtggcctcatatccctgcttgggtttcagttttatttttctttgtgctggtcacctgcttgaacttaggcaatgttaaattttatggcgaatctgaattttggttagccattatcaaggttgctgcggtcatttcaatgattgtgtttggcttatatttactgcttaccgcgggtagtgactctatagctagcttttcaaacctatggcagcatggcggatttttcccacatggcttttcgggtttgttttatatgctcgcttttttaatgtttgcctttggtggtattgaactcattggaatgacggcagctgaagctgaaaatcctgaaaaaagtattccacaagccattaaccaagtcatttttcgaattttggtattttatgtggcttcgctggcaattattatgtcgcttattccatggaatcaactggacctcggcggtttagataagagtccatttgtcatgatttttagccaactgggcattggttgggcagcacatttacttaactttattattttgactgctgcactttctgtttataacagtgggatgtatgccaatagccgtatgttgtacgggctagcagttcaaggcaacgcacctaaagtttttgcaaaagtaagcaaacaaggtgtacctacatccgcggttatcttttcttctattctaatttttgggtgtgtattacttaactatttcataccagaagaagctttaagctatcttatgtacatggctgtagcagctttggttttaaactgggcaattattagttttacccatttaaaatttaaacgttcgatgaagcttgaaaataaagttgccaaatttcctgccctattttcacctttgagtaactatatcgttttgacttttattggcatgattttatatatcatgtggactcaaggctttgaaaagtcggtaattcttattccaatctggattgcttttatgtttgggctatatacaattttgagttggaaaaaatcactctaa

SEQ ID NO: 44306 - DNA, 1446 bp, Acinetobacter baumannii
atgaaaattatttctaaacctcaacttttaaaagatgtggaatacaaaccaagtcagtctttacaagtgggtaaagaatggagctggttaaatccaaaacatgcacaatttgatacatccacgattaacggcactttggtagataacccagcaaactactatgaaagttccctctcgaattggcatacatttgacagtttaaatgctgacatcgagtgtgatgtggttgttattggtggtggcttattaggttcatcaactgccttacatttagctgaacaagatgtagatacggttttattagaaaaaaatcgtattggtagtgcagcttcaggtcgaaatggtggacaactcaccccaggtttagcacgttgggaagctcaagaaatggccgatcgactcagctacgaagatgccaaaaagctatggcattttacctctactgaagcgatgcaactgattgatgacatctcggaaaaataccaactcaactttgaccgtaaatacggccatattactgccgccgttcatgagggacatttggttggcttaacacaaggtgccgatgcccgaaaatacttaggtgaataccacacccgtattgtaggtaagcacgaactcatggactatattaagtctgactactatacaggtggtttaattgatgagttaggtggacaaatccatccgttggctctaaaccgtggcttaatttatggcttttgccaaaacggcggctctgtgtatgagcaaacagaagttatttcaatagaagaaaaagcagatggtatttatgttcacacagcaaatgcagtcgtaaaagccaaaaagtctgtggttttagcggtacaccatgcttcatttaaacttttatctgaacagaacaataccactattccgttttacacttatgtcgcgaccaccgctcctttagagctagataccaaagagcttctgccatttggacatccggtttatgacactcagttccagattgattactaccgccctgtctttaataaccgtttactgtttggtggacaaggtactggaacatgttggggaccagagaaaactctaaattatctagagcatcgaattcataccgtattcccgcaaattaaaaatctagagatggatttcgtctggagtggaactactgatttaacggtaaatggtgcagtcgatagccgtaaatttggcaacaagttcccgatttatgcagttcacggatggagcggtcacggcgtggcacagacagtacgtattggtaaagccattgccaatgactttgttggccaatctaatgactttgaaatgttatctaaaattgaccaccaaaatattatttttggtcgtacccttgccccagttgttattccactcgctaaaagcatgtatggcctcggtgcaatgattaatccgggcaaaatggtttctttctaa

SEQ ID NO: 44307 - DNA, 1332 bp, Acinetobacter baumannii
atggaaaataaagcgtcttccttaaaaaaattatcgctatggcaagtaacaattattggtattgcctatatgacccccatgacggtttttgatactttcggtattgtttccggaattaccaatggtcatgtccctctcgcatatttacttgctttaggtgctatgttgcttaccgcttggagctacgcaaggtttagccaaaattcggaaaaatcaggctcagcctatagttatactgccgaaagcttagggcccaaaagtggtttttttgtcggttggtgctctctactcgactatctgttgttaccactcatcaatgtgttactggctgcaatttatctcaccgcactaattccaagtttgccttattggttttgggtgctggtatcggcgggccttgtgactttagtcaactgtttccgtattcgattacttgccaatttaagcctcgtgtttgtgttcgcccccattatcctcatggtcatttttgtatatttagtggtccggggtattggctctacccaaggttacgaacatgtacttaccttggctccgctatggcatggtcagcaatcactattaccacttgttgctggggcctccgttctatgcttttcattcttaggttttgatgcggtcaccaccctttcaaatgaaaccaaacaacccaccaaaaatattccccgtgcagtcatgttaaccacacttgctggcggagctattttcttcacagccgcttggtttattcagctttattttccaaacaatgtccgttttcaccatccttcagaagcgttaccagaaattgtgctttatgtcggtggtgctttgtttcagtccgtcttcttatgcggacaaattatgaacactgtcgcctctggccttgcctcacatgccagtgcttcgcgtttactgtatataatgggtaccgacaatattttccctaaaaagtattttggaaccatccatagctctttagggacaccatttttctcggttttatttgtcgggcttatttcaatgtcggctattttcttagatttagctcaagttgtcagtctgatcagttttggtgcgctcgttgcgtttacagccgtaaacttctcagtttttatgaaattttatattaaagataagcaacgctcaggttttaaaaataaatttctaaacctatttttaccgctgttatcggtcatcagcattatttgtttatggctcaatctcgactcgtcttcactgacttttgggtgcttctggttagctttaggcattctcctatttatctataaaacgattaaaaaacaaagtattgcaattagtaatgcttattaa

SEQ ID NO: 44308 - DNA, 708 bp, Acinetobacter baumannii
atgacccaacatttagatgtagaagagcttcaaaatttgttaaagacggtagttgacgaaacaacctctattacggaaacactcgcaagtaaagcaagtaaaattctgtcaaaacacgcttctgaaaaaaatgcagatattaagctttcaacttcagaacgcgctgctttacagaaagaaattaaaaaagcactctctcagagccattatagtcaaggtacgggttttgcaagttatagtccggcaactcaagatgagcaagactattggacgctagaatggtggtataaaaaagaagatcaattacaacaagcgaaacttgaaaactaccaaaatgcgcagcgctttttagatttccgctcatttgaatggttccataaacctgcacaaaataaaagtccatgcatacatggtccttatgtggattatatttgcaatggtgcctataccattaccattgctcaccctgtcatgattcatgaccattttatcggtgtcattgcgaccgatattttagtttcggcccttgaaaaactacttatgccaaaactcaaaaacattaagcaaaaggcggtcattatgaatgattcatctcgagtcattacttcaaatgacattagcatcagaaccgggacattatttaaagataagactgatcaacagtttttctcgcaaccctgtcagtctttccagttggttgtcatctaa

SEQ ID NO: 44309 - DNA, 720 bp, Acinetobacter baumannii
atgtcagcatatacgataatttttgcacctattgctcaagcaactcgttcggaacaagttgtagaacgcttggaaaatgcaattatctctggtttgctcaaaagcaatgaacaacttcctaatgaagcagacttagcacgcttaatgggagtttcgccaattaccgttcgcgaagcattaaatactttacgcgtaaagggtttaattgatacacgtcgcggaagaaatggtggaagttttgtttgtgagctaccttcggatttacttttaaatcaacatcctttgcgccaagcttcaaatgagtatcttgccgatttaggcgagtttcatagtgcaattttaagtcatagtgcctatctggctgctcaaagaacaactgaatacgaacttaacaaaatcaaagagttgattgatcaatttgaacaagccgttgaagcagatacacgtgcacagcttgatttacgttgtttactcacactgacctcatttgcccaatcttcaagactggcaaatcaggaactcacgattcaggctgaatgggctccgctcattgccgtgctttatcaagatgatgattttcaccgtgaagttgtaaagcaatatcaccatcttttgtcgtcttttattgacaacaatgaaaatgaagctgttattcaagccagaaaaatagtttcaatgctcactgaccaaatgcttcgatataagttatcgagtgaataa

SEQ ID NO: 44310 - DNA, 771 bp, Acinetobacter baumannii
atgaataagcaagaaatgaaagacttggtgactaaagcccatcatgagctctttaatttgcatgacaccactgctctagaccgttatttttctgaagactttatagagcactcaccactcgttgcaaatggtatttcaggtcttcgtcaattggtagaagattgtcccgatatgcaacatgaggctgtacgtgtactagcagatggtaatttggttgcaattcatggccgctttcaaggcttagatgaaaacccattggttggatttgatatttaccgagtaaaagacggcaaaattgtcgagcattgggatggtcttgtggcagaagctgcaccgaatgtaagcggtagaactcaactagatggtccgactgaaattgtaactcaccatgacccagagaaaaaccgcgagattgtgacgtctttcttcaagaagtcattaattgatggaaattatgaagcctttaaagaatataccgacggcgatcagttcattcaacatagtccagatattggtgatggcgttaaagccgtgattgattttttgaacaatatccgtaatgaaggacaaggtttggtatactcaaaaacgcatcgctccattgctgatggtcaatttgtattgacacattccgaaggcagtattgccggaaatcgacatgcctattttgaactatggcgtgtagataatggcaaaattgttgaactttgggatgcaatacctgctgtgcctgaagatgaacaggctgtccatggttatggcgtgttttaa

SEQ ID NO: 44311 - DNA, 1431 bp, Acinetobacter baumannii
atggctaaaactcaactacaacacttcattaatggcgaatatgttgctagcaaaggaaatgatttcttcgatttggtaagcccagtcactggtgaagtctatgcacaatcgccgaatgcgaccgaggcagaagttgatgcagcttatgctgctgcaaaagaagcatttaaaatttggggacgtagtacaccttcgactcgtcaaaaagcattacttaacttggcagatgccattgaagcaaatgctgaccgtttaattgaagcgcaaagccgcaatacaggtcagttaaaacatttaattgcatctgaagaagtaggtgcatcggcagatcaagttcgtttctttgcaggcgctgcccgcttactcgatggcacagcaactggagaatatttagaaggtttaacttcttctattcgtcgtgaaccagtcggtgtggttggtcaggttacgccttggaactatccactcatgatggcggtttggaaaattgctccagctttagccgcaggtaatactgtcgtattaaaaccaagtgacaccactcctgaaagtacccttttacttgcagaaattgctgcaccattttttccgaaaggtgcatttaacgtggtgttaggccaagcgcaagttggttcaaaagttgtatcacacaaaacccctgctcttgtttcgattacaggttcagttcgcgccggattacaagttgctgcttctgctgcggcaaatttagcaaaagctcatcttgaacttggcggtaaagcacctgtactggtttttgaagatgccgatcttgataaagccgttgaaatgattgctttaacaggctatttcaacgcaggccaagactgtactgctgcaacacgtgtgattgtggctgaatctgttcatgacgagtttttagctaaactcgttgaagctgcaaaaaatacccgttttggcgatccagatgatcaagatgcactttatggtccacttaacaatgccaatcaattaaagaatgttaaagcgtttatcgacaacttacctgctcacgccaaagttgaaacaggcggaaaacaggcagaccgcccaggtttctattttgaaccgactgttattagtggcctaaaacaacatgatgaagctattcaaaatgaaatttttggaccagtgattaccgttcagaaatttaccgatgaaaatgatgcgattgaaaaagccaacgatgttgaatatggcctagcttcaagtgtttggaccaaagaccatgctcgtgcaacacgcctgtcacgtgaacttgatttcggtacagtttggattaatacccatattcctttaaccgcggaaatgccacacggcggcttcaaaaagtcaggatatggtaaagatttatctggttacggttttgaagaatatacccgtgttaaacatgtgatgagttcaaacgaataa

SEQ ID NO: 44312 - DNA, 519 bp, Acinetobacter baumannii
atgaccttattattcaaaatcaaattgattcacaaaatttgtaattcagtcaaaaatgaattattttttaccaatctgataattgacaattacattatggacaatattgatcaaattattttaggtttacttaaagataacgcacggatatctgtaaccgaattagccgaaaaagttcacgtctcaagagcaacgattaaaaagagaatggagtatcttgaatcctcgggcattattaccggatatacggttcgttttaaaccaaatgcggaacggaatgtcatccgtgcatggatgagcattatggtcgaaggcaccaaagcacagtctgtgattaaagaactacgcctagaaagtgcggttgaatgtctacataaaaccaacggtaaatgggacattctggttgagctacgttccgacactttagaaaacttcgataaagtattagaaagaattagaaatatttcaggtatttacaatagtgaaactagtattttacttgctagccataagacctaa

SEQ ID NO: 44313 - DNA, 882 bp, Acinetobacter baumannii
atgcaaaccactaaaaaacttttttcaaaaacacttttatcagttgctttaattggtttagcaggtatggcatttgctaatgataattcgactgaaaatctaaataagagtacgtcaagtatgaatgtgcttttaaaagaagctggaggattaggctatgttgaacgtaatgctgctcaaagtacttcaaaaggcaaattagctcttagccaaaatcatgataaacatctgaacgagcatggtggacagatttaccaaacaactaaattttccaatgagtgggtaattgataacgatggtaagggtagtttaggttctagtttcgaaacattgattggaacagatgagaatcgagtatttgttgaagccaatctgaataaagcagagagtaatgatcccaattatgatgtgtctgcactttatagccgtaatgtagcaccattttgggatgtacaagctggtctaagatacagcgaggataaaaataacaagaacagcgatcgagtcgatggtgtcgttggtatattaggtcttgctccttatttctttgagaccaaagcttacctttatggtggaaaagacaacttctggggagctagttttgatttcgaccgtgatttattactcactcaaaagttgattactcaaccatatattgaagcagatgttgtctttaatgataattccgactttgcatcaaggacgggattgtcagaattgaagacaggtattaaaactcgttatgagattagcaaacgtatcagaccatttgttgatatagcttatcaatatgagaaaggacaaaaatcaactccttttcaagaagcaacagattctgaaaagggatggctatatggtgcaggtattgaattagttttttaa

SEQ ID NO: 44314 - DNA, 1920 bp, Acinetobacter baumannii
atgtctaaaaaattaagtcatgtccttttaataggagttggtttattttcatcaacttgggtaatggcggcagttaaagaatatgatttaacaatcgctgaacaaactgtaaatatcacaggaaaaccagttgagagaattactgtaaatggtaaattcgttgcaccacttcttgaatttgaagaaggtgatgaggccgttatccgtgttcacaataagttaaaaaatcaggactcttcaatccattggcatggcttattattacctggaattatggatggtgtacctggatttaacaaatttaatggcattgcccctaataaaacttatgaatataagtttaaagtccgccaaaatggtacttattggtatcattcacatagtaaaggacaagaacaagacggtttatatggtgcttttgttatttatcctaaagataaaactccactaacagctgctgaaaaaaccgataaagattacgttgttttgctttctgattttcataattcgacaagtgatcaaattatgaaaaatcttaaaaaagaagcagactactatcagaaccgccgcgaaacagtattcgatgtattaaaacaagttaaacgtgatgggctaaaagcgacttggcaagaccgttctatgtggaatcagatgcgaatgctgaaaacagatatgtccgatgtgactggttatacatttttaatgaatggcaagacacctcagcaaaattggacgggtaacttcaaagctggtgaaaaagttcgccttcgttttattaatgcttccgctatgtcattctttgatgtacgcattccaaacctaaaaatgactgtagtcagtgctgatggtcaacctgtaaagcccgttcctgtagatgagttccgtattggtactgctgaaacttatgatgtcattgtggaaccaaaacaagcacattaccaaattgaagctgaatctattgatcgtactggtttttcggttggaaccttacatgatgaaaataccttacctgtaaaacaaattgagatgcctaaacctcgtcctcgctctttattgactatggaagatatggggatggatcatgacatgtcttcaatgcaaggtatgaatcatgatatgtcttctatgaaaggtatggatcatgatatgtcttctatgaaaggcatgaatcacgatatgtcttctatgaaaggtatggatcatgatatgtcttcaatgaaagatatgaatcatgatatgtcttctatgaaaggcatgaatcacgatatgtcttctatgaaaagcatgaatcacgatatgtcttctatgaaaggtatgaatcatgatatgccgatgaatagcgctactgttaagtcggcttcagacaagaatgataataccgtatttggatgggcaaatgcttcaacacccgttggtcaaaaagcactccagtatagtgatttacaatctttaaaccctcaaccagatactcgtgcccctgaacgtgaaatggaaatccgtcttggtgggaatatggagcgctacatttggacaattaatggtaagaagtttaatgaaacagaaccattcaaagtgaaatatggggaacgtatacgcttgaaatttgtgaatgacagtatgatggctcacccaatgcacttgcacggtatgtttatgcagcttgaaaatggtcaagatccaagtaatatgccaaataaacacacgatcattgtgccaccagggaaaacagttacaactttacttactgctgatgaattaggtgaatgggctatccactgccatttgttatatcacatggcagctggaatgatgaacaaactcattgtggcaaatgtagatagcaatgatgttgattcaaaaagtatcgttgcccaaccccatgcaaatgataagggagtgaatcaacatgcaaaccactaa

SEQ ID NO: 44315 - DNA, 351 bp, Acinetobacter baumannii
atgaaaactctattccgtcgtagcttaactacacttatgtgtattggaactttaattgcaggaactcagtcttgggcagccgatgctaaacagggaaccactgtagtcactgaaactaaagcggactcaaaaatgtcagagaaatgccaaaaaccttgtaatatgaagaatgatgagaaaacccaacaggatcatagtcagcatgagcatggcaatatggctgatatgtctcagatggatcactctaagatgatgaatatggatcagtctaaaatgggtaatatggatcattcaaatatgatgaacatggaccactcaaagatgaacatgtcaaatacatcaaataaataa

SEQ ID NO: 44316 - DNA, 684 bp, Acinetobacter baumannii
atgagaatcttactagttgaagatgaacaaaaaactggtgattaccttaaacaaggtctatctgaagctgggtatattacggattgggtcacagatggattatcaggtaaacatcaagcactttccgaagaatatgacctcatcattttggacgttatgttaccaaaattagatggctggaatatcatttatgatattcgcaaaagcggaaagacaatgcctattctatttctttcagcgcgtgatcaaattgaagatcgagttaagggattagatttgggagctgatgactacctcgtaaaaccttttgcttttgctgagttattagcacgcattaaaagcttactccgacggggacaacaaaaagaagatagtaaccttattacaattgctgatcttgaacttgatcttcgtaaacgccgcgtcactcgcgctgggcaacgtattgacttaacagctaaagaattcgcgctgatggaattatttatgcgtagacgtggtgaaattttacctcgcgcactcatagcttctcaaatttgggatatgaattttgatagtgataccaacgtcgtagaagtcgctattaaacgtttgagaagtaaaattgacagtaactttagccctaagctaatccagaacatacggggaatgggttatgttctagaggttgaagatgactcgtaa

SEQ ID NO: 44317 - DNA, 1377 bp, Acinetobacter baumannii
atgactcgtaaattgtttaatgcaatcagctttcgtatagctattattttttctctatctaccgtaatcattctaatgattatgggactagttattcatcaactcgtaatgcatcatttcgaaactcaggaccggacacaactagaagggaaaattcaacttctagaaaatttactagaacaaaatccagccaattcccaagagctaaatatttatttaaaagacgccttagttggtcatcatgatctaattgttcaaattgaacgaccaacaggtcaaattatttttagttcagcccctgcacttattaaagcgcagacattaattaaatctaaacatactccttggttagagtggaaaatacaaaataaaacttatcgtggattagcttataaaaagtcttttaatagaaatagtagcattccaacagctcaaattattgttggaatcgatacatccgagcatttgcatttcttaaatgattttaggcgccagttattatacattggcattgtcggtactatctgcttaatgtttttaggctggtttgctgcatggcgaggattacgtcccgtacaaaaaatggcaaaggttgcagaaggcatctctgctcaacacctatcggagcgtctagaagttgataacactccaactgaacttaaatcactagctgttgcatttaacgacatgttagatcggctagaaacagcagtagaaaaactctcagatttttcatcagaccttgcccatgagattagaacacctatcaacaatttgatgacccaaacccaagtatgtttatctcgtagtcgagatattaatacctatcaagaagttctgttctccaatttggaagaatttgaacgtttagctcgaatgatttccgatatgttgtttcttgcaaaggctgaacatggcttgcatttaccaaacttaaaacaagttgatctagtaaaagaagtttctgccttatttgatttttatgatgcgattgctgccgaaaagagtatctctttggaacaaaaaggttatggagttgtaaatggtgacccatctatgttacgtcgtgctctgagcaacttactatcaaatgcaataaaatatggtaaaacagaatcggtagtcagaatcaaaacccaacaaaactttgatacaactgtttttacaattgagaatgaaagctctccattgacatctgaacagttaagccgattatttgaccgtttttatcgtacagatgtatccagacagcgagttgaggaaggtactggcttagggctagcaattaccaaatccattcttgatgtacatggcgcaacaattagagcagactatcataatggccgcataacctttaaaattatttttaaaaattaa

SEQ ID NO: 44318 - DNA, 2346 bp, Acinetobacter baumannii
atggaccatcatcatcacgaagataaaaatacacttactgatcctgtctgtggcatggcagtaaaagaaacatctcaattttatgaaaaagttgacagtaaaactttctatttttgcagtgaaaattgctggttaaagtttaagaatgatcctgctttttatattaataaactagcaaaagcgactaatccaaaagagattgggataaattcaattgtggttgatcagccgataaatgtgaatacttctactatttacacttgtccgatgcatcccgaaattcaacaaaatcaccctgggaattgtcctaaatgtggtatgactttagagcctttacttccaaatctggatgaagctgacgaaaaccctgaactaaaagattttaaaagacgattttggtataccttacctttaactcttatcgttgtatttttagccatgtttgggcatcagctgaatttatttgatatgaagatacagagttggattgaactcattcttacattacctatctttttttgggcagggtggccattttttgttagatgttggcaatcagttttaaatcgtagtccgaatatgtggaccttaattggaattggtactggtgccgcatttatatacagcctcattggaactttggctccacaagtatttccagactcttttgtttctatgggacgtgtcgctgtatatttcgaagccacagcagccattatttcgctgaccttattaggccaagttcttgagttgaaagctcgatcacagacctcggcagcaattaaatctttacttgggctagcacctaagactgcaagaaaaataaatgacgatggtaaagaagaagatattcctctttcccatgtacatgttggagatttgctccgagtacgaccaggtgaaaaggtccctgttgatggagttgttactgaaggggcaagttctattgatgaatcaatgttaacaggagaacctgttcccgttacaaaacgtgaaggcgatcaagtaataggtgcaacaataaatatgaatggttcattagtaatgcgttcagaaaaggttggatcttcaacggtactgtctcagatcgtacaaatggtatcgcaagctcaacgttctaaagcgccgatgcaaagaatggcagatcatgttgcaggttggtttgttatggtagttattgctatttctgtgcttacattttttggttggggggtatttggcccagagcctagttgggtttacgggttaattaatgctgtcgcagtgttaattattgcttgcccatgtgctttaggcttagcgacacctatgtcaattatggtggcaacaggtcgtggtgcatcgaatggtgtactttttcgtgatgcagctgcaatagaaaatttacgtaagattgatactttaattattgataagacaggtactttaactgaaggccaaccctcattcgataaggttatcgctctttcgggctatgaagaaaatgaggtacttcggttagcagctagtctggatcaggggagtgaacaccctttagctgatgcaatcgtacgtgctgcccgtgaaagagatcttgtactgtctagaccaacatcttttgaatctggctctgggattggtgttaaaggagagttaaatggacaacaattatctcttggtaatacagcattaatggaacagctgggaatatcagttaaagcatttgttcccgaagctgaaaagttaagagccgaaggtgcaagtgtcatgcatttagctgtggatggaaaactgatagggttaatagctgtttcagatccaatcaaagcaagtacacctgaggctgttctttcattaaaagattccggtctaagaatcgtaatggctactggtgatggattaacaacagctaagtctgttggcgctagattaggtattgatgaggtttatggtgaggttaaacccgcagataaattagaattggttaagaaattgcaaaaagaaggaagagtggttgcgatggctggtgatgggatcaatgatgccccagctttagctcaggctgatatcggaattgcaatgggtacaggaacagatgtagcaatgaatagtgcacaagttactttggtaaaaggtgatttacgcggtatagagattgctcgttcattatcagaagcaaccattaaaaacatgaagcagaaccttatgttcgcatttctttataatgctttaggtattcctttagcagcgggtattttatatccatttactggctggttactttctcctatgatcgcagccttagcaatgagtctaagttcagcatcagtcattggtaatgctttacgactacgtagccaaaactaa

SEQ ID NO: 44319 - DNA, 381 bp, Acinetobacter baumannii
atgaaaatttttcaaaataaaatgtctactctacgtaacgtactcgtaggcacgactatggttgtagctacttcaagtgcattcgcacatgtgaaacttgaaagtgcaacacctgctattaatgcatctgtagctagccaaccgaaaaatataactttgaattttggtgaagaagttatgttaatgaacgtcaagttgcttgatgcacaacgtaaggacattcctttaaattataaaataactcatgatatgaaaaaatcatttgacgtcgctgcacctaaactaaaaaaaggaaaatatacagtcgtgtggaccacaatgggagcggatggccacaacatgaatggcgaatataatttcaccattaaatcagcaaaataa

SEQ ID NO: 44320 - DNA, 882 bp, Acinetobacter baumannii
atgattcctgaatcttggatatatgcatcatggcttgttaaagtcattttatatttaggtattgcatttgttgttggtggtactttctcctacttcttacttggacgttatgtagaaataaaggaaactattctgaaatacataactcttggcacagcattaggactaatttccagtattctaggattcttccttctcatcggaagttttgccaatactggactatctggtatgtgggatactaactatataaatctagtaattaacactccaattggccatacccatatcatacgatcagtgggttttctgcttttatttttatttatgctcgtgaaattaagcagaagaactaatcagttttctaaagttgaagggttaatctttaccatcttactcttacctattgtttttagtttttcccaattaggtcatgtcacgaatttacccttattcgctcaagctttattatcaatacatgtacttgtaatatccttatggatgggatcactttatcctttatggaaaacaagcaaaaaaattaatggcttaccactcaaagaacgtatgcatctatttgggcaaatagcggcctttattgtaggaatactcatcgcttgtggtcttagcattactttattactttttaaagattttaatactctaatcaatacaccttatgggcatggatttattattaaaattgtatttgtcctaagtattttattgttagccgcttttaacaaatggtatttcacacctcgcttacaagacccgaaatttgcgaaacaattgggctatgccattttatttgaaatgtcgttaggtctattaattcttttagccactggttatatcaccaccgtagtcggtattgagtaa

SEQ ID NO: 44321 - DNA, 354 bp, Acinetobacter baumannii
atgaactcagccagtacagcatcggttttagcagaagccgtattgaataccgcggatttactcggtcttagccaaacccaactggctactgtgatgggtctcgatcgcgcatcaataaacacactcgaattctcagctgtatttgaacccgcatctgcacatggtgaaactggattattactgatttgcctttatcaaagcttatcaacactcactggcaatgattctgaatggattgattattttatgaatgcattcaataccgcaactgatggtgtccccattcagcaaattcagaacagaaaaggcttagagaaagtcttaacagtagttgaagccctaaacaatcattaa

SEQ ID NO: 44322 - DNA, 336 bp, Acinetobacter baumannii
atgaacgcaattcttcatggtgcaaatacgtgcacacctaaaaaacaagcctcgcaactgattgttgaacttggcaaaactatttcaaatcctcaacgtcaaacactcgccaatctttatattgctgttgacactgcaaactccttactcaaagaacttgaacaagcacatcaaatcattcgtcaatgcatgcatgaaatgactgatgagcaaattcttgaagttgcaaagctcaatcaaaataacaatctctcctctttgtgggcatttcgtacacatcaacgtcacaagatgattgaacgtgcacagcgtgtattgggaatccgttctatttag

SEQ ID NO: 44323 - DNA, 393 bp, Acinetobacter baumannii
ttggatcaagcgcttcgacgtgctggagaagcaagagtcgaatttgaaacagttgcaattgcaacagcaaaaacaaatcaaagacttaaacgagatgatgttgaattgtattcagagtatgagcaatttaaacaaaatatgcgtcgacttagagaacaagcagatgcagatcaagagcatgcagcaacaatgcaacagcaataccaattcgatcgagagcattcagcagagcttacagcaacaatactgcaacttgcaaaactcgttgaagaaattgtcagtctgatgatgcacttaattgcagcaatgctgggacagcaatataacattcaaagtcaaccacaagttgaatctaaacaacaaaaaccaaacgattttggtgctgagttttaa

SEQ ID NO: 44324 - DNA, 837 bp, Acinetobacter baumannii
atgccattatttgctgacatgccaattaattcgatcaccagccaaatgttgcgtagcgccgtcaatggacgtgaatggtcatcggctaaaactcgaaatgatgctttgattccattacgtggcgtattcgaattagcttgtgatgatgaggtgattgataagaatccatgtgaccgattgaaaaatcagaaaacgcaggaagatgaacctgatccatttaatgaaatggaaaaggaaataatactgaactggttaaaagagaaatatcttgcagactacccaactgtgtattggtattttgtggtggcattttggacaggttgccgtccatcagaaattatcgcgctcacttggcaggatgtagattttttgaataagcagattcacatcaataaaggtcgtgtgaacggtgttcagcaggaaaccactaaaaccaataaagctcgatttgtagatttgaatgattttgctttcgaggcatttcaacaactcagattactaacttatttcaaatacgagcatgtatttatttgtgatgaaactggcgaggaatttactacgcaaaaatcattgagtgaaaagtttgtggctgcactgaaagcgaatggcatacgctatcgccctgcctataacactcgtcatacttatgcgactgtatgcttaatgaatggacttaatccagtctatgtggcttcacagttgggtcatagtttggtgatgctcatgaagcgttatgcgaagtggattaactcggataagaacaaagaagagatcgctaaaatttcaaatagtgccaaaattgtgccaaagaaaaagggaatcaaactatgtatttga

SEQ ID NO: 44325 - DNA, 495 bp, Acinetobacter baumannii
atgaaatctaacttaatcactcggtcaggccatgacaaattagttgctgaattaaaacaactttggcatgaagaaagaccagaaattacgaaaaaagtaaattgggctgccagcctcggtgaccgtagtgagaatgcagattatcaatataacaagcagctccttagaaaaattgatcgacgagtacgctacttaggaaagcgtttagaagagttaaaaattgttgattactcacctgagcaagaaggcaaagtttactttggtgcttgggtcgacattgaaaatgaagaaggggagcaaaaaactttacgaattgtcggggtagatgaaatttatgatcaccatccccagcatatttcaattgagtcacctatggcacgtgcactcttgagtaaagaagtcgatgatgaagtagaagtacacacgcctttgggcaaaaagctgtggtatatcaatgcaattcgctatgaaaaacctaaaaatgatgaaatttag

SEQ ID NO: 44326 - DNA, 1113 bp, Acinetobacter baumannii
atgcacagtaattcaagttctgggtcgaggcttggccttagctctttattttcttctctcccattgaaagttcttgcgctcagcactatgttttttccctttcatagtatcaatgcaggaaaaaccctacagtacaatactgtagttaacacaaacacattaacagtggttgctgtagaaagcccaacgactgtttttaaagaagaccagtttttacacggcttcggttatgacttagcgcgtaactatgcacaaagcttaaatgtaaagttggacttcaaaatcgtgacagacaatgccacggcgcttaagtgggttcagcaaggtaaagcaaatcttgccatgacaaccgcaagcttaagttcaatcgagaacaaaggtttaatgtctttttctgcaagttgtggtgatatcgtaaatttgcaaaaaaatggattaaatccgaatctaagctgggtgtttaaacaagcagatgacccgcttacacaaacagcaagcggttttgtttgtcaaagcaaacaaaatggcctaactcagcaacttgcttctttttataaccgtaatgttgtaaaaccagaagcttggtctacgattcaacgtgacttaagtgcacgtataccgatttacaaagcaagctttaaacaaagtgctgctcagtacgatttagactggcatttgcttgcagcgattggttatcaagaatcgtacctaaaaccggagtctgtttcaccaacaggtgtacgtgggttaatgatgttaaccaatagtacagctcgggcaatgggtgtgagtaaccgtaacgatccagcacagagtattcagggcggtgcgaaatattatgatctcatgttaagtgagtatgatgatattcctttcccagatcgcaactggtatgcgcttgtggcttacaatatgggaccgggtgcagtgaaccagattcaaaagcgcttgcaagcccaaggaaaagacccgaaccaatgggttaatctctataattatttgcagagtaacaaaactcgcaatggtcgatacaaacaagcggttcagtatgtgactcgtatacgtgcttatcttgagcacattaaaacggcacaaacgcgaattaatatctag

SEQ ID NO: 44327 - DNA, 384 bp, Acinetobacter baumannii
atgcctgcatttttaactgatgattggtttgcgactgtcgaaaaattaactgctgaagcaggtgatcttaatttgccaccagctcttgcgaatttggcaattaatttagtagttacagatgcttctggaaataccgaattagcgttagatgggggtaaaatccaaaaaggtttgtcttcaaatgccaaaactacattaaacatggatgctgaaactttacgtaaagtattcctagagtttgatatggcagctgctatgcaggcattcatgactggtaaaataaaagttcaaggcgatatgtctcagttaatggctttacaaacagctaaaccaagccaagaacaaaaagatttgttcaaaaaagtattagagcaaaccgcttaa

SEQ ID NO: 44328 - DNA, 906 bp, Acinetobacter baumannii
atgtacgcgccagttgagtccaacgaaggatttaattttaagcctgaacttccaacaagctcggcctattatcgtttgcttaagaagcttcgccgtcaagttggacatgccatccgtgacttcaatatgattgaagatggtgacaaggtcatggtgtgtgtgtctggtggtaaagacagttataccttgctcgacattttgttgcagttcaaacgtattgcaccaatcaactttgatattgttgcggttaaccttgaccaaaagcagccaggtttccctgaggatgtcttaccacgttatatggaagagaataacattccgtattacattttggaaaaagacacttacagcattaccaaacgtttaactcctgaaggtaaaacgtactgtgctgtgtgctcacggttacgccgtggttcgctttatggctttgctcaagaaattggtgcaaccaaagttgcgctagggcatcaccgtgatgacatcattgctactttcttcttgaacttattccatggcggtagcttaaaggcaatgccacctaagcttttatcatcggataagaaaaatattttgattcgtcctttggcttatgttgaagaaaaggacattatcaaatatgcagagttacgtaagttcccgattattccgtgtaatctttgtggttcacaagagaacttacaacgtgccatgatcaatgaaatgcttcgtgaatgggacagacagtatccaaaacgtttacacagcatttttggtgcgttacagaacgtttcaccttcacaacttgctgaccgtgatttgttcgatttcgaagttcttgactcgcagcgcgaattagactttaaagatccggaagaactgaaaaaacgtttagatgtagtgaacttaagctttgctgctgaataa

SEQ ID NO: 44329 - DNA, 777 bp, Acinetobacter baumannii
atgtacatttaccaagacaaaaacggcagtactttactgactaaccgtaaaagttatgaccattcactcaaaaaagtaaaagtcacctactacccggatagtaatattcatagttatagcaactgggggacttcagaggcttcggttctaccaagctatagcaaaaacaaaaatgcttttgaccatattattaagcaggcagcacaacagcacggcgtttcggaaggattaatcaaagccgtcatgcataccgagtctggctttaacgtaaatgcccgctctccagttggcgcccaaggtttaatgcagcttatgccggctactgctcgtcgttttaacgtatctaacgcttatgatcctcagcaaaacatcttcgctggtgctaaatatttaagttggttgctcaaacgttttaacggcaatacgcaaatggcccttgccgcttataatgcaggagaaggaaacgtcgataaatatggcggtattccgccattccgtgaaacccaagattatgttcgccgagtcactagccgctaccaaaacttatattcttctggtgtaggcctttcttcttttagcaattcgagtatttctgcccaagcgataaaccaaccagccataccgcacagtacttcgacgcaagtctctgctcagcctattaagtattcttcctcgcgccaaatcgttacattgccagatggtacatatactgacgcacctacgggaacttatgtcaccaataatgcaactgctattgcacatatccggattgagtaa

SEQ ID NO: 44330 - DNA, 906 bp, Acinetobacter baumannii
atgatgcggattggtttgtttttgcttaccaacctcgcggtactggttgtagctggcattattttgtcactcttcggtgtcggtagttaccatggcgcgggtggcttaaatctaggcaaccttttagtcatctgttttgtgttcggtatggtgggctctttagtctctctattcatgtccaaatggatggctaagaaaactactggtacagaactgattgacccaaatgctcctcgtaaccaagctgaaagctggttattgcaaacagtcgctgaactttctcaacgtgctggtattaatatgccagaagttggtatcttcccttcatatcagtctaatgcctttgcaacaggctggaataaaaatgatgccttagttgccgtttcaagcggtctacttgagcgtatgaacaaagatgagctacgtgctgtgctcgcgcacgagatcggccacgttgcaaatggtgacatggtcacattggcgctcatccaaggtgttgtaaacgccttcgttatgttctttgctcgtgtagtaggtgactttattgaccgtaatgtctttggtcgtcaagacaatgaagccccaggtatgggttatttcatcattacaatggttctagatatcgtgttcggtattcttgcctctgccattgtgatgtggttctctcgttaccgtgaataccgtgcagatgaagccggtgcgcgtttagctggtaaacaagcgatgatctctgctttattacgtttacaagctgaaacagagttacctgaccaaatgccaaaagaaatgaaagcgttcgcaattgcggaaggtaaagaacaaggctttagtttagctgcattgttccaaactcaccctacaattgaacaacgtgtggcagctctacaccaattagattgcccataa

SEQ ID NO: 44331 - DNA, 576 bp, Acinetobacter baumannii
atgcctcaagaaaaaaaattaacacagcagcaggttatcgcactagaacgggatcttgccaagttcgcaaccatgatggatagtgcggtccgtattccttttacaaagcagggtattggcgctgatgctgccttaagtactattccaattgccggtgatgtcgctgggttcgcactgacgtgttatgctatctataaggctaaacaaataggtgtgcctcagcataagctcactccagtgatcaaacttgctgtagtcgatgccgtagtcggttttgttccagttgcagggactattttcgatatttttatacgacccagtcgaaaagcattagatgtggtgcatacgcatatacgtgaagaatatgcgatccaaagtgatattcatgtcgttcatccgtatttacatgaaaagctcgaaaagaagcagcaacagtcggcattctggcgtaaccctgttgtgagttggttatggttgcacatacccgatttattaggtgcgtttgtactgctattaattggcttagctgtgtggtggggtgcaagttacctttggggactttatcaaaccatgtaa

SEQ ID NO: 44332 - DNA, 3096 bp, Acinetobacter baumannii
atgctatctaaattttttattcaacgccccatttttgccaatgttttggcgatcattgttatggctttcggtattttttcggttatgaatttgcctgtagaacggtatccagacattgctccacctaaaattactgtgtcggccaactatagtggtgcagatgcacaaacggttgagcagagtgttactcaaattttagaacagcaaatacaagggattgatcacttactctattttagttcatcaagtgactcatctggacgtagtcgaattaccataagttttgataacggaacaaatccggatactgctcaggtccaagtacaaaatagtattagtggtgtcatacgtcgcttaccggatgaagttcaacgccaaggtgttacggtaagtaagtcactgggtgacacttttatggtaattggcttatatgactcgactggtaaaacaggaaacattgagctatcggactatttaactacgcatgtggtagataacctgaaccgtattgaaggggtgggtgaaactgatgtatttggttcacaatatgccatgcgtatctggttaaatccggataaattaaaacaatataatttaatgccaagtgatgtagcgaatgcaatcaccgcacaaaatactcaagtcgccgcaggggcaattggtgacttacccgtaattgacggtcaatatttaaatacaaaagtcacagcaggttctcgcttaaaaacagttgaggattttaaaaatattgtcgtgaagtcgaataaaacggcgagttatgtgtatttaaaagatattgccagagttgagctaggtgcagaaaactatcagtcttttaacactattaatggctatcctgccgcaggtttgggtatttctttatcttcgggtgcaaatgcaattcagacctctaagctcatccaccaaactctagatcagcttacaacgaaactaccagcgggttataaaatcgtttatccacgagataatacgccctttgttcaagagtcaattaaggaagtagtaaagactctggtagaggcgatcattctggttattttggtcatgttcctgttcttacaaagctggcgtgctacgctcattccgagtattaccgttccagttgtaattttaggaactttcgctgtcttatatgtgcttggttttagtattaacaccttaacgttatttgcgctggtactcgcgattggtttgctggtcgatgacgcgattgtggttgtagaaaacgttgagcggctcatgcatgaacagcacttatctcctaaagaagctgctattgagtcgatgggggaaattagtggggccttagtcggaattacgttggttttaactgctgtttttattccaatgtcctttttaggcggttcaattggggtgatttaccgtcagttttctattactttagttgccgctatggcgttgtcccttattgttgcgctcattttaacaccggctttatgtgcattaattttaaaaccaaatcctcaacctcagcgctgggccgtatggtttaaccaaaagattgagcaacttaaaaatcaatatatcaagcttgttcagacgagtattcattacagtaaatcagttattgtgatttttgtggctttaattgccgtttttacgctgttctataacggtttaaaaagcggttttattcctaaagaagaccaaggaattttaagtgttcaaattaagctcgtagacagcgcaccaatttatcaaagccagaaaattggtgagcaagtccgccaatatttcttaactcaagaagataaaaatgtagatttggttttaatccgctatggacgaaattattcgggcacaggacaaaacttggcgcaagggtttattgctttaaaaccgtgggatgtccgaacaggaaaagaaaactcggctgaggctatacaaaagcgtgccatgaaatactttagtcattttaataatgcacagattaatgtgactttacctgcctcagttaatggcttaggtcaaacagatggtctggatttatggattcaggatttgaatgggcaagggcaagattttctagatagtgccttccgccaattgcaggctcaaagtaaaaactattcatcttttgaaaactttgataagcagtcaaccaatagcaaggcaaatcttaatattaagattgaccagaaacaggcactagcaaatggactacagctatcggcaattaataacactttgtcgagcgcatggggcggaacttatgtaaatgactttattgatcggggccgtattaaacgtgtcatgattcaaggtgatgccgagtttagatctaaaccggaagatttatataactggtctgtacgtaatgaccaaaatgaaatggttccctttagttcatttgccaactttagctggggcggggcgccggaaattgtaaaacgctatatgggatatagtgctttacaactacaagcagatgtcgcgagtgacagcagttctggccaagcgatgaaagatgtagaacaacttgttaaccaacaaaaagatattggtttagcgtggacaggtttatcttttgaagaacagaagtcgactaatcaggccgtgtggttatatttaatttcggctggatttattttcttatgtttagctgctttatatgaaagcttaagtattcctgccgccgtaatgacatctattccgcttggtgtaggaggaagtgtgattttctcttatatttttggtttgccaaatgacgtgtatttccaaattgcgctattaacgactattggtttgtcatgtaaaaacgccattttaattgttgagttcgcggccttagcgcaagaaaaaggtaagaatgccattcaggcggccttagaaggtgcgagcttacgattaagaccgattctaatgacctctttagcctttggggcaggcgtaattccgcttgtgtttgctcaaggtgctggtgcggttagtcgtcaagagattggtattagtattttaggtggcgtgatgtttggtactgtgctggttctgttttttattccggtcatgtacgtattattacgttcactatttaaatcgaaagcttcaacctaa

SEQ ID NO: 44333 - DNA, 1143 bp, Acinetobacter baumannii
atgtttagaaaagcacttttatgcttaagtttaattagcttggttggttgtaatgatgacgataaaactgaaacgacgccaaccacgccagaatatcaacttcctaaaattctagtagtaggacaccgcggcgctagcgctttacgtcctgaacatactttagcttcatatcaaaaagcgattgatgacggcgcagatttcattgaaccggatctagtctctacaaaagatggcgtactggttgcccgccatgaaaatgagataggtggaacaaccaatgtaagcactttaagtcagtttgcagaccgtaaaaaaacaaaaaatattgatggcgtcgacttaaccggttggttcacggaagacttcactttaagtgaattacagcagcttaaagcgcgtgaacgtattcctgagtttcgaccagccaacacagcttataatgatctttaccctgtcccaactctagaacaaatcgttgagcttgccgaagctaactataaaaagacggggaaaattataggtttatatattgagacgaaacatccgacttattttaaaaatcaaaatctggcaatggaagatactcttctaaaaaccttagccaaatataaatatacacgtgatattgcacctgtctatttacagtcttttgaagtgagtaatttaaaatatttaaaaaatgagcttgatcttcataagtcgcttaaacatgcacaaattattcagctatacgattcaaaaacatctcgaccagcagacttcgtagagtctggtgacactaaaacttatgcagatttggccacagcacaagggttaaaagatgttgccaaatatgcaaatggtgtaggaccaagtaaaggttacatactgacctttaataatgatggctcttataaaactagtacgtttattgctgatgcacatacggctggcttaaaagtacatccctatactttccgaccagaaaacaacttcttaccagcgccgttaaagtgcagcccagataaacctgctgaacgttgtccatctggtgcgttaaaagagtttgaagcctatttcaaggcaggtgttgatggcgtttttaccgatgacccagcactcggtcgcgaagctgtcactaattttgaaaaagcagcaaaataa

SEQ ID NO: 44334 - DNA, 195 bp, Acinetobacter baumannii
atgagccttaaaaatctagatattaactcccgattaattagagaaatcgcaattattctaataattaaagtcgcgcttctcttaacaatcaaacatatttggtttgacgctcccactatccccaaaaattttgacaatcaggtcgccgagcatattgcaggcgataactcttcccacattaaggagacacgttga

SEQ ID NO: 44335 - DNA, 1587 bp, Acinetobacter baumannii
atgatttctgaaagcgtggttgatctttcgcggttccaatttgccatgaccgcaatgtatcactttcttttcgtacctttgaccctaggccttgcgtttattctggctattatggaaaccacttacgttatatctggtaaagagatttacaaggatatgactaagttttggggaaaactatttggtattaactttgccttaggcgtaactacaggcttaaccatggagttccagttcggaacaaactgggcatattactctcattatgtaggtgatatattcggtgcgccattagcaattgaaggcttaatggcattcttccttgagtctacatttatcggtctattcttttttggatgggaccgcttaagtaaagttcaacatctaggagtaacttggttagttgccctaggttctaacatgtcagcgctctggattttagttgcgaatggctggatgcaaaaccctgtaggtgcagcatttaacttcgaaactatgcgtatggagcttgttgatttcggcgcacttattttcaacccggttgcacaggttaaatttgtacatactgtttctgccggatatgtaacaggtgcgattttcgtactcgccatttcaagctactatctactcaaaaaacgtgaccttcctttcgcacgtcgttcatttgcaattgctgccatttttggccttgcttctacactttcagtaattttactcggtgacgagtcgggttatgagctaggtgatgttcaaaaaactaaactcgctgcaattgaagccgaatgggatactcatcctgcccctgctccatttactttgtttggtataccaaaccatgaagaaatgcgaacagattatgcagttaaaattccatacgcattaggcctcatcgccactcgttcaactacgaaagaagtcactggtttgaaagacttaatgcaacagcacgaagttcgtattcgtaacggtatgcttgcttatgctgagcttgaaaaattacgtgctggtgatcgctcaccagagttattagcttcatttgagaaaaatcaaaaagacttaggctatggtctacttcttaagaaatatgctccgaatgtagtcgatgcaagcgagcagcacattcaagcagcggtaaaagatactattccgaatgttacagctctgtttttctctttccgtgcaatggttgcttctggcttcttaatgctacttcttttcattttagcgacttgggcagtagcgaaaagaaatgctgagaataaaccttggctacttaaatatgcattatttgccctaccacttccgtggattgctgcacaaaccggttggtatgtagcagagggcggccgtcagccgtggtctattggtgaaattttacctacgcacttatcagcttcaagtttaagtacgggcgatgtgtggggctcaattctcgccctggcagcgttctataccatacttttgattattgaaatgtacttaatgattaagtttgctcgcttaggtccaagctcacttcacactggtaaataccattttgaaaaacaagagccaaaaacagctgttaatggggaggctttatcatga

SEQ ID NO: 44336 - DNA, 1146 bp, Acinetobacter baumannii
atgattgaatatgaactcctaaaaatcatatggtgggtgttagttggagtcctactcattggatttgccctaaccgatggtttcgatatgggctcaatggcactcatgccttttgttggtaaaactgataacgaacgccgtgctgctattaatacgatcgcaccccattgggatggtaatcaggtctggtttatcactgctggtggcgcgctatttgcagcttggccaatggtatactcagtcgcattttccggaatgtattgggccttattacttgtactatttgccctgttcttacgtcctgtaggttttgactatcgttctaaacttgaaaatacccaatggcgcaactcttgggactggggactttgtattggtggtgccgtaccagcgcttgtttttggtgttgcctttggtaatttattcttaggtattccttttagtttagacagtacattacgctcggaatattcaggtagcttctttgctcttcttaacccatttgctttagtttgcggtattgtcagcctttctatgttgtgtgctcatggcggcgcttggcttatgctacgcacagacggtgccttgaaacaacgctctgctaaagcaactcaaattatggcagccatatttttagtttgtttccttgtaattggggcatggttgtacttcggtcaagtcccaggttatagctatgctgctgcagttgatccaaacgtagcacttaaccctttagccaaagaagtagtcacaaacaacaacccaggctggatgaataactacagcagctatccgattacaaaagtagctcctgtactggcaattttaggggcaattattgccttctttacagcatcaaaagccaaagcaggtttaagttttgctggcacaagcttaatgattgtaggtgcgattttaactgccggttttgcactcttcccatttttattgccatcgagtgttaatccaaactctagcttaacaatgtgggatgccgtatcaagtcatcgtactttaggggttatgactgttgctgcatgcatattcgttccgatcattttgatctacaccagttggtcgtattacaaaatgtggggcgttattactaacaaacatatcgagtcaaactcgcatagcctgtactaa

SEQ ID NO: 44337 - DNA, 297 bp, Acinetobacter baumannii
atggcaaccgcaatgacagcatcaaatcaacgaaaagctcaagcattcgcaatggccatttcatttctgttggcattgccgcttgctgtaattttacttgtgcatccttccctcatgttagatgcaaacggacactacaatcatagccagcttatgctggtgatggtgggtatttccggaggcttcatttatggggtgggttttgtgccgcacttctggttatggaaatggttgtttagtccatggatagcttggcctctcatgcttttaggctattacatctggtttctaacctaa

SEQ ID NO: 44338 - DNA, 525 bp, Acinetobacter baumannii
atgatcaaattaaatttccgtttagcagaatttagtgacatcccaacactagtagagttgattaatcagtcatatagagaacaacaaggtagaagctggactactgaagttgaatatgtaaaagggcaacgtattaataaagagcaattgaaacatcaattagaattacctaattcagtattattaattggagaaataaattcttcaaaagttgttacatgtattggtcttacatttcaaagtaatacagttgagataggaacattttgtacagatccgcatgttcagaatatgaaaatagggcgttctgttttggagtatgctgaacaatttgctttacacaaagtacctgaattggacagcgcaatcatgtatgttttaaatgtgcgttcagagttaattgcttattatgaaagacgcggatatataaaaacaggttaccatgaaccatatccgcttgacgcaaatgttggattaccacttataccaattaaactaatcgaaatgaaaaaggacctcaaatga

SEQ ID NO: 44339 - DNA, 672 bp, Acinetobacter baumannii
atgactttaagattaagtgtcgctgcgatgggtttattactcagcggttcagtattttcagcagttacaattacagcgccagaggaaatcgtaatccttgcggtgaatggtcaggaagtcaactctggattattccgttcttctaaaaataattataaagtcgatgctggtgagacaagcctaagtgtacgttatcaagaatattttgagcatttaagtggcgaacacgatattgttaagtcaggagtggttaccattcaaactccagcgctcaaagatggtcaaacttataagcttgcaatggtagatgctccaaaacaatttgaacaagccaaaaaatatgctgagcaacctacagtggctttatataattcaaataatgagttaattgttcaacaaactggtgccaataatgaggcaagaccgtggtttgcatcgggattgctaggtaaggttactgatttcacgactaaatcatctaaacaacaacctgacgctgtgtatgctgctgcaaaacctaccacgactcaagctaatgcgcctgttgcaacaactatgcctgctactggtgtagcacaaactaatgatcagcgtttggcagaaatttggaaaaaatcttctaaagcagagcgtcaaaagtttatggcttggttagctgagcagtcgaattaa

SEQ ID NO: 44340 - DNA, 597 bp, Acinetobacter baumannii
atgtctactttcttagataaaattaaaaaccgtcgtactatttatgcaattggtaaaaatgttgcattagatcgcacaaaaattgaagaaactattcgtgaagcggttaaacatagcccatcagcgttcaactctcaatcttcacgtgttgttactctttatggtgaatcacatgctaaattttggaatttagttcgtgaagcattacgtaaaattgttcctgcagatgcctttgccggtacaaatgcaaagattgatagcttcgttgctggtgttggtacagtactattttatgaagatcaagctgttgttaaaagcttgcaagagcaatttgaattatatgcagacaacttcccagtttggtctgaacattcaagtgcaattgctcagtttgcgacttggactgcgctttcagaacttggtttaggtgcatcattacagcattataacccgattgttgatgctgatgctgctgaagcatttgatgttccagcaacttggaaattacgtgctcaacttgtatttggttctgttgaagcaccagctggtgaaaaagcatttattagcgatgaagatcgttttaaaacattcaactaa

SEQ ID NO: 44341 - DNA, 1107 bp, Acinetobacter baumannii
atgcaacaacaatcgaatatgcaaaataaattcttgatagatgctgagatcggggatgacgatgtcacattgcctaatttacctgctatcgatgttcctatcgttgagtcacctgttaagcaagaagtaaaagctgaagaagtggtcgaggctgcaccttctacagaacctgagcaaccaaaatctggtttctttgggcgaatgaaagaaggcttgagcaaaactcgtcgtaatttcaccgatgggatggttaatatcttaattggtgggaaagaaattgatgatgagttgcttgaagaagtcgaagagcaattattagttgcagatattggtgttgatgcaacaaaaacgattattaccaacttaactgaacgtactgctcgtggtgatttgatctattcacattcactttataaagccttgcaagaagagttagttgctttgcttgctccacgtgtgaagcctttgcatattgaccctaataaatcaccttatgtgattttaatggttggggtaaatggtgttggaaaaacaacaacaattggtaaattagcgaagcgtttacaaggtgaaggcaaaaaagtgatgttggcggcaggtgatacattccgtgctgctgctactgaacaattgcaaatctggggtgagcgtaacgatattgctgtagttgctcaaggtcatggtgccgatagtgcatcagttatttttgatgcttttgaaagtgcgcgagctaaaggtattgatgtactgattgcagatactgcgggccgtttgcataacaaaagtaatttgatggaagagcttaagaaagttaagcgtgttatgcaaaaaattgatgcaacagcgcctcatgaaattatgttggttgtagatgcgggtactggacaaaatgcaatcaaccaagtacaagaatttgaccaggctgtcggtttaacaggtattaccattactaagttggatggtacagcaaaaggtggagtattatttaatattgctagtcgtactcatgtgccaattcgtttcattggtgtgggtgaaaaaattgatgatttaagaccattctcggcgaaatcgtttgttgcagcactatttgaaactgaaaaataa

SEQ ID NO: 44342 - DNA, 327 bp, Acinetobacter baumannii
atgctcacattcaaagaaaattttcttaaattaaagtctgagttaaaggcagatcaatgttttaatctggttgtgattattatcattggctgtatttttatgctgtcttatttggcattactacgtcctgtgaattcagaacagtaccaacgaattgtgcaactttctcgacaggctacttatccaagaactcaagatatggccgagttgattatggctcaatcagaaattcatagagcagagtatttaaagttaatgcatgcttatcagtttgaacataatcatatcaagcaatatcctgcattagcgcaagaagatactcaataa

SEQ ID NO: 44343 - DNA, 360 bp, Acinetobacter baumannii
atgacaaatactattgatggctttgtttttgataatcctcctaaagaggagcaaatcatagaacttgcccattaccatcgtaaattattagacgaagcaattttccatcaagaaatacatttaggggattattgtctagcacaaaggaaacgggttttcgactatgctcgtcaattagaccctaatcaaaaagcttggttctatcaagtttatgatggtgaacttagaaaaattgcagatgaagatgaattgcacccagcagatgcagaagaaggtttaagtatttttgctatgctattagtattagttattattgctgcaattttatacttctctgtaattcgttccttaatgggctag

SEQ ID NO: 44344 - DNA, 234 bp, Acinetobacter baumannii
atgattcaacgtatctctcatcatgatttagaacatgtatacgcaactgcggttaacacaattcagtctcaaatgaatttccaagatgcagttgcacagttagaagaagttgctcgtgctggtcacggtaaagctgctttgttcttagcagaactatactaccaaggtttccgtgttgaacgtgattccatgaaagcacaatactggcagaaactagccacgatgcaagcataa

SEQ ID NO: 44345 - DNA, 426 bp, Acinetobacter baumannii
atgtggttctcttataataagcaggacaagttgaaaacctttaaatttaaaatgaacagtttaagtaatctacaaccggtttctaaagacttgatgatcaagatttatattttaagaaccatgatgtactgcggggttctgtggggactatttgatgaaggctgggccattaaatcagatcaggaagattttatttttccgttctggctaaatggagtacaagcacatcgatacgccaaaactcactggcccaattacaagccaagaaaaattaccccaaaagactttcatgaatctttattacctactttaacacggttaaaagtcactcctgctttatttaactcatctcatcgcaagttgaagttatctacacagcaaatgcatcatttcttttttaatcatccaaaatggcaggtagcttaa

SEQ ID NO: 44346 - DNA, 432 bp, Acinetobacter baumannii
atgactatcgttgcacaagtaattaagaacaaatctgaacaagccatttttacaatttcacccgaagcaactgtcctcgaagcaattacgattatggccgaaaaaggtattggtgctttagtcgtagcagaaggtgaacaagttgttggaatattatctgaacgtgattacacacgaaaagtaacgcttatggagcgctcatcttatagcactacagttgctgaaattatgacagcaaaagtgattacggtaggtttaaataatacggttgaagaatgtttacagctcatgaccgatcgtcatttacgtcacttacctgtattagataatggaaaattggttggtttcatttcaattggtgacttggttaaagctgctatggaagaccagaaagttttgattgaacaattaaagcaatatatttcaggctaa

SEQ ID NO: 44347 - DNA, 1209 bp, Acinetobacter baumannii
atgactgatattaccctagctccagtacaacctgatcaaccaacacatttaatggctacttatggtcgccaagcgatcagttttgttcgaggccgaggggcgtatctttatacacaagatggtacagaatatttagatgcactcactggtattgctgtatgtggtttagggcacgctcatccagctattgcagaggctattgcagaacaagcagctacacttgtgcatacgagtaatttgtttgaaattccttggcaaactgcggctgctcaaaagcttgctgaagtttcaggtatggaagaaattttcttttcaaacagtggcgccgagtcaaatgaaggggcaattaaaattgctcgtaaatttggtactcaacaaggtataagcttgccaaagattattgttgctgagcagtcatttcatggtcgtactttagcgaccctgtcagcaactggtaacaagaaagtacaagacggttttgcacctttagtggaaggctttattcgagtaccatttggtgatattgaagcgattcaagaggctgccttacagcatccagatatcgttgctattttaattgaaccaattcaaggtgaaggtggtattaatactgcaccacaaggatttagctatttagaagaagttcgccaaatttgtaaccagcacaactggttaatgatgctagatgaaattcaaactggtaatggtcgtactggtaaatactttgcgtatcaacatacaaatattattccggatgttttgaccacagcaaaaggtttgggtaacggttttccggtgggtgctgtaatgactcaaggtaaagcggtaggcttgttagggcctggtagtcatggttctacatatggcggtacagtattgggttctcgtgtggtttacacggtaattgatacgatccagaaggaaaatgcagtagagaatgcagcagtagtgggtaattatattgttgaccaattacgtgctcaattgtcggataagaacgtgcaagtacgtggtttcggtatgatgattggtatccaattacctaaagattgtgctgagctcgttgcgattgctcgtgatgagtacaaacttattattaacgttacggcaggttcggtggtgcgtttattaccgccaattaacatgacacaagctcaagctgatattttgctagagcgtttagtcgcattaattacgaattatctttaa

SEQ ID NO: 44348 - DNA, 342 bp, Acinetobacter baumannii
atgactgaacaagcacgtgatactgaagcgttaattcgcgatcaaattgcgaagcatcccgttttactttacatgaaaggcactccacagtttccacaatgtggtttctctgcacgtgcagtagaggcgctcagtcaaattggtcgtccatttgcatatgtgaacatcttagaaaaccctgatattcgtgcaactttaccaaaaattgcaaactggcctactttcccacaattatgggtaaacggcgagcttattggtggtagcgatatcatgcttgaaatgttccaaaatggcgaattaaaaccattaatcgaacaatacagcgcagctccagaagcttaa

SEQ ID NO: 44349 - DNA, 324 bp, Acinetobacter baumannii
atgtcttaccagttagttgaattagagaacgcaaccgctaatattatttgcccgatttgtaagcttgccgttattgattggacacaagagcaatatgttcaaccttgtgaacatacagtatttattgcaatggacttaggatttgagtttgttgctgaccgttttgaagaagttatgaaacaaaacgtagatgagttacatgaagatccgaacatgaatatttttgatgcgataacgactacaccatataaaaatttatctattttaaaagcagatcttggtgtagatggactatttcgttatgtcggtataagtgattgttaa

SEQ ID NO: 44350 - DNA, 903 bp, Acinetobacter baumannii
atgctcacagatcttgatgatttttattgttttgcccttgttgttgagcatggtggatttagtgccgccgaacgtgttacggacattccaaaatcaaaattaagtcgtcgtgtttataacttagaggaaaatttaggggttcgcttaattcagcgcagttctcgtcattttgcagttaccgatattggtatggatatttatagacacgcccaagtcatgatgaatgccgcgcaagcagctcatgatttggttgatcacttaagtattcaaccaagaggtgtagtcaaagtaagcgttcctgtagatatagcacaaaaccagctacccaaaattttgccagcatttttaaagaaatatcctgaaattcgtttacaacttattgtaagtaatcgacgcgttgatgtaattaatgaagggattgatattgctctacgggtcagatctaaactagatgatgaccctagtttggtattaagacagtttgcgctaatagaacaaagtctctttgcaagccaagcttatttaaatgagtttggtaatattaagtcacctgatgaattaagtgatcatcgtattttaagcttgtctgaagagcatttagatcaacaatttatattgcatggcccagacaaccaactgaagaaagtgaaagttagcccaactatcatgggaacaaatatttatatgcttgcccaacttgcaagtcaaaattgtggtattgccttattacctgacacagcagctgaggattttgtaaaatcaggtcaacttgtacaaatcttgccagattggaaagcagcccacggtatattccatgctgtttatccgtcacgaagaggtttactgccagctgtacgtgtatttattgattatttggtagaacatctttcagaacatccataa

SEQ ID NO: 44351 - DNA, 795 bp, Acinetobacter baumannii
atgagagcttctactgttacaattaaaactgaacaagatctagaaaaattaagagtttctgggcgtttggctgcacaagttttagaaatgataggggagtatgtcaagccaggtgtaacaactgaatatttagacaatatttgtaatgattacatcgtaaatactttaaaagttataccggctaatgttggttatcacggattcacaaaaacaatatgtacttcagttaatgaggtagtttgtcacggcatcccttctcaaaataaaattttaaaagatggcgatattattaatattgatgtagcaattattaaagatggctattttggtgatacgagccgtatgtactatgtcggtaacgtaaatccacatgctaaaaaattagttgaaactacttatgaagcaatggtcgctggtatacacgtagttaaaccaggggcgactttaggggatattggttacgctattcaatcggtcgctcatcgcgaaggatatagcattgttcgtgaatattgcgggcatggcattggtaaagtttatcatgaacaacctaatattctgcattatggacaacgcggccaaggtcttgttttgaaaaaagggatggtctttacaattgaacctatggttaatgcaggcaaacctcaggtaaaagagctaaatgacggctggaccgtaattacccaagatcattcgttatctgctcaatgggaacatatggttgctgttacagatacaggatttgaattattaacgccgtggcccgaaggtgtgggaaattatctagaaatttaa

SEQ ID NO: 44352 - DNA, 1302 bp, Acinetobacter baumannii
atgcaacagcttcgtaccggagatattattgccttaggttttatgacctttgccctctttattggggctggcaatattatctttcctcccattgtcgctcaacaagctggtgatcatgtatggctagcagccataggttttttgattactgctgtcggcttacctgtaattaccattatggccctctctcgtatgcagggttccattgaaattattagttcaccgctaggtcgtatcgcaagtctgatcttaactgtagtttgttatctatcagttggccctttatttgctacaccacgcaccgcaacagtttcttatgaaattggtttctcatcttattttggaacgtctagcagtagccttttaatttacagtgcaatttacttcgcatttgtaactgtcgtttctttatatccgaacaagcttttagacacagttggacatgttctagctcctctgaaaattatcgctttagcaattttaggtattgcagcggttatgattcctgcaggttatgttcctgctccaattaatcattacgttaactctcctgtttcagaaggtttcgtaaatggttatctcaccatggatactttaggtgccttagtatttggtatcgtgattattcaagcgatctattcgcgtggtgttactgacaacaagctagtaaccaagtatgcaattattgccagccttatttctggtgtaggacttactttagtttacttaagcttatttaaattaggtttgggtagtcatgaagtcgctcctaatgcagcaaatggtgctgtaatcctacatgcatatgttcaacatgcttttgggaatatgggttcactcttcttaacaggcctcattttcttagcatgtatggttactgcaattggtttaacttgtgcatgtgctgaatatttcgctcagcttactaagttgccatataagcttttagttttcatcttagttggtttttctttcattatttccaaccttggattgactaagctaattgccgtatcagtaccagttttaagtgcaatttatccacctgcaattgtagttattatgctcagtttcttctggaaattttggcataaaccatcttttattgtcgggtcagtaacaagcattgctttaattttcggaattattgacgggcttaaggttgcgggctttggtgattaccttcctaatttccttcaacacttaccgttaaatgaacaaaacttggcatggttgatcccatctttagttgttcttgtagtgactactcttatcgacaaagttaaacataaaagcatttaa

SEQ ID NO: 44353 - DNA, 420 bp, Acinetobacter baumannii
atgaaaagtaaatattatttaacattagcagatgctgagtttttaatggaagaagctcagaaatatgcaattgaacacaactttaaagtcagtatagccattgttgatgaaacaagctctttattacttatgaaacgtctagatggcgcttctcctctcaccacgcatctttgcttagaaaaagctaaatgctcatcaattagcggtcgtccttcaaaattttacgaagagcttcttcaaaatggtcgtcttggtttcttgagtatgccaagtgctaaaggtatgctagaaggcggaaaagcgattatttatgaaggccagattttaggcgcgattggtgtttcaggtgttcaatcttttgaagatgctgaaattgctcaacacgctattgatgtttttttaaaaaaacaaagtagctaa

SEQ ID NO: 44354 - DNA, 246 bp, Acinetobacter baumannii
atgttatcattacatttcaacaaacaagtcttcattaacactctgaacagcaaagattcagtagtttatggagtaacgacgcttgctcttatgctgactttactgtttcaaggtatgattaaagggaatctgaaacccgaatactttatgtatgccatggttgtttcttttgtattttgtgtatgggcctttgtcgaccacaaaatgcgaaaattagctaaaagacgacttagtcaacagaaataa

SEQ ID NO: 44355 - DNA, 465 bp, Acinetobacter baumannii
atggaaattatggatttatcaaaagctgtacagctggctattgtctttagtggcgtctttttatggataggaatgttaactggggtatggaaatattggcaaatacgccgttccgaattaagccgcgcacattattatgtagatattgcacatagaagcagtttgctttatgcagcagccacacttattctggctgtattgagctatttcacgattttaaatgaagatattgctttatggtgtgtattggcaaatatactgttttttagtttctcaattttagtttatatcatccacggatttttgcaggatacgaccaatcagtttaaacaacctcataggttagggcattttagtttacctacatggttgatgacctttatgatgtgcgctttaattattactgagttgttagcaactgctattttagtgatggggacaattttattgtttttaagcaaataa

SEQ ID NO: 44356 - DNA, 861 bp, Acinetobacter baumannii
atggataagacttttgaatctttttggattacctgtaaagatggttatcagcttgcagctcaattttatcctgctcaagaaaagaaagctgaataccctatcttgatttgtccagcaacaggtataactaaaaacttttatcactctttcgcaacatggttaagccaacaaggctatgatgtattgagttttgacttccgtggtattggcgaatccctacatggagctttaaaacaaagtaccgcaagtattaccgactggggaacacttgatattcctgctgcaattgatgctttattaataaaaacgaaagcaaatcaagttattcttattggacatagtgctggcggacaactactaggagtcgtacctaactataataaagtcgcaaaagtgataacggttgcaggttcaactggacatattaaaggccttaaaggaaaaaccaaggttttagcgccagttatgtttaatcttatcttccctatttctagtcttgttaaaggttatggagcaactcaattcattggtatgggagaaaacctacctaaaaaagttgctcaacaatggcgagagttttgtagccgtcccggatatgtaaaaaacgccataggcaagacaatttttcatgattttcatttagatattcaatgtccaattactgctatttgggctgatgatgatgagattgcaaccaaacgtaacgtacaagaattattaagtttatatccaaatgcgaataaaaaaatgattgaacttagcccaaaagatttaggctataaatcaattggccatatgctgttatttaaaaaatcacatcaaaaactttggtctattttagaacaagaaattaaacattaa

SEQ ID NO: 44357 - DNA, 2859 bp, Acinetobacter baumannii
atgctagcactagagcctcaacatattcatatgaatcaacatgctgttgataaaacacatgcattaaagtgtctagtagatatattagaaaaagatgggttagttacgcctgaatatataacgggactcatcaatcgtgaacaacaaagcgcgacttatttaggccaaggcattgccattcctcacggtactcctcaatcacgtgaatatattttaaaaacagggattcgcttagcccatttccccgaaggtgtgatctgggatggagaaaataaaatttatttagctgtagtgattgcagcaaaatctgatgaacatttgcaagttttgcaaattcttactcgtgcattaatgcatgacgtcagcgaacaagtaaaaaatgcttctaaacctgagcagattatcgaattactacaagctcagccattatctttagcgcttcatgaaaatcttattcaaaccgaaatcgacgcacaagatatcgaagatttattttgggcagcttctcaaacactcaaaaaacataattttgtaaaatgtggttttctaagttcacttgatccagaacaagccattcaactgcaagatcaaatctggtccatttctagcaatcactttgttcagcaaccagctattagcattactaaaccatcacaggctttagagctaaatggtaaaaagctgaacaccctcgtttgtatagcagccaatgaccaactcgataatgaaagatttaatcgtttaattgatattttatttaatcctgagcaagttgccgagctagataaaactcaaactccaaacgaaattgcaaaaattattggagctgacgttgttcctgactggcctcaacgttcagtagtgctggcaaatgcacacggcttacatgcccgaccagctacacaccttgtcaatcttacaaaaacctttcaaggcgatatccaagttgcagtagacgatggtagctttgtttctgccaaaagtttaactcgtcttttagcattaggttgtaagcgtggacaaactctacgttttatcgctgagccagaaaccgatgccgtagaggctttagatcaagttattttggcagtgcagcaaggcttaggtgaagaagttgaagcgctacctgtaaccagtgaaatacctgaccagctccctgcccaaacggcaatatcaaatgctacgacattgggtaacaatacgggaattgcagcatcaagtggcttagcttttggacctgtccatgtgattaaaccaaaggtttatcaatatgaacgtatgggttcaggcgtaaaagtcgagaaagaaaatttagatattgccctacatgcagtaaaaaacaatattcaccaagtcatagccaaagccgatgcttctgaaattaaacaaatctttcgagctcacctagaaatgcttgatgatcctgatttaattaatggtgtatatcaaaaaatttatcaaaatttatcagcaccagctgcatggcatgaacatattgaagctgcagctaaagcacaggaagctctaccagatcgtttactcgctgaacgcgcaacagacctacgcgacattggcgacagagttttaacccaattatgtggtgaagtggttattgaagagcctaaagagccttatattctaatcatgcatgacgtggggccaagtgatgtcgctcgtctcaacaaagaccgtgtcgcaggtattctaactgctataggtggtgcaagtgcgcatagtgcaattgtcgcacgtgctttaggcattccagctattgttggtgctggtgaacaagtcctagaaattgatccgaaaagcactttacttattaatggtgatacgggaacttttgttttaaatccagatgcagcgcaaatcgaacaagccaagcaagagcgtgagcaacagcgtcaaattcgtgaagaagctgaacgccatagccacgagccagcaattaccttagatcaacaccaaatcgaaattgcagccaatttgggtaaagttcaagcgacagcacaagcagtagaatgtggtgctgaagcaattggcctacttagaaccgaacttgtttttatgtctcatagcagtgcacctaacgaggctgttcaagaagctgattaccgagttgtattagatgcacttgcaggtcgcccgcttgtggtacgtacattagatgtaggtggtgataaacctttaccttacttaccaattgctgaagaagaaaacccattcttaggtttaagaggaatccgtttaactttaagacgccctgagcttttaaaacagcaattaaccgctctactaaaagcatctgataatcgtccgttacgaattatgttccctatgattggacgcgttgaagaatggcgtgcagccaaagcaattcttgacgaagtaagagcccaacatccatgtgacaatttacaagttggcattatgattgaggttccgtctgctgctttacttgcaccggttcttgcacaagaagtcgactttttcagtatcggtacaaatgacctgacccaatatacgttagcgattgaccgaggccacccaatactctcagcggaagcagacggattacatccaagtattcttaatttgattgatcaaacagtgaaagctgctcacaaacatggtaaatgggtaggaatctgtggtgagcttgcagcagactctaaagctgtacctattctcatgggattaggtgtagatgaactgagtatgtccccaaatagcattcctttggtaaaagctcaaatccgtacactaagctatagccatgctcaaaagcttgcgcaacaagctttactatgcgatagcgcccctgctgtgcgccagctatctgaacaagacttataa

SEQ ID NO: 44358 - DNA, 948 bp, Acinetobacter baumannii
atggctaaaattttaacaattactttaaaccctgcaattgatgtaaccattcaactgaatgagttattagtaggagaagtgaaccgacaagagtcggtagaaattcatgcggctggcaaaggccttaatgttgctcaagtattaaaagacttaggtcacgatgtaatcgtaactggctttttaggtgagcataatcgacaaattttcgatacacattttgcacaagctcaatttcaacccgagtttatttatattgatggtgaaacccgtcaaaatataaaaattgctgagcattctgggcggatgaccgatttaaacggcaaaggtttctttgtttctgaaacaaacaaacaaagcctatttaataagattgaagctctgttaccgcaagtcgaggtcgttgcaatagctggtagcctcccgcaaggttttagtattgatgagttacaacaacttattcaactgatcaaaaaaaataataagaaagttgccctagataccagtggtaaagcattggttgctgcaattgagtgtcaaccttggatgatcaaaccgaataccgatgagttggttgaaagttatcaacgtcctgcaacaagctatgctgaacaaagaaaactttttgatagcttaaccaatattgagcatgtggttatctcaatgggtgaagatggcgtaaattggttacacgccactcaccccttacacgctcaagcaccaaaggttattgtaaaaagtacagtaggcgctggtgattcactcttagccggcatgatccatggacttgttaaccaactacctcctgaagagactttaaaaactgcgacagccattgcaagccatgctgtaacacaaattggtcttcgaatccctacttctgaggttctaaaccaattaaaagcacaaactattatcaattcattgagtgaatctgatgcaaactgctaa

SEQ ID NO: 44359 - DNA, 867 bp, Acinetobacter baumannii
atgacaacattaacatttcaaaacgtgaagcatattttggctgcatctttactgagtttgggtttggttgcatgtgataaaggaactcagtctactgaaaaatcggccgataccacacaaactacgtcaagtattgaacagatcaaaaagaatggcgtggtacgaattggcgtatttagtgataaaccgccgtttggatatttagatgctcaaggtaaaaaccaaggctttgatgttgagattgccaagcatgtcgctaaagatctacttggtgatgaaaacaaagtagagtttgttttaacggaagcggctaaccgtgtcgaatatttaaaagccaataaagtcgatattatttttgcaaactttacggttacaccagaacgtaaggaagtggtcgattttgctaagccttacctaaaagtggcgctcggtgtggtttctcctaaaagccatccaattaccgatgtggctcaacttaaagataaaaccttgctggtaaacaaaggtacaacggctgattctttcttcaccaagactcatcctgaaattaaactacaaaagtatgaacaaaacactgaaacttttgatgctttaaaagatggacgtggtgctgcgcttgcccatgataacttgctggttttagcttgggctaaagaaaatccaaattacactgttggcattaccaatttaggtgagcaggacttaattgcaccagcagtgaaaaaaggtgataaagagttattgaactggttgaatcaagatttagagaaactggcgaaagaaggcgtaattcatcaggcttatgaaaaaaccttaaaaccagtctatggcgatacgattaatccaaaagacctattggttgagtaa

SEQ ID NO: 44360 - DNA, 861 bp, Acinetobacter baumannii
atgtttaaacgtaattcaataaaaatattaagcagtcttgctgttgctggggttttattaactgcatgtagtaaaacgccatcaactgaacaggcaagtaatgctcaagaagaccattctttagaacaagtcaaaaaaaatggggttctacgcgttgctgtttttgccgatgatccgccgtttggttatgtagatagtgcaggtaataatcagggctttgatgtggctttagcaaaacgagtgaccaaagacttgctcggtgatgaaaagaaagttgagtttattgtgactgaagcttcaaatcgggtggagtttttaaaatcaaaccgtgccgatgttgtattcgcgacgtttacagtaacccctgaacgtaaggaagttgtcgattttgccgagccttatttaaaaggggcttttgggattgtctcgcctaaagccaagccgattactgacattgctcaattagaaggtaaaactttaattgtaaataaaggcacaagttcggatacctactttaccaagcattatccaaaagtgaatttactcaagtttgagagaaactcggatgccttcaaagctttaaccgacggtcgtggtgacgcaatttcacaagatagtacttatgctttggcgtgggccgcgaagaacccaagttatgttgcaggtattcagtctattggtgatcaagagtttattgcaccggcagttaaaaagggcaatacccaactattgaattggctcaatactgaaattaagcagctcagaacaagtggtgaaattaagaaaatttatgatgaaaccttgaagccaatttacggtgactcagtcaatccgaatgtttttttagatgtaggtcaataa

SEQ ID NO: 44361 - DNA, 732 bp, Acinetobacter baumannii
atgcctttgttatcgatacaacaattacagaaatcatttgcacaaagtcatattttacagggcattgatctagatgtagaacaaggagaggtggttgttattttaggtccatcgggctgtggtaaaagtaccttattgcgctgtattaacggcttagaaccgattcagggtggcgagattcgtttaactggctcaggtgttttgggcaaagatgtggactggactaatgctcgtcaaaaaattggcatggtttttcagaactatgagttatttgggcatatgaacgtcattgacaatattttgcttggaccactcaaagtacaaaaacgccaccgcgatgaagcagaacaagtagcagatgagttgctaaagcgagtgggactgtttgagcgaaaacttgattatccacgacagctttcaggcggacaaaaacaacgtatcgctattgtgcgttcactggtcatgcaacctaaagtcattttacttgatgaaattaccgctgcgcttgatccggaaatggtcagagaagtgcttgatgtagtccttaaattggcgaatgaaggaatgaccatgttgattgtgacacatgagatgtcctttgcgcgcaaggttgctgaccgcattatttttatggataagggcaagattattgaacaggcttcaccagaagagttttttgaacagccaaaaacagaacgagcgaaagcctttctaaatattttgtcgtactaa

SEQ ID NO: 44362 - DNA, 666 bp, Acinetobacter baumannii
atggaacttgattatttatttcaagcgagtcacctcgaacgtttaatgtggggactttgggcaactgcaaaaattgcatttatttcagtgtttttctctgcaattttcgggacagtcttcggcgtcattatgacttctaagaatatagtcgttaaagcgctgtgccgcctgtatctagaagccattcgaatcattccaattttagttttgctatttgtgttttatttcggctttgcgacatggtttaactggcagttttcagcaatgtgggtgtgcgttgttgtatttgttttatggggtacggcagaaatgggcgatttggttcgtgcagccattacttcgattgatcagcatcaacgcgattcggcctatgcgctcggacttacccacgttcaagctttgatctacgtcatttttccgcaaagtctaaaacgagtaacaccaggcgcgattaatttgtttacccgaatggtgaaaaccagctctttggcagtcctgattggtgtggttgaggtcattaaagttggccagcaaattattgaaaattcgctgttgaccgtgccgagcgcttctctttggatttatggctttatttttattttgtattttctgatttgctatcccttatctcgtttggcagcacatttagaaaaggtctgggagtaa

SEQ ID NO: 44363 - DNA, 660 bp, Acinetobacter baumannii
ttgaactggcagtatatccatagtgtgttgccgcaatttttctctgcaactttgaccacgctgaaaatttcaattatcagcattattttggcaattattgtggggttaatttgcagtattttaatcacatatcgcgtgcgggtgctaaatagaattgcccagttctatattgagttatctcgaaatacccctttattaattcaactgttctttttgtattacggtttgccaaaactcggtatcaaaattgatggttttgcctgtggtgtgatcggactgacctttttaggcggaagctatatggctgaagcttttcgagcgggtttgcagtctgttgcaaaagggcagattgactcagcaaaaagtattggtctaaaaccgactcaaatttttagatatgtcattttccctcaagcgcttgccatttcaattccggcaataggggcaaattgcctatttctaattaaagaaagttctgtggtgagtgccattgctgttgttgagctgctttttgtcaccaaagacttaattggtatggactataaaaccaccgaagctttgttcttactcatcatggcttatctgattattttattgcccgtgtctattttaaccagctatctagagcacagaagtcggaaggtgagccatggaacttga

SEQ ID NO: 44364 - DNA, 285 bp, Acinetobacter baumannii
gtgaatattcaacaaaaagatgatacaaaacacggcagctttagtttacttgatggtgaaaccgttgcaggcgaaatgacttatacatgggcaggcgaaagcatgctaattattgatgccacagatgtaaacgaaaattatcgtggacaaggcgtaggtcgccaattacttgatgctttggttgcctttgttcgtgaaaaagacgtaaaagtaattccactttgcccatatgcaaaatcggtttttgataaagacccaagcattggtgatgtacttagaaaataa

SEQ ID NO: 44365 - DNA, 960 bp, Acinetobacter baumannii
atgagtacgcaacatgtttcttttcagcaagcttcaccaaacgagcaggctgttattctgattgtggatgatgtgccggaaaatttaggcttgttacatgaaagtctggatcaggcaggttatcgcgtgcttgtcacaaccgatgggttaagtgcaattgaaattgcacaccgatgcttaccagatatgattttgcttgatggcaatatgccacatatggacggttttgaaagttgtatacagcttaaagcgagtccaattacgcagtttattcccgttatttttatgacaggtttgtctgagacagagcatattgtgcgtggttttcaggtcggcggggtggactacgtaactaagccactgaatattgaagaagtattagcaagagtaaaaacacatttggcacatgccaaactattgcaacaacagaaacaggtgattgatgcaacggaaacagccattcttgcgctagatgttcacggtaaaattgtgtggaaaacccaaaaagctagtgatctactaaatcaatatttacctgaattagaaggttttgaagcaggcttaaaagcttggttttcagacttagagcatgaaaaagaccctaaaaaattaaccagctgttcttattcaacaccatctcagcaattacagcttttattgcttacaccgtgggaaactgaaccaagtgtggcaaaaaattatctgatacagatcaagacaactacgccagctttggaaatggctgatattttaaaatattgcccgcagttgacacaacgtgaagcagaagtcatgcactggttgttgttaggaaaaaccaataaagacattgcagaaattttggagctgagtccacggacagtgaataaacatttagagcatgtttttgaaaaactttgcgttgaaaaccgaactgctgcggtggcgcatattaatagcttggtgcaagagtttcactaa

SEQ ID NO: 44366 - DNA, 3465 bp, Acinetobacter baumannii
atgagtgttatgccagattcttcacgtccccaacaagcgccacaacgtgtgatcaaaacacgccgtgaatataatatttgggtggcagatgaaagtatcgaagattatgcactccgctatgcacctacctcagtacgaaaatggtcgccttggacggtaactaataccgcaatctcgaccgttagttttttggcgatggaagccattggggcaaccatgctttggcaatatggctttagcaatgcagtatgggcagcaattgtcgtatgtaccattatatttttaaccagttggccgattagttattacgccgcaaaatataatgtagacgtcgatttgcttacccgcggtgcaggttttggctatattggctcggtcctgaccagtatcattttcgccagtttcacctttattttctttgcccttgaaggttcaatcatggcgcaagggttattgctcggtttaggcattccgcaagttattggttacttaatttctgccttagtgattttgcctttagtggtcaaaggcattggttttattaataaagttcaggcgatcacacaaccaatctggctcttattactgttattaccgtggttttttgtactttggaaacagccacaaattttaagtagtagcttgcattttgttggggcggtttcaaactcaaccgattttaacctgtattactttggtgcggcgtgcactcttattttttcatttgtgatccaaattggtgagcaagctgactatttacgtttcttaccacaaaaagaaaagaacagaactgcatggcgttttgccgtttttttaggtggtccatcttggataatttttggatttttgaaagttttgatgggcatgctgctgatggtgttggcttttcagctgtttactcctgtctctgaactagacaatccgacttatttatattgggttgcttatcagcagtttattccaaatcctcagctagctttaatattaactttagcactggtttgcttggcgcaaattaaaattaatatgaccaatgcctacgctggttcattggcatggtctaacttctttgcgcgcttaactcatagtcatccgggacgaattgtctggcttctttttaacgtttttattgccattgttttgatggaaatgggaattagccatgcggttgaacgtattttgggactatatagcaatatcgctttggcatggattggtgccgtcgttgccgatttaattatctgtaagcctttaggtctaagtccgaagggaattgaatttcgccgtgcttatttatacgacattaaccccgtaggtgtaggtgcgttacttatcgcttcagtgttatcgatgctgagctatttgggctttttcggtctcatggcgaaaggtttagcaagtttcattgctttggggagtgcggtgttatgcgttcctattattgcttacctaaccaaaggcaaatattacattgcacgccagcctgaaaaaattcaggcgacttcagttgctaactgtgtggtatgtgaaagggactatgaactcgctgatatggcgggttgcccagcctataacggtacgatttgctctctatgctgttcacttgaagcacgctgtcacgatttatgtaaacccgatgcacgttggtcggtacagctcaaaaaagccatttggcactatttaccagaacgttgggctagccgtttaaatagcagggtcagtttgtatttattactgactttagggctgtcgatcgttttggcagtaagtttaagtctggtttatatccaagaaaaaacctatttagaaacaatcaatgcggcagccgttccacagctctttacactgtttgtgaaaatttacaccattttatttttattgatgagtgttgctgcatggtggttagtgttaaacgatgaaagccgacgtaatgccgaaattgagacacaccaacaaacagcattattgattgatgaaattgctgcccatgaagtcacttcaaaagacttacaagacgccagaatagcagcggagcgggcaaatgacgcaaaaagccgttatgtcattggcattagtcacgaactaagaacacctctaaatagtattttgggctatagccaattgcttcaaaaacaagagcaactctctgaacaaggcaaaatggcgctcggggtgattagccgtagtggccagcatctgacttcactcattgacggtttactagatttagcacgcattgaaacaggcaagatttctttaaatgtagtggacgttcatttccccaattttattgaacaaattattcaaatgtttcaaccacagtttgaacagaagaatttacagtttgtttatgaaattggagagaacctaccgcactatgttcgtaccgacaaaaaacgcttagaacaagtgctcatcaatttgctgggcaatgctttaaagtttacaacgagtggcacaattactttaaaagtcgagtaccgttttcaaacggcttattttgaaattagagatacgggctgtggtattgccgaggcagatttagagcgaatctttaacccgtttgaacggggcagtaatgtggttcaaggcggatttaccggaacaggactcggactacccattgtaaaattattagtcgatttactcggcggacagctatctgtgactagtcagctcaatcagggttcacagtttaagattaagttttacttaccttcaaaagaagtagttcatccaatttctaatgtttactccaaccaaattacgggttatcagggcgagcgtaaacgaattttggttgtcgataatgaagcggtggaccgaggcctagtcgctaattttctaaaacctttgggatttatgattgaagaagccgagtcgggtattgactgtttaagacgtgtacctatttttcagccgaacctgattttgatggatttaaatatgcctttgatgggcgggtgggaaacagcacgattattgcgtcagaataatattaccaatgtgccgatcttaattatttcagccaatgcaggcgagcgcgaagtcaatccacaagatgcggtcttaagtgaagactttatgctaaaaccaatcgatctcaatttgttgctgagtaaaattggagacaagttgggcttggtgtggattgattccaaatcagagacactccttgaaaataatgatgttcaagcacttgatgtaaaggtgtttaagcaagagcaagtcactgttcatacgctaatccaacaaccggaaaataatgagctgctcgattttccgcaaagcttacaacagttaaatgacttgattggacaggggtacattcgtggaattcaacagactttaacgcaatgtcgtcaaaattttccaaagcataacgagttatgggaacagcttgaacaggcgattcaaaaatttgatttaaaacacgcccaacggttaattcaggataagcaatga

SEQ ID NO: 44367 - DNA, 1617 bp, Acinetobacter baumannii
atgagtgtatctgaacatccaaatctggacactgtacaaggtacagattcacaaaaagcagtgaatgaaaccttagaagattatactttacgttacgctccacacagctttcggcgctggagtcccaaagttgttgctattactgcacttggtggtattgcctatcttgctgacttttctattggtgccagtattggtatgtcttatggaacaaccaatgctgttttctccattttatttgcagcgattattatcttcttaaccggcattcctttagcctactacgcagctcgctataacatcgaccttgacttgattacccgcggtgcaggttttggttatatcggttcggtcctgaccagtatcattttcgccagtttcacctttattttctttgcccttgaaggttcaatcatggcgcaagggttattgctcggtttaggcattccgctttgggcaggttacctcatctcaaccgttatggtcattccactcgtcatttacggcatgaaagctttaagtaaattacaagtctggactaccccactttggctcgttctgatgattggtccggtggcctatctgatttaccaagaacctaccttagttagccagtttgcaacgtttacaggtcatgaaggttttgctcctgtagatatggcagcgatcatgcttggtgcgggtatatgcttatccctcatcatgcaaatcggtgagcaaattgactacctacgcttcatgcctgcaaaaacaaaagaaaatagtaaagcatggtgggcagcggttatttcagcgggtccgggctgggtgattttaggagcgattaaacaaattattggggcatttttaggtttctatttactcactaaaataccgggcgtaaacagcactgaacctgttcaacagtttaatgcggcgtttcatgacatgcttccgggctgggcggctttaacacttgcggttattttggtggttatttctcaaattaaaattaatgtgaccaatgcttactctggttcccttgcatggacaagtgcctacactcgtattagcaaacattatccgggtcgtattgtctttgtgatcgtaaacttggcaattgcgcttgctttgatggaaggcaacatgtttgcggtactgggtaaaatcttaggattctattcaaactttgcgattgcatgggttgtggttgttgcaacagacatttcaatcaacaaatatgttttaaaactttcaccgaaagagccggaataccgtcgtgacatgctctacaacgtaaaccctgtcggtatggttgcgttccttgtatcagcaggtttatcgattgcagcattcttcggattattgggtaatttcctagcgccttactctccaattattgcacttgtacttgcctttgtattaacaccaatcatgggcctattaaccaaaggaaaatactacatcaagtcacacgatgacggcgttaaagaaccacgttacgatgctgaaggtacacctgtagcaactgtttatcactgccgcgtatgtgagcaaggttatgagcgtccagatattatgttctctcataaacataacggtacaatttgttctttgtgtaaaacactcgatgcttaa

SEQ ID NO: 44368 - DNA, 456 bp, Acinetobacter baumannii
atggaccgcatagataaaaagattcttgctgaattgcaattaaatggccgattatctatcactgagttggcagaaaaagttggtttgagcatttcaccttgtcacagacgagtgaaggctttagaagagtcgggagctatcaaaggctatcgggcagaactcgacccaaacttagtcggttttgagttctcagcaattgtttttattacgcttaaagaaggcgataaacaggcggttgagaagtttgaaaatgccgtgattgagattccgcaaattattcaggcgcagcgtttgtttggtgaacctgactatttactccatgttgtcgctaaagatttaccggcttttcagcgtttatatgacgaaaaattatctgctattccaagtgtgcaacggctcatctcaaccattgtgatgaaagatgtggtgcctgaacgtttatttccgattggttaa

SEQ ID NO: 44369 - DNA, 612 bp, Acinetobacter baumannii
atggcttttaacatttttattgcattttggagtgtctccattctttttattattacgccaggggcagactgggcctacgccatttccgcaggtattaagggtaaagttgtcgtacccgctgttgcaggtatgctatttgggcactttattacgattttattggtagcggctggtgttggtctgcttgtagcaaataacccaactgcgcttatgattcttactgttgcgggttctgcctatttattatggatgggaataaatttattacttacccctcctactccgaacaagtctggttctgaaaaggctcagtcatggttgaaatgggctaccaaaggcgtttacgtgagtggattaaacccgaaagtttttttactctttttagcgctacttcctcaattcattgacaccactgcttcatggtcagtaacaacacaaattgtagcctttggtgttgtccacataattagctgcgcgattatttacttaatggtgggttatggttcagaggctattttgaaaaccagaccacaggcagcccaattagttggccgtttttcgggtggcttgatggtcgttatcgcgacgtgcttattgattgggcaaatttaa

SEQ ID NO: 44370 - DNA, 612 bp, Acinetobacter baumannii
atgccaaagaagaaagaattcgagcatggcggtgcacgggaaaacgccggccgtaaagcacagttcaatgaacccaccaaagtgattcgtgttcctgaatctcaagtcaactttatcaaaaattggttactgaataatgtcaaaaccaataaccagacagatttcacttcaaaactaaagatacagcaggttcatccgaacaacgataaaatttaccacattcctttggcgacagaacgtgttgctgcgggtttcccatcaccagcgcaagatgatattgagcaagcactcgatttaaatgaatatttaattagaaatgaaaatgccacctttattgtcaaagccaattcgttgtccatgttagatgccggaattgatattgatgatccgcttattgtggaccgtagtattcctgctaaatcgggcgatattgtgattgcacttatcgataatgatttcactgttaagcgcttaataattgatacccaatttcagccccctaaagtgtggctaaaagcagaaaatcctgattatcaaaatatttatattgaagaggggcaagaactggtgatttggggagtagtgacctataacctcaaacgaatgagataa

SEQ ID NO: 44371 - DNA, 237 bp, Acinetobacter baumannii
atgaaaaatcaacgtgatgcagttttaggttatgcagatgaacaacatgcctactatatccgtcttattgaaaatgatgcggtattaggcgaaagctatggaattttctgtgaaaatccggaaagtgaagcagccgaaagtattatgacgacactatttttaaagaaatcattttggttaaatggctcagaattcacagatattgtaaaaggcttacatccccttacccactcataa

SEQ ID NO: 44372 - DNA, 1170 bp, Acinetobacter baumannii
atggctaatactagatatgaagatgataacaatagttcaggtacttcaaatcgtggatttgcaagtatggatcctgaaagagtcagagaaatagccagtaaaggtgggcgagctgcacatgccagtggcaatgcgcatgaatttacttcagaagaagctcgtgaagctggccgtgctgcacatgccagtggtaacgcacatgaatttacctcagaagaggctcgtgaagctggtgctttaagtcataaaaacgatgatcgtaatggtcgtggtcgcagccgttatgatgacgacgaagatgatgaccgcggccgttcaagtggtcgaggccgtggccgcagtcgttatgatgatgatgacgaagatgatgatcgcggtcgctcaggcggtcgaggccgtggtcgcagtcgtgatgacgacgacgaagatgatgatcgcggtcgttcaggtggccgaggccgtggtcgcagccgtgatgatgacgatgaagatgatgatcgcggtcgttcaggtggccgaggtcgaggtcgcagccgccgtgatgatgacgatgaagatgatgatcgcggtcgttcaggcggtcgaggtcgtggccgcagccgccgtgatgacgacgatgaagatgatgatcgcggtcgctcaggtggccgaggtcgtggtcgcagccgttatgatgacgacgatgaagatgatgaacgcggtcgttcaggtggccgaggccgtggccgcagccgtcgagatgatgatgacgaagatgatgaacgcggtcgttcaggtggccgaggtcgtggccgcagccgttatgatgacgacgatgaagatgatgaccgtggccgttcaggtggccgaggccgtggtcgcagtcgttatgatgacgacgatgaagatgatgatcgcggccgttcaggtggccgaggccgtggtcgcagccgtcgtgatgatgatgacgaagatgatgatcgcggtcgttcaggtggtcgaggccgtggccgcagtcgttatgatgatgacgatgaagatgatgatcgtggtcgttcaggtggccgaggccgtggtcgcagccgtcgtgatgacgatgacgacgatgatgaccgccgtggccgttcagatggtcgtggtcagaactctcgtaatcaaaaacgcgatgcttatggacgctttacgccttaa

SEQ ID NO: 44373 - DNA, 414 bp, Acinetobacter baumannii
atgatgcaacctattcatacacactcaacgctacaatatattcatatttctgtacctgaaatcttactcagtaatattcaaataaaaaattcttggcaagattataaccaagaatggagctatagattagacccgcctcacgcaagccatccttttcagagagacttgtatattattaaatcaaaaaatattgaaacggaagatataaaaaaattactagataatacagttgttaaaaacagtaaaaataaagatgacttaaaaaatatagtcgaagcggaaacagtaataaaagaaattttagatttatctaattatatacctatagaaaattggctaaatgatacaggtaatcgatcaattgttgaaagtatgattgataaaaacaaggttaagttattagatattatctaa

SEQ ID NO: 44374 - DNA, 879 bp, Acinetobacter baumannii
atggaaaatacaacgaatcagtatccatcagaagttcctgcacaagttcaacctcatcaaccaggtgatcaggagaaaatgcatcctgaaccagaaattattaaagcatctcataaaggcagtgaaaaactaaaaggcaaagttgccgtcattagcggtggtgatagcggtataggccgttcagttgccgtactatttgcccgtgaaggtgccgatattgctgtactgtaccttgaagaagaccaagatgccgaaattactaaacagcttattgaaaaggaaggacaacaatgtcttttattaaaaggtgatatttccgatccagaccttgcaaaacaaaatattgataaggttctacagcattttggtaaaattaatattttagtaaataatgcgggtgtgcaatatcaacaaaaagaaattgaaagtattagtaatgaacaattagaaaaaacatttaaaacaaatatttttgccatgttttatttaaccaaagaagccattccttatatggaggaaggcgatagcattattaacaccaccagtattaccagttaccaaggtcatgatgagttgattgactatgcaagtactaaaggtgcaattacctcttttactcgtagtctatcgaacaatttaatgaagcagaaaaaaggtattcgtgtaaatggtgttgcaccaggcccaatctggactccccttattccaagtagtttcgatgccgagactgtcgaaaagtttggtaaagataccccaatgggtagaatgggtcagccaagtgaagtcgcccctgcttaccttttccttgcctcagatgatgcaagttatattactggtcaggttattcatgtaaatggcggccaaattgttaatggctaa

SEQ ID NO: 44375 - DNA, 2139 bp, Acinetobacter baumannii
atgaacgacaatactaaatcaaccaataaaacaagtgaaatggctggtgccgatgcagcaaataaagccaatactacccagaaaactgaacagttagacacagttagagatgatgcaactaatgaagctttaaccacaaatcagggggttaaaatagcggataaccaaaatagcttaagagcgggtattcgtggctcgactttattggaagatttcattttaagagaaaaaatcacccactttgaccatgagcgtatacctgagcgtattgtgcatgcgcgtggtgtaggggcacatggttattttcaggcatatgaaggaaacgaacgtttaaccaaagctggattcttgacagacccaactattcagacgcctatttttgtacgtttttcaacagtgcaagggcctcgtggttcagccgacactgttcgtgatatccgcggttttgccattaagttttatacccaagaaggtaacttcgacttggtaggaaataacgcacctgtcttttttgtgcaagacgggattaaatttccagactttgtacatgcggtaaaacctgaaccggacacagaaatcccaacaggtgcaactgcgcatgatactttctgggattttgtgtctttagtacccgagtcagcacatgctgtaatttgggcgatgtcagaccgtgcgattcctcgtaacttacgttcaatccaaggttttggtgttcatacattccgtttaattaatgctgaaggtaaatcacattttgtgaaatttcactggacaccaaaacaaggtttgagtgcgctggtatgggatgaagctcaaaaacttgcaggtaaagacccagatttccaccgtcgtgatctttatgaagcaattgagcaaggtttttatccagaatgggaactcggcgtgcagattgtcgaagaagaagatgaaatgaactttgacttcgatttgctggacccaacaaaaattattcccgaagaattagttcctgttacaccaattggccgatttgttttaaatagaaatgtagataacttctttgctgaaacagagcaggtagctttctgtccgggtcatgtagtacctggtattgattttactgatgacccacttttacaagcccgactattttcatacacagatacccagttaagccgtttaggcggaccaaacttccaccaaattccgattaacaaacctgtgtgtccattccataacaatcaacgtgatggtattcatcagcataccattcataaaggacaggctgcatatcaaccaaactcaattgatggaaattggccagcagaaacaccgccagcggcatcaaatggtggttttgaaagttatcctgaaaaaattagtggacataaacttcgtcaaagaagtgagacgttctctgattatttctctcaaccgcgactatattacaaaagccttgcaccgcatgaacaaaaacatgtggtcgatgcctatacttttgaattaagtaaagttcaaagaaagcatattcgtgagcgtcaagttcaacaaattttggcaaatatcgacctagatttggcacgtcaagtaggggcaaatttaggtattgaagtgcctgacttaaccctaaactataagaaaacagcagttgaaaaatctgccaagttatcttttttagctttcccacctgaagatattcaaggtagaaaagttgctgtacttatccataacatggtgaagtctgatgcattggaggctattaaaaactgggcaattaaagaaggcgtaatccttcacttactagcgccgagcttggctccagtcaaagatcataaagataacgttattgtggctgatggcatgcaaatgtctgagccttcaattgcctatgatgcggtaattattccggatggcgataacctaaatacggttatgcaagacggggtagctcgccattacttactcgaagcttataagcacttaaagccaatcgtatttttaggtaataaatctgatttgcttgaaccattaggtttagtggcggatgaaggaactttaattgaagatgagttccagcatgttacggaaaaatttaagaacctgattaaagcacaccgggtttggtcacgagaacaaatagccgcacatgtaccggcttaa

SEQ ID NO: 44376 - DNA, 1410 bp, Acinetobacter baumannii
atgcctgttgtagtgaaaaaacgattattagacttattacaagataatcaacaaaattattatgaattgtttgtttttttccttgatcctgatgtttctagctttgagaaagagaaaaaggctagagattttcttgttaaagagatagataaactagaaatgaaggaaatagattttccttcggatatcaatttgattaaggcatggtgtgaaaacgataataaaaaaaattgtcaggaatttcaggcatatttaaatcgtagacaatctggtcaagatagagagtattttaagaacgtcgctcaggcatttgagtttttaataaaggtgtctccaaccaaaaaagtagacggtgcatggctatatagctcagtgcattattggaatgatcctatttttcatgaattaattattacttatctcgaagagcttgggttaggtgagccaaaagcaaaccatgtctgtatctatgatgaccttttacgcagtctagggctagacagtttcgatctgcttttagaagacgaatattatcatcaagcagttgtgcagcttgctctgggttatgcgcctcctgagtttattcccgagattgtgggttttaatttaggctatgagcagttaccactgcatcttttaatttcgaattatgagcttgctgaactaggtattgattctaaatactttaatcttcatatcactatcgacaatattgacaatggtcatgcctataaagccattaaagttattgaagatatttataataaatatagagataaagaactcttcttgaccaagctaaaacgtggttttgcccttaataatcatggggtgtcctcttcaaacattataaaaaatttaaatactgaagactttgtccatagaattttcaaaagaaaggcgcttgtcggtcagttaatccataacgaaaccagacagtttgggtgcaagaccattaatcaatggttatcaaatcccgatgacattgcaggtttaatcactcatttaactgaacacaaatggattaagtttaataccgaccctgaacagagcgtattctggcgaatgattaatgaagaaaatggaaaaatgtttggggtgtttaaccctgtagagcgccaaattattcatgactggattgctggtagtggtcattcttctagcttcttggcatacagcagagaactaaagaatagccagcgtattcaggactatttatttagttatatctcggatggcgaacttgatgcactacaagagcgcgtccaacaatcaagtgaccttgccataaagatttgcaaacttactccgtttcttgccccagattctcatcataaaagtattggtctttggagtactcgtaaatacgtagaactcctttttccttatttaggtacgtttaaaaactag

SEQ ID NO: 44377 - DNA, 480 bp, Acinetobacter baumannii
atgttcaataaatgttgcgaattattagcaaaggaaaaaattaaaattgcattttttgaaagcgcctctgcaggctaccttgcttatcgtttctctttaagtccttattcaggcgatattctgattggaagccttgtgagttacgaccttcacgtaaaggaaaataccttacatatttcagaagagcttattgaaaaatatactgcagaatcaatgcaagtaactgttgaaatgattaataaaggtaaagaacttttacatgctgacctgtatgttgcctgcacaggtcttttgaaaaaaggcggctctgaaacaccagaaaaacctgtaggtactttcttttactcaatatattataaaaataatttttataattttagacgtgttttaagggggcctgcctttttaaaactaagaaagttgatatactatgttactcaagatataaaacttattatattagaagacaaaaggcgttaa

SEQ ID NO: 44378 - DNA, 222 bp, Acinetobacter baumannii
atgagcactactaataatcaagcaaatcaacgcaataatcagcaacaacaacaacagcaaaatgacaaccgtaatcaacagcaacacggtaaccaacagcaaaacgatcaacagcaacaaaataaccagcaacaacagcaaaatgataaccgtggccaacaacaaggatctaaccaaaaagattctggccaacaaaactcaaataacaaccaacaacgttaa

SEQ ID NO: 44379 - DNA, 318 bp, Acinetobacter baumannii
atgacagatcaaaatacagatcatgctcaattggtagctggcgatcataactattctgactctcgctggcgcgaaagctatcttactcgaccttattatcaagaagcgcaattaactacaccagatctagattatgatcgtgatttctctgcagcttatgaacttggtcatcgagctcgttctgaatctaaagaaggaactcagtttgaagatatggaaggtagcttgcagcaaaaatgggaagagctaaaagctgagtcccgcctaaaatgggaacacgctaaacaagcgattaaagatgcgtgggatgatatgtaa

SEQ ID NO: 44380 - DNA, 261 bp, Acinetobacter baumannii
atgtttgtatattttacagatggaacttgcattaatgattctgagatttatggcgtaaaagctaagtatgagcaaaataagtatgtagtggaagttactattaagccgacacatgtactcgctacaacaccgagcgtacaatttaaaaaagaagtttttgatgatccaaatttagcaaatcaatatcttagtcataattttaatatgccaccattttttgatgctcataatgttatgacaataaaaaagcctatttcctag

SEQ ID NO: 44381 - DNA, 354 bp, Acinetobacter baumannii
atggaagatcttaataatttgatgattgaactcagacaagaaataaaggggacaaaattaaagcttttatataattatattgattttgccgaaatactcattaaacctttgcaagagtcaaaaattaaattggatttaagtcttattcctaaaagtaaaaatactcaggagtttgtcctttggcttgctggttttattgagcgaattaccacaggtggacaagaaaaattacctccaattcgagctaaaattactttacccgcctatgcctatgaagaaacttacccttcgcagaaaaagcctgtaaataatggggaagaaataattgaatattttaaaaaaaatcaaagttaa

SEQ ID NO: 44382 - DNA, 132 bp, Acinetobacter baumannii
atgactaaaattatcgctaccctaggtttagcagcaatcgtttcgctttctgtggcggcttgccaaggtgagaatgatactaaacagcaagataaaaccacgactccacactcaatggataaagactcctaa

SEQ ID NO: 44383 - DNA, 1113 bp, Acinetobacter baumannii
atgaaaataaaattatcgaaaatagtaatagccggctcattattgatatttgcaaatatgagttatgcagagggagtaaaacggttttctgtctcggcaggttggttacatgtaatgcctcaaggtaaagctaatccatttaatatcaatacaagtgttaaaaatggaacagttgctaaagttggaagcatttcgccgaccagtttcttaaactccgttgatcctaatgctacagaggtagatgtaggcggtgaaccttttaatcaaaaagagtttcttgaactcgctttaaatgatgactttttaaaagggctcttacttgatgaagaaggcaatataaaacctgaagtagcaggtgaggcaacgattcaagggttagagcagtggcatcaaaatgatgccggccttgaagtagatgacacagacacattagggcttatgtttaactattacctcaatgacaatgtgtctttacaatttattggaggcattccccctaaagtcgatattaaaggccaaggtgaaatcttggcaccattaagcggtgtcgcgttgtcaccaaatgaattagttaaaattctttttccgaacggcattaccttaggtcaagcagtcccgattactaacttaggcaataaacctaaagcagctagtgttcgtgcttggacccctgcaattgaagcacaatatcaatttgggaagagtggcgtgaacaagtttagaccttatttaggtgtggggttaatgtatgctcattttaatgatattaagctaaatgacgaaattcgttctgacctgatctctgcaggtcatatgattcaaaatgtgttagatggtaaggctggggctgccttggatcgtaaagagtcgagtggaaatatggtggttaaagtagatgcagatgatgcgattgcgcctatatttactgccggttttacttatgattttaatgattcttggtatacggttgcctcagtatcttatgcaaaactaaataatcgaacgcaaattgatgtcattaaccaaaatacgggcgctcgcttaattcatgggtcaactaaagttgatattgatccgatcattacatatttaggggtgggctacagattttaa

SEQ ID NO: 44384 - DNA, 2157 bp, Acinetobacter baumannii
atgcaaaggactacgaaacactttcaaattaatgcattagcacttgcaatagcaatgagcacaatttcagcgcatgcagagactgatcagcagacttcggaatatggaactcttcctaccattaaagtaaaagctggaagtggccaagaaaatgaaaaaagttatatagcagggaaaacagatacagcggttccactgggtttatctgttcgtgaggttccacaatctgtttctgtcattactcaacagcgtttacaagaccagcaattgtcaactttggttgaggtcgccgaaaatgttacaggggtaagtgtcaaccgttatgaaaccaaccgaggtggaatctattcacgtggttttgtagtagataactatattattgatggtattcccaccacatatagcttgccttggtcttcaggtgaaattttctcaagtatggccttatatgatcatattgatgtagttcgaggggcaacaggtcttacatttggtgctggaaacccatctgctgcgattaatatggttcgtaagcgtgctacgagtacagagccaacagctaacgtagaagtgagtgcagggagttgggataattaccgtgttatgggtgatattgccaactcccttaatcaatcagggacagtacgtggacgagcagtggcccaatatgaacaaggcgacagctataccgacttgttgtctaaagaaaagctatctttactgttaagtgctgaagcggatttatctgaaaatacccttttatcgggtggggtaacttatcaggaagatgatccgcgtggaccaatgtggggaggtttacctgtctggtttagtgatggcacaaaaacgaactggtctaaaaataccactacaagtgctgactggacacgctggaatgttaaatataccaacctatttgcagatttaactcataaatttaatgacaactggtcagctaaactatcttattctcatggtaagcgtgatgctaattctaagcttttatatgtttcaggtagtgtagataaaaatactggtctagggctatctccttatgcatcagcgtatgaccttgaggtagagcaagataatgcttctttgcagttcaatggtagttttgatttgtggggcttagaacaaaaggttgttttgggttatcaatattccaatcaggactttacagcatatgctcgttcaactgatacaaaaatggaaattggcaatttctttgaatggaacggcagcatgcctgagccagtgtggaatgcacctacactcaatgagaaatataatattgaacaaaatgcactattcgctgcgacttatttaaatccgattgagcctctaaaatttattttaggtggacgttttacaaattatgaaaagaatatatatggtcgtaattcatccataaaatatgaccacgaatttgttccttatgcaggggttatctatgatttcaatgatgtttatactgcttatgcaagttataccagtatttttcagcctcaagacaataaagactttgatggaaactatttagacccggttgagggaaacagtactgaagtaggcttaaaatctgcatggtttgatggacgtttgaatggtactttagcgctttatcatattaagcaagacaatttagctcaggaagcaggacaagttactcgtaacggggtaaaagaaacctattatcgggcagcaaaaggtgcgacgagtgaaggttttgaagttgaagtaagtggacaaatcacaccagactggaatattacagcaggttatagccagttctctgccaaagatgcaaatgatgccgatgttaatacccaacttccacgcaagatgattcagtcatttaccacctataaattagcgggcaaattagaaaacataaccgtgggtggcggggtaaattggcaaagcagtacttatgttaatgctaagaatccgaagaaagttattgagaaagttgagcaaggagattatgcacttgtaaaccttatggctcgttatcaaattacaaaagatttttcagctcagcttaatattaacaacgtatttaataaaaaatattacggtgtttttccggcgtatggccaaattactttaggtgctcctcgaaatgcggcgctaacactacaatataagttttaa

SEQ ID NO: 44385 - DNA, 507 bp, Acinetobacter baumannii
atgaatatttttattcgcgatgagcgagaagaagatattaaagaaattgaagaattgactaaagcggcatttctaaatgctgaacatacaagccatactgaacactttattgttaataatttaagaaagcacaaacaacttacagtctctttagttgcggttgaagataatactattgttgggcatgtggcaatttcaccagtgcaaatttcatcaggtgaaaagaattggtatggcttaggacctatttctgtcgcgccgaataagcaaggacaaggcattggatcattgcttatgaatagctctttagaaaaattaaaaaaattaggcgcaaaaggttgtgttttattaggtgatccaaagtattacagtcgctttggttttaaggcataccctgacctaaaactacctggtgtgccccctgaatacttccaagccttaagttttcaaaattatgttcctaaaggtgatgtaagctaccatgaagcatttaatgcccaagaatag

SEQ ID NO: 44386 - DNA, 384 bp, Acinetobacter baumannii
atgaagcgccttattatattatttctattagcttatgctacaagctcctttgctcaagtgccattcgaagtcagtaaaagttgttttgtagtgaatggtagaaatattactgagccttgcttactttcttctacaaataactcgacatctaactttgaaagattaacttttgctaatacaaaagtttttattaaagaatcaaatatttgttcaaataacgattcatgtgtttctgtaggaagtaatttgtcgaatttaaaagatgcgactatttattatcgtgatttaaaaactaaaaaaattattgaaaaaccggaaaaggattcgtggacctgctttaagcaaacaattgataaattagacttttgtatttcttataattaa

SEQ ID NO: 44387 - DNA, 282 bp, Acinetobacter baumannii
atgaaatgttcatatcaagatctagatggaaatatagtcgaattaacttgtgaaagttatatacatataccgtcaggtgccagtggaaacaaattgggaatagataatagggcagaagacttaatacatatcactgaagattttagtttttttaagaaaacagaggcagattcaataccactctatcgattcgctgtagatgctaattacaatgtttttaatagtgatgagctaccagccttggcccaaattggaacagattggaaagtgcttaatgaataa

SEQ ID NO: 44388 - DNA, 471 bp, Acinetobacter baumannii
atgccaaaatttctaataattgccgagaaggtttataaaaaactagaagaagataaattgttttcagataacctgatcgaacaactaaataacttggtcagtattattcgtaaagagataaagggaactccctgtaaactcaaatacaattttatcgattttgaagaatgcctaagtaaacctttaagtgaatgcacgattaaactcgacatgagtttaatgcctaaatataaaaataaaggtgaatatattatgtggctagcgagctttattgaaagaatcacggttggcgggcagccaaaattaccaccactttcaagtattgtgccagccgactttaacgcaaaaaaagaagctcagacgatagttgaaaataaaaaatcagtatcggaagaaaatgcaaagatgattgtgaattattttaattctgaagaatatcagaaaaataataaaaaaataaatctggtttaa

SEQ ID NO: 44389 - DNA, 252 bp, Acinetobacter baumannii
atggctacagcaattgagaacagagctagacaacttaaaaacgctaaacgtggaggatatgcgccaaccattgccaaagacgtaaacaaacataaagtacaaaaaataaggagagctctagacgaagcccggcgatatgtgagtgaactaaatgacgaaacggttatctttgacgatcaggacgcaaggcaaaaggcagaaggagccaaagcaattattgaaatgtttgaagcagctttaagcggtgcgtga

SEQ ID NO: 44390 - DNA, 1236 bp, Acinetobacter baumannii
ttggatttttttaatttttatcgtgatcttcaagctgagttaagcaactatccttggctagaaatgctagtttcgctcacacttttgatcctttttgctgcattagcaaatttcattgctaaacgaattattgttcggggaatacgtcatttagtgactaaaattaagtcactcaaccagtcagtttttgcccagcatagtgtcattaagcgatttgccaatattgtgccggccattgttattatgaacggtattactaccgttccgcatttgtcggaaaaagcggttgctttggtacagatgggcgcacaagcattcattttcctcacgattgcgctcaccattagtgaattattaaatatatttaatttaatctatcagcgtaatccaaaatctagaaacaagccgattaaaggttatttgcaactcgttaaactcattatttttgttgtttgcggattaatgattttgggtacattcctgaaaaaggatgtatttacgttgttggctggcttcggtgcaatggcagccgtattaatgttagttttccaaaatacgattttgtcattggtcgcgagtgtacaaattgcctcttatgacatggtacgtattggggactggattgaaatgccatcgctcaatgctgatggtgatgtcattgatatttcattgcacacagtgaccgttcaaaactttgataaaacatacaccacgattccaaccaataaactagtgacagacacttttaaaaactggcgtggtatgagtaatgcgggctgtcgccgtatgaagcgttctctttatatcgatcaaactagcgtgcacttcatgaccgaagaagagcaacaaaaactcaaagatttcttattactagatcaatacctcaatgccaagcaatctgagattgacgaatttaataagcatttaggtagtcagtcacgttataacaaaagacgcttaaccaatataggaacatttagagcatatgttgaattctatttgcgccagcataagggtattgctcaaaatcaaacacttattgttcgccaactacaaccaacgagtgaaggtctaccattagaaatctatgcatttaccaataccaccgcatgggtttcttatgaagcaattcagtccgatatttttgatcatttgattgcgattttgcctgagtttggcttaagagtgtatcaggcaccttcaggccatgattttcagaaattaacagtagaataa

SEQ ID NO: 44391 - DNA, 2271 bp, Acinetobacter baumannii
atgggaaataagataaaaagtaataaactttttactaggaagtctgaagcaaaaaatatcattccacttctatcacttggtggagccatctttctctcaaattcggcctttgcagcctcgccttctgagacaacagatgctgaaaaaaaacctgaagcactccctacaattacaatcaccgcttcacgtgcagatgaactttctacatctgccaaacaagtgaccaagctagatgaaaaacaaattgaacttttaagaaatggttcatctggaaatattgcaactgttttagctaaagccgtaccgggcctgtctgactcaagccgaaccattaccgattatggtcaaactttacgtggtcgtaatgccctcatcttggtcgatggcgttccaatgaacctgacacgtgacacatcaagaggtctttcagctatcgaccctgaaagtattgctaatattgaagtcattcgcggtagtaacgcaatttatggtggtggcgcttctggcggtattatttcaattaccacgaaagcggctggtggcgaacctacagctaaaacagtcgttgggctacaaacacctttaacaaacttccgttctaatgctttaagtggcaatattcatcaatatttcacaggcagctttaacgcttttgactatgcactcgactttggttaccaacgtattggtagtccgtacgatgcaagtggtgaccgtgttgctccagaaccaagtcaaggagatttatatgattctgacggctatagcatcggcggtaagcttggttaccatattgatgacaaccaatatgttcagtttgctgcaaactactataatgccgagcaagattcagattatgcatctgacccaagtgtgaagaatgcccctgccggaaccgtaccagccaaagccattaaaggcttaaagctcaaagaccaaaataaaaacgaaaaccagatctacaatttaacctataaccataaagacttttttggcaataaggttgatgctcaaatttattaccgcgacttctttacccgtttttcaccatttgatgcacgtaaaaatccgaatcggggtggaaacgtagaccagatctatcaagaaaataacatactcggtagccgtttaactgttaccacaccgcttgagtttttaggtgacacctcactggtttggggtggtgactttagccgtgaaaaaagcgaaatgcctttagatactttcaatcctgatatttatgaccaatctggtggcctagagtttgtaaaaactggtaagctcatttatttacctgaacttaccacacaaagtgttggtggctttgtacagttaaaacatcgctttaatgaccaatggtcggctgaagcaggtacacgctatgaagatagctatgcccaaattgatagttttattccattatcacaatttgatcctaaaacacaatcatataagccaaacccttatgtatatcaaggtgggaaagtaaaagctgatgcatggttgtacaatgctaatgtaactttctctccaaatgaccagcactcgatttatgcatcgtttaaccaaggttttcaattacccgatgttggtgtaattattcgtaatgcagataatactgataagaaaaaaaattatgaattatcatcttcatttttagaacctgtaaaagttgataactatgagttgggctggaaagggaacttcaataacttttcatcaagcttagcagtcttccactctacttctgatctaggcgctgtgcagtctttcagcaatggtctggcacttactagaaccaaagaaaaagtcactggtgttgaagcaacttttgactatatggacgatgccaatgtttggggaactggtggtagtgttacgtggatgaaaggccgcgaaaaaccgcaagatggtgctgaacaagacatgacaggcttccgtattccgccattaaaactcacaggttatatttcttatagcccaacagaaacttggacaaaccgtttacaagctacttacttcggttcagaagattaccgcctaaacggcaagaatagttttggtcgctacgatgtaaaatcttatacaacagcagatttaatcagtagctttgcacttaataaaaaagacaccatgacgattggtttagagaatatgtttaaccgcaagtactatcctctatatagccaattattaagaacaagcgataataccagtcacttagttgcaaatggtgtgacgttaaaagtgacttatagccataagtggtaa

SEQ ID NO: 44392 - DNA, 555 bp, Acinetobacter baumannii
atgccaaatttagaagcttcatttagagcacttagagtgcttcacacagcaagagatttatttaaacaatacggatttcacaaggttggtgtcgaccgaattattgctgagtccaaaattaccaaagccaccttttacaactatttccactctaaagaaagactcattgaaatgtgcttaacctttcaaaaggacgggttaaaagaagaagtattttctattatttattcataccgtgaacttatggtatttgataagctcaagaaaatcttttttctgcatgccaacctcgaagggctataccgtttacctttacaggccatttttgaaattgaaaagttttatcccactgcctacaaggtggtggttgattatagaaactggttggtgacccaaatacatcaattacttttaaccattaaagccacagctacactcgaagacgcctatatgtttttgtttgtgattgatggggcaatggtccagcttttgagtaaagatagaatagatgaacgagataaattattagattattttttaataatgatgtcctag

SEQ ID NO: 44393 - DNA, 375 bp, Acinetobacter baumannii
atgactaatacttttaataactttgtcggggaaataatgcgtaattttttagtaacgattttcactttattagtaggaacatcaatttatgcgagtcaagaatctagaaatcttctagaacaaacacaatgcgaaaaggcagtagagctccatggttttttaagccgagctcaacttgactgtaactatcactattattcagaagagttaaaagaggctgccgcaaaatgtactaaacatgatctcggcgaaaaatatggtagagaggttatgaaatttgggatgaaggaatttgaagagcggaagaaagaggatacacaaggccacttttgtcataaggttttaaaagaattcccaaaatatattaaacaataa

SEQ ID NO: 44394 - DNA, 498 bp, Acinetobacter baumannii
ttggtttatattttgaacagcacagaatacacactagatcgcatagatcggaaaatattatctgccctacgtagaaatggccgtttaacggttgcacagctcgccgaagaagtcgggctttcatcttcgccttgttggactcgactcaaacgtttagaaagtctaaaaattattgaaggctataccgtaaacgtaaaccccaaagcgattggcattcatgagttgttttttattgaaattaccctagaacgccacgatgatgaaatgttagaaaactttagcgaggctttggcagatattccggaagtggtcgaagcgcatttagttacgggcgactatgattatttggtgaaagtggccgtaaaagatgccgagcattacgaacgttttttacgtaaaaagctctactcgattaaaggaatccgccacacgcgttcaacctttgctttacgaccacttaaatctgccaatactgccgatttaatgttgattgaataa

SEQ ID NO: 44395 - DNA, 558 bp, Acinetobacter baumannii
atgttaaatattaagaatattcaacaaacggttaaagtagcgactacagtggcagctttgatgtgcttttcttcactggcacaagcatatcaatatgagcaaaccgcgcgtttaattaacgaacgtttatcttatatgaaagatgttgcaggctataaggcagagcagcatttaccgattgaagatttaacacaagaaaagaaagtactcgatcaatcgctttctgaagccgacgcttttgggcttaacagcgaaacagtaaagccatttatagtggcgcaaatggatgtggctaaagcaatccagtaccgttatcgcgccgactggttgtcgagtctggaaaccaactggaagcctcaagacttaagcgaagtacgcgtaaaaattagcgctttaaacacggagctgctaaaaaatatcgcctatgaacttaagaaaaataataacaaagcgcctcatggctgtagctatatgtggcctgttcagcatcctcaacttaaagaagctgacaagagggctttatgtgtaacattgaataaaatcaaattaaaacaatga

SEQ ID NO: 44396 - DNA, 684 bp, Acinetobacter baumannii
atgctaaaaacaatatttcagaagtttcaaaaaaagcagggctgtgtggttattgcaggtcatgatatagaactactcgaccagaactttgtaattttagacaaaaatgagcaatctccattgcatgtctatcaagctgttcatgattctagcgttcagaatatacaagtaaaccgtgtaaatgatggcataacgagtgtccgtttaaacttagtgaataccgagcatttaaaaagcttactaaaatatattgctagccatagtcatagcattgagttatgcgtgtttcagccaaatttttcatctgcgccaaatattgaagctttatctttagaagaaattgagcacagttggcaaacaacgggtttaagcgcggtgagcgtgtcacaagcagtgattaaaccgatgctaaagcagcagcggggcactgttatttttcttggagccccatctaataattcggctcactacgatgtgttaagccaaagcatgtttgcgagtattcgagcgttatcacagtcattggcaaaagagtttcagcctaaaggaatacacgtgacatattgtatgttggaaaaatgggatgggcaaaaccagcactttatttcatctgttaaacaagtctgtcagcacatctatcaacaacctaacactgcatggagtcaagagcttagcgtgtcttga

SEQ ID NO: 44397 - DNA, 762 bp, Acinetobacter baumannii
atggcatcagcaacaccagataaaatacgagattgtgcagttgttattggcgttggggcatcacagggcatcggtgctgctgtctgtcatcgctttgcaaaagagggcttaaaagtttacgttgctggacgtactttccaaaaaattgaggcagtagctgccgaaatccatgccaatgcaggcgaagctgtggcatttcgtctagatgcagaagatatcaatcaagtacaggcattgtttgacaccatcataagtcagaatgaacgcattactgcagttattcataatgttggggggaatattccctcaatttttttacgcagtccgttatcgttttttactcaaatgtggcaatccacttttttatcagcctatttagtttctcaaagctgtttaaaaatatttaaagaacaaaaccacggtacgcttatttttaccggagccagtgcttcgttgcgtggaaagcctttttttgcagctttcactatggggaaatctgccttgcggacttatgcattaaacttagctcaaatttataaaactcaaggcattcatattgctcatgtcattattgatggaatggtggatggcgacagaattaataaagctttatttggtctaggacgtttcattcgtctcacacggggggcaggtggactcaatattaatgccatagccgacaactattggatgctctaccagcaaagccctgagctttggacacacgagctagatttacgtccataccaagaaaaattttga

SEQ ID NO: 44398 - DNA, 687 bp, Acinetobacter baumannii
atgtcggatattattttgcatcaatgggaaatttctccattttgccaaaaagttgcaagagctttgaaatttaagggaatcccatacgaaacgattaattacaacggcattcttggagcgaaagtacctttgctcagtaaagtgggcaaagtacctgttattgaccataaaggacagcgtatacaagacagtacccgtatcgctcgctacctagacgaaacctttccggatacacctcgactttatcccgaagacccaaatcaaaaagcacttgtagaactttgggaagactgggcagatgaatcactctatttttatgaagtatatttaagagtaaatgattcggaagctttagaagaagcaattcgtattagcagtattggccgtcctgcatatgaaaaacctatggtgaagggttttattttagctgaactcaaaacacagcttttctttcaaggcttgggcagaatgaaggctgaaaatgttgaagaagaatttatacgacaccttgaccgtattgagcaggttttatcacaaagtgaatggttagtgggtgagaatcaaacgattgcagacatagctgtagttgctcaacttggtgaggtcattcgtacaagtaagaagtttggtaaggaaatcttggatcgtccatttatggcagcatggtataaaaaacaaacaggttga

SEQ ID NO: 44399 - DNA, 1020 bp, Acinetobacter baumannii
atgtcattaaattttatgaataaggctcaaatagagagctataaaaaacttccacggtctttaaaatacttcataggcatttgcttattttatctcgtttatgcattttttagtcctgcacaagctgcttgcacggtaagcgggactacaaatagtacttttaattacactgcagcaaatattaatagtgatgcaaccgtaaacctttcaggaacaattacttgtacgaatttaggacttccccagatttctaattttatgtgtatgaaaaccgtatttacaggagcaactactgcgaataatagtgtgactttaccctatacagttactgcaactgtaggcggggctggctcttctactaccaaccaaacctccaatgtgtggtatggtccagtagcaacagtcgcatcaaataatattgtgagttactcggtaaatataaaagtaccagctcgaacagggtctctcattgcatatcctaaaggaacctatacggcttcggttcggttgtattgggatatggatcttttgggtttgtcatgtggcgatttacttggtggctgggattctggtgatacattactaacagcaaactttgtggtcccaagtctgtgccaattaaactcaacttcaactgtagatttcggcaatattaatgatattggtacgactaagcgtgattacacagctcaaggagcagtgaatactacctgcaactatggaacaccttatagcatttatttaggggatggaaaccaccgcatagctggtggttttaggcgtatgattcatgacaataatgattatattccctatcagctatataaagattctaactatagtacggtatgggatgccacaggaggtgtaaccaatgttggtggttcaggtggagtctcaaaaactggtacaggtagcgcccaaagtacacccgtttatggaaaaattccgcaaggcacttccatttcaactaaaccgggaaactattctgatagtgttgttgtgacagtgacttattaa

SEQ ID NO: 44400 - DNA, 2460 bp, Acinetobacter baumannii
atgaaatatattataggtgtcttatgtgttacatatcttcctgcatatgcttttgctgaacagttacaggacaatacgaatgtgccggttccaagtattccggatacgattgacagcaaaagtaaaaacacgcagataaagatgaatgaacaggagcaagataataacgttgcacagctttttttaaatatttctattaattccaacccttctgaggatttagtagccgtaagacaagatcaagataaaaaattatatatccgtgcccgtgacttaaaaactttaagactaaaaatggatgattccatttctgatagccagtggatttgtcttaatgagcttaaagatatccggtttaaatacttggagaatgagcagtctttaaacttacaagtacctcctcacatgatgacaggctattcggttgacttaaaagggcagcagatcaccagtccgcagctacttaaaataaagcctttaaacgctgcaatcctgaactatagcctgtatcacaccataactaatgatgagaatgttttctccggttcggcagagggaattttcaacagtgcgatcggtaacttttcgtctggtgtgttatataacggaaatgatgaaaatagttatagccacgaaaaatgggtacgtctggaaagtaaatggcaatatgtagaccctgaaaagatcaggatatataccctaggggactttatctccaatagttcagattggggcagcagcgtccgccttgcaggctttcaatggtcgagtgcctatactcaacgtggcgatattgtcacttcggcactgccacaattctccggttcagccgcactgccttcaacactggatttatacgttaaccagcaaaagatttattcaggacttgtcccgtcaggcccttttgatattaaacagctcccgtttatttccggaaatgaggtcacacttgtaactacggatgccactggacggcagagcattaccaaaaagccttactatttttcatccaagattctggcaaaaggtattaatgagttttcagtggatgttggggttccgcgctataactatggcctatactcgaacgattatgacgatgctacctttgcatcaggggcaattcgatatggttacagcaactcattaaccttaagcggtggggtagaggcttcaacagatggtttgtctaacattggaacaggctttgccaagaacctgttcggtattggggtgattaatgctgatattgcagcaagccagtataaagatgaaaacggttattctgccttgttgggtttagaaggtcggattagtaaaaatatttcttttaacaccagttaccgcaaaatattcgataactattttgatttggcacgcgtatctcaggttcgatatttaaaagataatcagagcgatgctgagtcacaaaactacctcaactacagtgcgctggcagatgaaatttttagggcaggaattaactataacttttatgcaggttatggggcctatctggggtataaccagattaaatatagtgataaccaatataaactgctatcggccaatttaagtggaagtctgaacaagaactggggattttatacctctgcctataaagattatgaaaatcacaaggactacggtatttactttgcgctgcgatatacaccttcgaataaattcaatgccattactagtgtttctagcgacagcggtagattgagttatcgacaagaaattttcggtttgtcggacccgcaaattgggtcatttggatggggaggctatgttgagcgagatcaggataaccacgacaacaatgcatcgatctatgcctcttaccgtgcccgtgctgcttatttggcaggtcgctataaccgaattggagataacgatcaggttgctctttcggcaacgggatctttggtagctgcagcaggacggctctttgcggccaatgaaattggagatggatatgctgttgtcactaatgcaggcccacaaagccaaatcttaaatggtggagtaaatttaggctttacggataaatcagggagatttttgattcctagtctcatgccatatcaagagaaccatatttatttagatccttcattcttgcccctaaattggagcgttaactccactgaacaaaaaactgttgtaggttatcgccaaggaacaatgattgattttggcgcacatcaggtcatctcaggattagtgaaacttgttgataaaaataactcaccgttattaccggggtatagcgttcaaattaatggacagcaagatggagtggttggctatgacggtgaagtgtttatttcaaacttattaaaacaaaacaaacttgtagtcgatcttcttgatcatggctcatgccaagttgactttacctataacagtaatcagtactcaactaaaaaattgggaccttatgtatgtcattaa

SEQ ID NO: 44401 - DNA, 705 bp, Acinetobacter baumannii
atgaaaaaaaacatttttattattacgggattattcttatctttatcgagcactatttatgccgctacaattcgtctttcacccgtaacggtggaaattttaagtaatcaaagtgcttcttcgattagtttatataaccagtcaaatgaaagtaccgatttacaggtgcgtgtatttgagtggagtcaaaacaatggacaggatcaattaacccctacggatgaaattgtggttagtccaccttttttaaaattacaacctaatgactcttataatttacgtgtagtgagggttaatccaacgccagtttctggcgaaaaaacttatcgtattattattgatgagctgccaaaacctatggatagccgcaaagttagtcaaggtgtaaatgtcttacttcgctcatcattacctgtatttgtagtgaataaagatgcgattactcaactaaattggaaaattgataatagtcaaaaaaccacttctttaaatatcagcaatattggaaacaggcatgcacttttaaatgacttaaaacttgtagatctaacagaaaataagagttactccattaaagtaaatacagtgaatggttatattcttgcagaacaatcacgaagctatccgattagtaatttttcatatcagcccgaccataaatacagtatttccttaacagttaatggtaagaaagtcacgctataa

SEQ ID NO: 44402 - DNA, 531 bp, Acinetobacter baumannii
atgaaaaagacttttttttatttatcagcatttgctgtaggattatcttctctcaatgcagccaatgccgctacagcaacaggcaccttgacggttagagctacagtaacaaatagctgtgtcctgaatacctcagctactggtacgacagctaatgcagttctagactttggcaccttaagttctctggctggtaatgtagacgcagatactacaactactggtggtactccaattagggtgttgtgtaacaacacagtgccatggactttgtcatttgatggtggacaaaatgttctatcaactcaacgtcgtatgattggtggcgcgtctactacagaatatattccttataacctttactctgacacaggacgtgctacggctattggagttgcaacaactgcttatagtggaacaggcacgggtaatgtccagacagttaacgtgtatggccgtatccctgctggtacaactttaccaagtgcaggtagctatgttgacactgtgacagtcacagtaacttattaa

SEQ ID NO: 44403 - DNA, 831 bp, Acinetobacter baumannii
atgaattgtgcaacaccaacggatatcactttttctttccgtggtttttctcaacgcgcaggaattacctctgaccatagtgatggttttggtattgccttttttgaagataaggcatgccgtttatttgtagataaccagtctgcagttgaatcaccaattgctgatcttattcgtaattatcccattaaatcacgtaatgtaatcgcacatattcgtaaggcgactcaaggcaaaattacgcttgagaactcacatccttttattcgggagctatggggacgtcactggatttttgcccataatggcgatttacatgattttaatccacccttaagcggacgttttacgccggtaggaaataccgatagcgaaagagcattttgttatttattagatcaactggtagaagtatttggttatgaagaaccaacgcttgagcagatatttgaagtattagaaaagatttctcctcaaattgcagaatatgggacatttaatttctgtttatcgaatgggcaagctttatttagttatgcgattactaaattacattggttagttcgagaatatccatttaataatgcacatttaattgatttagatgttgaggttgattttagtcaggtgacgactcctgaagatcgagttgcagtaattaccactgagcctttaactcataatgaaacatggattgcttatcaacctggtgaaatgattttatttcaacatggtaaacctataaaaaaagcgattactcaagttgaaagattaatacgtgaagagaaaaatcctgaacttaagcgtattactcgtgctgaccaatattaa

SEQ ID NO: 44404 - DNA, 783 bp, Acinetobacter baumannii
atgctggaaaaatttaatcaatatcgccaaacctggactttacctttaaatcgccataaggctaacaatcaaacacaattccgctttgaatgggttgataatttaaaagaattacaagatgtacaacggtttcgtgcacaacaatttagtaaacaattcggcattcagtttgaagataatttagatcaagatatttacgattttggctgtgagcatgctgtattaagagaaaaatggacaggagagattgttgcttatacacgacttaagctcttccaaggccatgaaatagggcaaagttacagtgctaatgagtttgacattgttccacacttgtcacatttgccaaatgtattagagatagggcgtacttgtgtgcatccacgttttcgtaatggtaaggcactttcaacattatggctgaatcttgcacctaaagtattgtggtcaatgcgcgctaaatatttgatgggatgtgtcagtattcatctgcaagataatttggctagagcgtactatacacaccgtcaaattcagcaattaccggacactaaaaccatcgatattcgttctaagaaaatctatgaacctgaatatccggagtttagtttccctcaggatgagcggatgccgaaactattccaaatgtatttgagtatgcagtctaaattatctaaagatgctttctttgatgctgaatttaactgtctcgattactttgtatttttagaagtgaataaaattgccacttcgtttgtaatgaacaaaatggctcagcgataa

SEQ ID NO: 44405 - DNA, 909 bp, Acinetobacter baumannii
atgccacaagatcagcatctcggcgtcgacaaagcaaaaatcttgattgaagctttgccatatattcaacgtttttctggtaagacgctggtggtgaaatacggtggtaatgcgatgactgatcctgaattggaaagttcatttgcccgcgatatcgttttacttaaaactgtgggtttaaacccgattgttgtgcatggcggtggcccacaagttgactctttcttaaagcaattaggacgtgagtctgaccgtattgatggtatgcgtgtgaccgatgaagctacgatggaagtggttgaaatggtcctaggcggtagtgtaaacaaatctattgttaatttgattaataaacacggcggccgtgcaattggcttgactggtcaagatggtaacttattacgtgcccgtaagttattaatggaaaaacaagaagaggacggttcgatcaaacatatcgacttaggtatggttggtgaggtgaccggagttaaaactgacgtattagagatgtttactcaaagcgactttattcctgttattgctccattaggtgttgatgaaaaaggtaatacttacaatattaatgctgacttggtggctgggaaggtcgcagaagcattaggtgcagaaaaattaattctgctgactaatattagtggcgtattagatgaaaacaaaaaccttttaactggtttaacgacacaagaagttgaccgtttaatcgaaacaggcgtaatttacggtggaatgattcctaaagtaggctgtgcgcttgacgctgtaaaaggtggtgttgtgagcgcacatattgttgacggtcgtgtaccgcacgcaacattacttgaaatctttacagatcacggggtcggtacgcttatttctaaccgtacacaaacgactcactaa

SEQ ID NO: 44406 - DNA, 1419 bp, Acinetobacter baumannii
atgaatgtaagacactcatttccaaaaaatattttccgtgcttacgatattagaggcaaactttcttatttaactacggacgtcgtccgttcaattgcctatggattggcacaacaatataaacaagcagaacaaactcagctgattattggttatgatgcacgcctgacgagtccggcttatgcgcatttaatcgaagagatattagtagagcagggtttaaatgttacaaatattggttgttgctcaaccccgatgatgtactacattgcacgggagtttggtggtaatggcataatggtaacagctagccataatcctaaatcagataatggtattaaatggattttaagaggtgaacctccatctcctgaaatgatccagcaagtaggtgaatttgcgcaaacttatgtacctactcatacaatttcattattagaattatcaactcctcaatttaattcagaattttgtaaaaaataccaacaagcaatctttaacgatattcaactcaagcgtcctttaaaagttgtattagatggcctgcatggatcggcagggcattgctcaaaactcgtacttgaaaaaatgggttgtgaagtcattgctttacgtacgactccaaatggtgagttccctgatcacgcaccagacccttcacatgctgcgcatttaaaagaactacgtaaaacgattattgaacagggggcagatattggtattgcccttgatggcgatggcgaccgtgtcgtattacttgatgaaaaagccaatatacttaccgctgaccgtttattgtcactatttgcacaaatgtgtctggagcagcaaccagacaaagaaattgtatttgatgtgaaatgctcactcatggttcaaagaaccgtagaacgacttggtggtaaacccaaaatgattcgcacgggaagtagcttcctccgcgcgtatttatctcaatcaaatggtaacgctatttttgggggcgaatacgcgggtcattatgtatttaatgatgggcgtggttttgggtatgacgatggtttgtacgctgcattacgtgtaatggaatatttcactgagtcgagtgcggcaacaatttctgatttattttctaattatcctgaaagatgctgtaccgaagatacttatattggtacccatcattccgaccctaaacatgtactacaagatattgaaattttaagccatcgtttgggtgctcgaattagtaaaattgatggcgtacgtcttgattttgatgatggttttggcattattcgagcatcaaatacaggtgagtattttaccgtaagatttgacgctgataatcctttacgtttaaaggaaatccagcaaaaatttattgatatgttgcaagagcgttatccgcaaattgcacaagaactttctgaggcctaa

SEQ ID NO: 44407 - DNA, 453 bp, Acinetobacter baumannii
atgaaagttcaagttaaattgctcgatccgcgtttaggtaaagagtggcctttaccttcatatgcaacagcagggtcagcaggtttagatttacgtgcctgtttagatgaagcaattgagattgaaccaggccaaactgttttggttaaaacaggtatggcaatttatattcatgatgtgaattttgctggtttaattctaccgcgttcaggtttaggccataaacacggtatcgtgcttggcaacttagttggtttgattgattcggactatcaaggtgagttgatggtttcagtgtggaaccgtggtcaaaccaccttccgtttagaaccgggtgagcgtttagcacagtatgttttagttccagtagttcaggctgaatttgagcaagtagaggaatttgaagaaactttacgtggcgcaggcggctttggtcacactggtaaacaataa

SEQ ID NO: 44408 - DNA, 2040 bp, Acinetobacter baumannii
atgtcatctgccagtcaactgaacaacaagcaagaagaagccatgaaatatactcaaggccctttattggtgcttgctggcgctggttcaggtaaaacatcggtaattacgcgtaaaattgcttatttggtgcaacattgccgtattcctgcgcatcgtattacagcgatgacctttaccaataaagctgcacgcgaaatgaaagagcgtgtcactaagcttttatcacgtgaagaagcaaaaggtttgtccgtttcgaccttccatacttttggtttaaatcttttacgtttagaacttaaaaatttacctttaaaagctaatttttcgattttggatgcagatgactgtaaacgtattttgatggatttgatgcatcgcgataatttatcgggtgcagagagtaaagagctaattgccaaggcaatgaagaaaatttcagattggaaaaacgatctgattttgcctgaacaagcacattcgacgtgcgaaactcctgaagatgtccagtttgcccatctttatcaactttatgaacgtaatttacgtgcctacaatgcagttgattttgatgacctcattgttatgcctacccgcttattgcaagaaaatgcagaagtgcgtgacaagtggcaaaaccgtgttcgttacttgttagtggatgagtatcaagataccaataccgcgcaatatattttggtgaaattactagttggcgtaatggggcagtttactgccgtaggtgatgatgaccagtcgatttatgcatggcgtggggctaaacctgaaaacatggctttgcttaaacaggatttcccaaatcttcatattattaagcttgaacaaaattaccgctcgaccagccgtattttgaaagctgcgaactgtgtgattcaaaataacccgcatatttttgataaaaaattatggagtgataaaggccatggtgaagtcatcagaattattacctgtcgtaatgatgatgatgaagcagaacgtgtagtcaaagacttactgactcacaaacttatgaatggtaagaactggaaagattacgctgtattgtaccgtggtaactttcaggcgcgtgtattggaaacacaacttcgccaaatgcagattccgtacaaactctctggcggtacatcgttcttcgctcgtgcagaaattaaagatgtaatgagttatttacgtcttattattaacccagaagatgacagtgctttcttacgtattattaatacgcctaaacgtgcgattggcccagttactcttgaaaaactaggtttatttgcacaagaaaacaatttgtctttacttggtgcttcttctgaccagcgcttaagtatggtacttcctaaaaaggcagaaactcaattgcatgagtttgctgattttatctcgacgtttacacgtgagctgttggaagatgatgagcctgtgcctaaagttcgtcaaatgatgaatgaagcgggttatatcgactatattcgtgagcagtccgcaacgcctgcgcaagagaaaagtaagctcgataatatcgagaacttgtttagcagtattcaaaacttaattaatcgtgctgaagatgttgatgaaaagaacattgaaagtgtgattcgaaaactagtcttgcttgatatgttagagcaacagcaagaggaagaagatactgataaagtgaacttacttactctacatgccgctaaaggtttggaattcccatatgtctatattatgggtcttgaagaagagctgttgccgcataagaactcgattgctgctgaaactattgaagaagaacgccgtcttatgtacgtgggaattacccgtgcacgtcaaggcttaactttgactttggcagagcagcgtaaaaatggtggtcaaatgaaacagatgaccccaagccgtttcctcgatgagcttccgcaagatgagctcgaatggttagggcgtaaaaagaaaattgcagcaaatgttgatcctaaagaacaggctcaacaatatttggcaaatttaaaagctttattaaagcgttaa

SEQ ID NO: 44409 - DNA, 654 bp, Acinetobacter baumannii
atgcgtgcattagttatttcaacagtggtaggggcagcagtagtactttctggttgtcaaacaacaggtaataaccttggtggcgttgaatacgataaagccgcattaggtactttgatcggcgcagcagctggctacggtatttctaaatcaaatgcaaactctagccgtcaaaacaaccgtgctgcggcaattggtgcagttcttggtgcagctggcggtttatatcttgaccaaaaagagaaaaaattacgcgaacaaatggctggtactggtgtagaagtaggccgtaacccagatggttctgttcaattgatcatgcctggtagcattacttttgatactaacaaatcaaacatcaagccaaacttctatgcaactttggacaaagtagctcaaacattggctgaagataacaagagcgcgattttagttactggttatacagataacactggtaatgactctattaacatcccattatctcaagcgcgtgctcagtcagttaaaaactatttagctggtaaaggtgttccatctagccgtatcgatgcacaaggttatggttcttctaacccaatcgcagacaactcaactgcttctggtcgtgaacaaaaccgccgtgtagaaatcagcatttatgctaaacaataa

SEQ ID NO: 44410 - DNA, 927 bp, Acinetobacter baumannii
atgtcaactgcacccaataagcaatctgcgctaaaaaaaattacacgtggactcactgtaggtacagtcatcacaggtagcacattttttcatggaccacctgtcttagctttaggtttaacaaagctatttaaaaagtcttcaaaaattgatgaaaccaatattcaaattactaatagctggcttggtgtcaataattggctcattgatcatgttttacctaatttaaaatgggacattagcattgacgaagaccttgatctgaatatgcaaggccgttatttaatgacttgtaaccatcaaagttgggttgataccacggtaaaccagtatttcgggttaacccgtatgccgcttacccgcttttttaccaagtgggaactcatctttattcctttcgtgggtcaagcttttaaaatcttaggcttcccaatgatgaagcgtcatacaaaagagcaaatcgcgaaaaaccctgaactcaaagaccgcgatatgatggaagcacgtaaagcgtgtgaacagctcttaagtcaaccttttacattattaaattatttggaagggactcgttttactgaggaaaaacacgaccaacaaaaatcaccatataaacatttattaaaacctaaagcaggtggtttggctctggcgttaaatattttgggcgacaaaattgatgctttagttgatatgaccattgtctatcctgatggcgtaccaggttatggcgatttctggctaggtgacgtttcaaaaattgcggtcaatcttcgaaaaattgaaataccagactgggttctcgggggtaattatgaagatgacccagtttaccgtgaacgttttcaacaatgggtacatgaactctggactgaaaaagatcagctcatcgagaaaatgaaagctcaatacgcgactacaaatctttaa

SEQ ID NO: 44411 - DNA, 1047 bp, Acinetobacter baumannii
atgcaaaacagttccggaaagcaaacgaaatatcaccgtgtagattcaagcagcctttcatttaagctgtttttggtctacgacatctttatggtgtttattatcattttcaatctgttctgtcttgcagccaatttctttttaatgagcagtattggggcatggttctttgaacatatccatttgccccaagtattgtctttctaccgtacccatttacacccatgggttattacctctgaagcctggtttattggttttctaattattgaactactggtccgttggggaattgctatcgtttataaacatcataagcgttggttcttcttcccgtttattcactggtatgaaattttagctattattcctcagctacgttttctacgtttattccgtgccgggattattgcatatcgtttacacgaacttggttatccggttattcctgaaagctggagaaagacaggtctcttttattaccgtgtggttatggaagagttgtcggaccgcgtggtgattaccgtaattgacggtattcgatacgaacttgaaacgagttctagccataaacaaattattcatgatttggttaatcatcatcgtgaacaatttaccgtaaccctaactgccctattacaagaatctttagcaactgctttaaaagaacaaaagcctgcaatcacccgagctgtcggacaaatcgtagatcaggcaatagaagatacgcctgaattaacacaattattaaggcttattccacttgtagggggacgtattgagcaacaaattcaaagtattggtcaacgtcttggtgaaaatatcagtgctggtttaatagagccgttaattgaaggttcagccgcacaccctaattcaacttatcaattaatttctcaaaaaattagccatataaatattgataaccatgaacttgagcagctggttgagtctgtcgtttttgaaacgctagaagctgtccgtaaacaagttaaagttaaacagtggcaacaaacactcgcggagtatgatcgaatcaaagaataa

SEQ ID NO: 44412 - DNA, 723 bp, Acinetobacter baumannii
atggctgatatccggattaccggcagaatggttaactttagcaggataaccttcgatacgaatgatcatgatgtgatccgccagcaattatcaaatatattaaatgaaggttcctatcagggaactgtcgttattatagatagtactgttgaacaagagcttattgctttaattcagctgttagtcagcatgggcttacagcctatggctgtcattgacggtattttaggcgatgaagcacgcgccattcagttccctgtattacctgcagatcagccattacaacgtattaaaccaactgcagagcaagttgcaattgtagagaagcctacctctgcacaagcttcggtagaaacaaaaaaaccactaaataataatgcagttgcccatattacctcttatcatgatgaaattttgcgtacaggccaatctcttgtacaagaccaaggcgatattattttaaaagctggcatgaatagtggttccgaagtgattgcttcaggaaatatacatatttatggcacggttcgtggtagagtcattgctggtgcgggtgggcacgctgctgcacgcattttttgccaatctttagaggctgaactcgtttccattgccggaacatattgtgtcgcagatgatatccctaaacatgtggtaaaaaagccagtacatatttatttaaatgaaaagcaagagcttgaatttgaagctctagaactttag

SEQ ID NO: 44413 - DNA, 837 bp, Acinetobacter baumannii
atgaccataataggagtggattcggtggccaaaattgttgtcgtaacatcaggcaaaggtggtgtaggtaaaactacaacgagtgcatcttttgcaacaggtttagcccttcgtggtcataaaactgttgtgattgactttgatgtaggcttacgtaaccttgatttaattatgggttgtgagcgtcgtgttgtttatgatttcgtcaatgtaattaataatgaagcacgtctgcaacaagcccttattcgcgataaagatatcgaaaacctttacattttgccggcttcccaaacccgtgataaagatgctttgagcgacgaaggtgttgctcgtgtaattgatgagctttctcaagaatttgattacattatttgtgactcacctgcggggatcgagcgtggtgcaattttagcaatgtaccatgcagatgaagcaatcattgtgacaaaccctgaaatttcttcagtacgtgactctgaccgcatcatcggaatgttagatagcaaaactaaaaaagttgaacacaacgaaggacgtatacgtaaacatttatgtattacacgttttaaccctgaacgtgctgaccgtcaggaaatgctgacgattgatgatatttctaaagatattttacgcgtaccgacattaggtgttattcctgaatgtccaagtgtattacaagcatcaaacgaaggtaagccagttattctgtattcagaaactaaagctggacaagcgtatgatgacttggttgctcgctttcttggcgaagaccgcccttatcgacacatcacagctcaacctaaaggctggttagcacgactatttggagcgtag

SEQ ID NO: 44414 - DNA, 273 bp, Acinetobacter baumannii
atggcaggattctggagtaaattatttagcagtgaagaaaaaccatcaagtgctcaaactgccaaagatcgtttaaaagtcattgttgcatcagaacaaggtttaggccgtcgtttaagccaagacaagattgaccaaatgaagaaagaaattatgcaggtggtcagtcgttatgttagcggtgtaggcgaacagcatatccaaatgcaagttcgttctgaggcgaacattgaaatgttagaaatgaatatcaatttacctgaagaacgataa

SEQ ID NO: 44415 - DNA, 288 bp, Acinetobacter baumannii
atggcattatcacagccagcaactttcaatgaagaatggtccgatgagcgtgtttttgcctacctcaaccaacttcctccaaatggtgtgaacgcagacttccatgtgctctaccatgcttttaaacatatgcgtccaaatgattatgaacgtcttctaactaaatttgttgcagatggacgagatattaatgcgactaatccggaaggcgaacgcatccatgacgtgattgctaaattcccacgtcaatcagcgccgtttttagaagttttagcaaagtttgcttaa

SEQ ID NO: 44416 - DNA, 621 bp, Acinetobacter baumannii
atgttagtcgcgttaattacgttagcttttattcatttttgtgcgcttattactccagggcctgatttttttttggtatcacagactgcagtgagccgatctcgtaaagaagcaatgctggttgttgcagggataacagcgggtgttatgttttgggcttctttagcattgatgggcttaaatattatttttgagaaaatggcttggttaaagcaaggtttacttattgcaggcggtttgtatctatgctggttaggataccaaatgttgcgttcggcattttcaaaaaatcagcaggaagaggtgacaactgttgaattaccaaaagcgccgtatttattttttatgaagggattactcaccaatttatcgaaccctaaagctgtgatctattttggtagtgtattctctttatttttagcaaaccctcagcttgatcaagtccattggctgctttttattattgtgtcggttgaaacaattttatggttctgctttgtgacttttattttctcattaccaagttttagagctgcttaccgtaatttttcaaaatggattgatggtatttctggggggatttttaccgttttcggtattttcctgattgggaatcgataa

SEQ ID NO: 44417 - DNA, 3033 bp, Acinetobacter baumannii
atgactgcggtgtcaagtgtttatgcacagcgcttattgatgacattattcttggtctcttttgggatttatatgtttctggcgacagtaacatatacaccatttgatccgggctggatgcatatttcaagtgatactcagcaagtatccaatgcaagtggtattgccggtgcatggattgcagatttgctgtttggctttttaggttgggcaagtttacttattccaatcttcctatttgttgaagcgattcaagtctggtggccacatagttttctaaaccgcccattccgttatgctgcgcagttcttcttaattcttgttgtgtcgagtttgctttaccttcactggaatgtacccgctgatactttagataatgctgcaggcgggattattggttatgagttggggcaaagcttatctcaactgttaacaatttatggtgcgacattatttctacttgttttcggagtggtattgttcactttggcatttggggtgcagtggagcaaaacatgggttacgctcaaagcaatgcctggttatttacaagatttattctataaaaatgtatcccctaacgaatctgcttatgacttaaccacacagcctgcgaataaagcagcaacggtaaaagttgcagagatgcctaaagcagaagaagttacggatgaagtagagctaaatgcccaaccagaaaaagctcaaagcaaagcgagctctacacgacatgatgaaatagcagagcgtttatttgccgacgttttagctaaagaacaaagtcaacctgaaacgattgaagaaaaaacaactcctcagccagaaaactttgagcgtacacttgagcaagcccaacaacttaaaaaagacagtgagcgtttagtggctacgggggaggtttggcgtgcgttacagcgtgatgatgtaagccataaacaagaaattgatgcactgttaagagctgctgatgattcaagtgaacagccttcgactcatgagcaatttcagcaaacagtttatcaggctaaacaaaatcaaccatcgaatactcatcaaggtttagattggaatgatgatgagatttttgatgaactacttgctgcagttccaaatagtaaaacagcaactgatgtgcatacgccatttgttcaagatcatcatgttgaaccagaagttacaccgcaagctcctcaaacattagttgaatcatctgtacctgtatcgaatttaaatcagtcacctaaaaatttatcgaatgaagaagtctttgatgattttgatgacttattgattgatgaggatatcccgccagcaactcaaccgatcaaggcaagtagctatgcgcaatcttcggcttttgtaaaagcgcctattcaaactacgattggtgcagagaagctgtcaaaagaagaatttattgaagcttggcaggaaactgctggaaagcctcaggatgaccttgaggatgagtttgattttgatgcacctttaacagatgcatcaggtcgaccaatgtctcgtgccatgcaagtggccaaaaagcgtttagatttaccaacattaccgggctttgaattgcttgataaggttgacccaaataagaaagttaactttaccgaggaacagctttcccgtttgtctgagctacttgagatcaagttacaagagtttaacgtgaaggctcaggtggttgaagctcagccgggtccagtggttacacgttttgaattagatttggcaccgggtgtgaaagcatctaaagtgactaatatttcccgtgacttggcacgttcaatgtctatggcttctgtacgtgtggtagaggttattccgggtaaaccatatattggtattgaagttccaaatagtgctcgtgaaatggtacgtttgattgaactattggaaacacccgcatatcgtgacccaagtgctctcattagtatggcaatgggtaaagatatttcaggtaatccggtactaacagacttggcaaaagcaccgcatatgttggttgcgggtactacaggttcgggtaaatctgttgccgttaactcgatgattttatcgatgttactcaaatatacccctgaccaattgcgtctgattttaattgacccgaaacagcttgaattagcaaactacaacgatattccgcatttattaacgcctgtagtcactgacatgaaagatgcagtgagtgctttgaactggtgtgtaaatgaaatggagcgccgttataagcttatgtcgttcttaaaaattcgtaagttaagtgactacaaccgaaaagttgaagaagcgcttgcaaatggagaagacttgattgacccgacgtggaaaccaagtgactcggcgacacaagagcgtgcgcctcgtttaacgccattaccatctattgttattgtggcggatgagttcgcagatatgatcatgcaagttggtaagaaagcagaagaaatgattacgcgtttggcgcaaaaatctcgtgctgctggtattcacttattgcttgcaactcaacgtccatcggtagatgtcattacaggccttattaaagccaatattccaacgcgtgtagctttacgtgtaaacagtaaaattgactcgcgtactattttggatgcggggggggcggaagacttgttaggtcacggtgatatgctgttcttaggaccaggtaagattgagccagaacgtgtgcatggtgcatttattagtgatgatgaagttaaccgtatttgtgatgcatggcgtgaacgtggcgaaccagactacgtagatgagatcttaactccatttgatgaggagcctgcttcgcgtggctttgaagaaggtgatggtggttcagaccgtgatgcactttatgatcaatgtgtatcgtttgttttagaaactcgaaaagcttctacgtcttcattacagcgtaagtttagccttggttataaccgtgccgctcgtatcattgaccaaatggaagagaatggtattgtgagtgctatgggtgccaacggtaagcgcgatattttagtttaa

SEQ ID NO: 44418 - DNA, 948 bp, Acinetobacter baumannii
atgagtgctcgtcattctcggttaattattctcggttctggccctgcgggttatagtgcagctgtttatgcagcacgtgcaaatcttaaaccaacacttattgcaggtttacagcttggcggccaacttacaacaacaaccgaagttgacaactggccgggcgatcctgaaggtttgactggtcctgtcctaatggaccgtatgcaagcacatgctgaacgctttggtaccgaacttgtctatgatcatattaatgaagtggacttaaatgtacgtccttttgttcttaaaggtgatatggatgagtacacttgtgatgctttaattattgcaactggtgcgacagctcaatatcttggcttagattctgaacaaaaatttatgggtcaaggcgtgagcgcatgtgcaacatgtgatggcttcttctacaagaaccaaaatgtgatggttgttggtggtggtaatactgctgttgaagaagcactttatttatcaaatattgctgaacatgtgacacttgtacaccgccgcgattctttacgctctgagaagattttacaagatcacttatttgctaaagaaaaagaaggcaaaatcagtattgtttggaaccatgaagttgaagaagttcttggtgacaatactggcgtaacaggtgttcgcttaaaatctacgaaagatgacagcaaacaagaagtacaagttcaaggcttattcattgcaattggccataaaccaaatacctctatgtttgaaggtcagctaaacttacgtgatggctatatccaagtacaaagtggtacttcaggtaacgcaacagcgacttctgtagcaggcgtttttgctgctggtgatgttgctgatagtatctatcgtcaagcgattacttcggcgggttcaggctgtatggctgcactagatgccgaaaaatatctagacaacctttaa

SEQ ID NO: 44419 - DNA, 732 bp, Acinetobacter baumannii
atgaaaacactgcctctatctcaatatattttcccagatccagaggaatcagatccagatggtcatggtttaatttgtataggcgctgacctctccccttccacactctatgaagcatatacacatgggcttttcccatggtttaatgaagatgaacctatttgttggtggagccctgaaccacgctgtatcatctatcctcaaaactataaaccgagtaaatcgcttattcgtaacatgaaaaaatatgattacaccattacggtaaatcgtgcttttgagcaagtcattcgctcatgttcactacctcgaagctatgctaatgaaacatggattagtgaagatattattgaaggctattgtggaatgtttgatgccggttatggctatagcgtagaagtctggcaagaagagcagctggtaggtggtttatatggggtaacgatcggcaagggttgttttggcgagtctatgtttagtacccaaaccgatgtttccaaaatggctttttatactttaatgttaattggtcaagaaaatcagcttccttgggttgactgtcaacttgtaaatagtcacttaattagtcttggggcttgtacactttctcggcaagaatatcttaaatcgttacaagatgtaattattcacccctctatcaattggaaaaagtatcaagaacgtgtattttcaagtaaaacaatagcattaaatgcaaaattaatggaatga

SEQ ID NO: 44420 - DNA, 816 bp, Acinetobacter baumannii
atgaaatcatatcacccgaagtcccttttaaatgatctgcaatattatattactccacctcatgattgcagctatttagaaaataaatcagcacgcatggtctttttagacccgattcatcggattgatgtggtgacgctttctgaattatcgcgattaggttttcgtcgtagtggcgactttgtataccgtcctgaatgtcatttatgcaggcagtgtttatcttgtcgtgtacctgttgccgatttccaaatgaacagcatgcaaaaaaaagcatggaagcgaaatcaagatctcaccatgactgttctaccaacacggcaagcctcacaaattcattatgatctatatgaacgttacattaacgagcgccatgccgatggtgatatgtttccgccaagtttagatcagtttgaaaaattcttggtccatagctgtacagatagtttcttcttagaactatggaaagacaatcgtcttattagcgtttcgacttgtgatttaatggatgatgggttatctgccgtctatacgttctttgacccagatgaacaccgtagatctttaggcgtttattcaattctgaatcaaatcgaatatgtaaaaacactcggtttagaatatgtctacttaggttattgggttccccactcagctaaaatgaactataaatctcaatatacaccgctagaacttttactagatgggcaatggcgccgcttaaataggtcattatcaccagaagagatcaatcaattgggtaattccctcatgaccacattaccttctgaatggaataatttaattattaaataa

SEQ ID NO: 44421 - DNA, 456 bp, Acinetobacter baumannii
atgattcgtactatgcaagcctcagatattgatagtgttgctcaaattgagaagcttgttcaaacacacccatggtctaggcagcaatttgtagaatctttaaattcttaccaatgtacggtaatagaattaaataataaggtggttggtttttgtattttacaacctgtattagatgaagcgaatttactgctcatggcaattgatcctcaaatgcaaggtaaaggattaggatatcaattattagatgcgtcgattgagcgtttagaaaatcaccccgtacaaatttttctagaggtacgtgaaagtaataaggccgctattggtttatacgaaaaagcagggtttcaccaaattgatgtgcgtcgtaactattatccaacccaagagggtggacgtgaaaatgccattattatggtaaaaagctgtactgatgattttgcttctttattctaa

SEQ ID NO: 44422 - DNA, 876 bp, Acinetobacter baumannii
atgaatgctaaagtaaatatttctaatcgtgccggagcgagtttccctgtgcgtcgtatggactttgagtttgctcaagttccacgctattgggcaaattacgatgcaggattaactcattttatgacagcattatcggctctttttccggaaggagagcagttctttgtaaacagtactcgtgctgtgcgaaacgatcctaaactggctgatccagcacttcaaaaagaaataagtgcttttattggccaagaagctatgcattctaaagagcatcttgcatttaatgcttctgcgcaggcgtatggatatgatgttcgtaaaatggaaaaacagacaggtaaagttattaaagtaggtactgcggttgtaaccaagctaatgaaaccttttggttatacaaaagaaatgattgatttaacaggtacctgtgctttagaacattttacctcaactattgcggctgagcttttacaaaaccctgaaattcaagctatgttccaagatgacactatgtatcacttatggatgtggcatgcggtagaagaaaatgaacacaaagctgtagcgtttgatgtgtataccaatatgtatgggcaggggccaaaagcttattttatgcgttcaactgctttaatcattgcaatggccttaatctttgctactcagtcttattttactgctaagttacttaagactgatgataaattaacatggaaagataccaaatacatgcttaagttcatgtatggcagtaaaggttttatgacccgtcaaattccagaattattagatttcttaagaccaaaattccatccaaatgattcggatacgacagctttattggccacttggcgtgaaaaattaggtctttaa

SEQ ID NO: 44423 - DNA, 882 bp, Acinetobacter baumannii
atgaatgctaaagtgaatatcacaaatcgtgcaggggcaagctttcctgtacgtcgtatgaactttgattttaatgatgtgccagaatactggatgaatggttccgctggacttacacattttatgacagcgttatcagcgctatttccagctggtgaaaagttctttattgatagtgtacgtgctgtgcgttatcacccagcaattaaagacaatgaagagctacaaaaagaaatcagtgctttcattggtcaagaggcgatgcatacacaagagcatgtaaactttaatgcttctgcccaaaaatttggtcatgatgttgaaactttagaaaaattcaccgatacggctattcaaactgcccgtaaaacttttgcaaagctcgtaaaaccatttggtatgacgcaagaaatggtggacctgactgctactacagcccttgaacattttactgcaaccattgcatctcagcttttagttaatacccatattcaagagttgatgacagataaaacgatgtcaaccatgtggtattggcacgcaatagaagaaaatgaacataaagcagttgcatttgatgtgtatgaaggtgtctttggtaaaggtgtaaaagcttatgctttacgcacaagttcacttgtttttgcaatggctcttatttttgcaattcaatcttcgtttgtggttcgtcttttaaagcaagaccataaattaaacttagatgagttgtttgtgatttataaatatggttatagcccgtcgaaaggcattattacgggtatggctaaagagatgttggcttattttaaaccaggtttccacccgaatgatttagatacggttagtttgttaaaaacttggaaatctaaacttggactgtaa

SEQ ID NO: 44424 - DNA, 2430 bp, Acinetobacter baumannii
atgtctgaacttattatgaatgaaaaaactgacttagagcctcaggttccaagtgtattaccactattagccttacgtgatgtggtggtttatccacacatgcagattgcgctatttgtgggtcgtgaaaaatcgatcaatgcagttgatgtggctcgtaacagtgacaatttagtatttgtagttgcgcaaaaagattcgcttacagaagaaattgatcacgacaatttataccagtacggtacagtcgctaagattgtacaagtagttaatcatgaaaatgatgaaaactgcattaaagtacttattgaaggcttacatcgttctaagttgaaaaaaattatcgatgaagatagttatttgactgccgaacatgaattaagtccaatgacgattaatgtagataaggcaacgcaagaaactcgtttacaagagttacgtaatttatttgctcaatatgcagaagcaaaattacgtaatgcacgtgaactggttgctgctgccaacaaaatcgaagacttattgcaattgatgttcttcgtagcaactcgtgtgcctctaaatattgaaattaagcagaaatttttagagtacgatgagtttgaagctcacttgcaagagttgatgaactacttgatgaatcaatctgctgaacagcaaattgagcaaactttacatgacagcgtaaaacgccaaatggaaaagaaccaacgtgaatactttctaaatgaaaaaatgaaagtcattcaacgtgaactttccgacatgaatggcggtgctgaagatgacgttgctgaaatagagaaacgtcttgctgaagctgatttacctgaacacgtacgtaaaaaagccgaagctgagttccgtaaacttaaagcaatgcagcctgcatctagtgaagctgctgtggtacgtaactatctagaagtgattctagatacgccatggaacaaagcgagcaaagtcagtattaacctgaacaaagcgcaagagattcttgatgccgatcattatggtcttgatgacgttaaagatcgtattgttgaatacctagctgttcaatcacgtgtgaaaaaactcaaaggccctatcctttgcttggttggacctccaggggttggtaaaacttcacttggtgaatcagtagcgaaagcaacaggtcgtgaatttgttcgcatggcgcttggtggcgtacgtgatgaagcagaaattcgtggacaccgtcgtacttatattggtgcgatgccaggtaaaatcgtgcagtctttaacaaaagttggtgtgaagaacccattgttcttactcgacgaaattgacaagatggcacaagactaccgtggtgatcctgcttctgctttgcttgaagtgcttgatccatcacaaaacagtaagttcaacgatcactatttagatcttgatcttgacctttctgaagtgatgttcatctgtactgcaaacagcatgaatattccagaagccttgttggaccgtatggaagttattcgtctaccgggttataccgaagatgaaaaagttaacattgctgagcgttaccttgttcctaaagcaattaagaacaatggcctacgtccaaaagagttaactattcatgaagaagcgattcgtgacattgttcaacgctatacacgtgaagctggcgtacgtaatttagaacgtgaagtttctaaaattgcacgtaaagtcgtaaaagaagcggtaagtaaaaaatctaaaaacttacagcttgacgttacctctgccaatcttcctgaatacctaggtccacataaatttgactttggtatggccgaagatgaagcacaagtaggccgtgtaaatggcttggcatggacttctgtaggtggtgaattgcttactattgaagttgcagctgttaaaggtaaaggtaaattcattacaaccggttcactcggtgatgtaatgaaagaatcaattaccacagcaatgacagtagtacgcacacgtgccgatgaacttggcattgaagcatctcgctttgaagaaactgatgtacacgttcacttacctgaaggtgcaactccaaaagatggcccatctgctggtttagcgttaacaactgcacttgtatcagcatttactggaattgcgattcgaccagatattgcaatgacaggtgaaacaagtctaggtggtcgtgcgatgcgtatcggtggcttgaaagagaaacttcttgctgcacatcgtggtggaatcaagctcgtctttattcctcaagataacgttcgtgatttggcagaaattccagacaatgtgaaagaaggattagaaatcaaagctgtgaaaagcattgatgaaatcttacctttagcattaacttcgatgccaaaacctttacctaaaacaccgattgtaaaaccggtggaaggctcaaaagcagcgcgtcactaa

SEQ ID NO: 44425 - DNA, 480 bp, Acinetobacter baumannii
atgaaaattcgtattctgaccattggtcaaaaaatgcctgcttgggtacttactggttttgaagattatttcaaacgcatccagccttttgttcaaactcaggttattgaactcccaatggcaaaacgcggtaaaaatgattcagaagcagatattttaaaatactgccaaatcgagggtgaaagtattttaaatgctttaaaacctaatgagacccttattgctttagaagttggcggacgcgagctcagcacagaaaaactagcagacaccatgaaacaatggatgcttgaaggtaatgatgtggcactcgctattggtggcccagatggcttgtcagatcaggtacgtaaagccgctgcttggcactggtcactttcaaaacttaccatgccacaccctttagtacgtattttattaatcgaacaactttaccgagcaatgagtattaatcataatcatccttaccaccgtgcataa

SEQ ID NO: 44426 - DNA, 777 bp, Acinetobacter baumannii
atggaactacaaacccttcccggactgtttatttcacatggttcgcccatgcttgcacttgatccagaacaagtgggtcctgccttacatcgtcttagtgtaaatctgcctactccaaaggcaatcatagtgatgtctgctcactgggaaagtaaagcactcgaagtaagtagttcgactcgtccggaaacttggcatgacttccgtggtttcccgccagagttgtatgaaattcgctatagtgcccccggtcaacccgaacttgcagaagaaattttgaagttgttagcagatgctcattttgtcgcacatgccaatagcactcgccctcgtgaccacggcgtatggatgcctcttttacatatgtatccagaagcagacattcctgtcgttgaaatttctttacctatgggcttaactgcacaggaaatttatcggattggccaaacgcttgcgcctttacgtgaaaagcaaatcttattgattggctctggaagtattactcataatcttgctgaactgtcttggcaaggtgacaattcgaaagtacctgaatgggcttcaacttttagaaatacagtggtcagtaagctgagtcatcaagactatgatggtgtacttgagtggcaaaccctgccgtttgtgaaacgcaatcatccttcacttgagcattttgcacctttgtttttcgctatgggtacgggacatcgttttacgattgttcatagtagcttcacaatgggctcactaggtatggatatataccgctttgattaa

SEQ ID NO: 44427 - DNA, 1110 bp, Acinetobacter baumannii
atgaaaattaaatatttaattcttgcgttattacctttttctttgatggcgtgtcaaacagtttcaaacactcaagctccaattgtatctgagcaacaacaaaatttggctactactttaagtgaatatgcttggacttatcaaaatgtaaaagcatctaagccacttattgttaactttaatgcagacggtaaattagcaattaacactggctgtaatggccaaggcgggacttggaaagttgaaggcaaccaacttgtaacttctccacttgcatcaacaatgatggcttgccaagacgatttaatgaaacaagaacaattatctaatagcatctttagtgaagcgaaattgccaatcgaaattagtaataacaatggtcaggtaatcttaagcgtgacagataaagcaggtcaaaagcatattttccaaggcgaaaaagcaactaatactcaagctttaactgattattcatggtcataccaacctgaaaatactaaaaagccgatcgttcttaactttacaaatgaccgtttatcaattgatacgggttgtaaccgccaaggcaccacttggaaagttgaaaacaatacgattgtaacgactgatgtcatgtcaactatgatggcttgtgaacctgctttaatgaaacaggaacaattctctagcagcctcttccaaaaacgtgcgattccatttgaactcaatacaacaaatgttgatcaaccaacattgacagtaactgacgctcaaggccagaaatatactttcacaggtaaaatgacacctgaagcaaaatatcaatctgaaggtaaaactgttttccttgaagtagcgccagaaactaaatcttgtacgggtgttgcaccacaaacttgcttgcaagttcgtgaagttaaatatgatgacaaaggcgtaaaaacttatgctgacaaaaactggtcattatattatggtcaaatcgaaggttttgaacacaatccaaaccaacgcgtaatcttacgtgtaaaacgttttgaagtgaaaaacccggcagcagatcaatctagccaagcagatgtgttagatatggttgtagaacaagaactggttaaaaagcctaaaaaataa

SEQ ID NO: 44428 - DNA, 1404 bp, Acinetobacter baumannii
atgatgcattttaaaatgtattgcaccaatttaattcattactatgctgaggaccgtgcattgaaatataacaacctgaatgaattcctgaattacgtgcaagcgcgtgatccgcatcaacctgagtttttacaagctgtcgaagaggttatgacaagcttgtggccatttattgaaaaaaatccagaatatgccgagcagggattgctagaacgtttggtggaaccagaacgtgtgatccaatttcgcgtttcgtggatggatgatcaagggcagactcaagttaaccgtgctttccgtgttcaatacaattcagcaattggtccattcaagggtggtatgcgtttccatccgtcggtcaacctatctattttaaaatttttagggtttgagcaaacttttaaaaactcgcttacaactttgccaatgggtggaggaaaaggtggttcagattttaaccctaaaggtaaatctgatgctgaaattatgcgattctgtcaggcacttatgattgagctttaccgtcatttaggtccaaatactgatatccctgctggagatattggtgtgggtgcacgtgaagtaggttatatggctggcatgatgaaaaagctcagtaatgacacggcatgtgtgtttacaggtaaaggaatttcatttggcggtagcttaatgcgccctgaagcaacaggctacggtacggtttattttgcagaagaaatgctaaaaacacgtgggcagtcttttgctggtaaaaccgtttcgatatctggttctggtaacgttgcgcagtatgctgctgaaaaagcaatgttcttaggtgcaaaagtggttacgctatcggactcaaatggtaccgtttatttaaaaaatggttttacagatgagttgcttgctgaagttatggaactcaaaaatatccagcgcggccgtatttcagaatttgcttctaagcatggctttgaatattttgaagggaagacaccttggcatattcctgtagatattgccttaccatgtgcaacacaaaatgaattaaccggcgaagatgccaaaacgctcatcgctaatggggtaatttgtgtggctgaaggcgctaatatgccatctacacttgaagctgttgagcattttattgaagctaagattttatatgcgcctggtaaagcttctaatgcgggtggggtggcaacgtctggtttagaaatgtctcaaaatgcgattcgtttaggctggacacatgctgaagtcgatgaacgcttacatgcaattatgaaagatattcatgccaactgtgttagatacggtactaaagaagatggtactgtgaattatgtagatggtgccaatattgctggctttgtaaaagttgctgatgcgatgcttgcacaaggtatctattaa

SEQ ID NO: 44429 - DNA, 792 bp, Acinetobacter baumannii
atgaatccatctatttctctcatacgcgagattgatgcgttattaccacaaacacaatgtggtctgtgtgggcaccgtgacggctgtctaccttacgcaaagtccattgctgaaggtgaagaagcaaataaatgtgttcctggtggacagccagtggccgatgcactggcacaattattaaatcgcccattattacctgctgaaacaagtgtctggcctgtacaggcggatggacgcccacaacgcatgaaagcgattattcgcgaagacgaatgtatcggatgtacaaaatgtattaatgcttgtcctgtagatgccattattggtagtggtaagctcatgcataccatcttgactgatttgtgtacaggttgtgagttatgtattccaccctgcccagttgactgtattgatctggtcgaagacactcaagcattgccaagcgaacagcaacggattgcagaacaaaatgatttacgtcaacgttattacgcgcatattcaacgtgaagaaaaacgccgtattcaccgcaaaggccctgttgtacgtgctgaaatagatacccagctgtttgcacagttctctcaagcacttgatgatttaccttcaattcagctcatcgagaagccaaaagaagcgattgtaagcgatgcaaaaaccacaattgaattagcgaaaattcgtacacaaattaaaaagttggaaaagcagctcagtgttcgagaagatgccaaaaagcgtcttcaacttgatgaactacaacagcaactcattcaattacaggaggtctga

SEQ ID NO: 44430 - DNA, 693 bp, Acinetobacter baumannii
atggccgtcaaaaatatgacgaaaaagcagattcaaattttctttgaacgccttcgtgaacaaagaccttctccacagaccgaattaaaatattcatcaccatttgaattgctcattgccgttatgttatcggcacaagcaaccgacgttagcgtgaacaaagcaactgataagctctatcctgttgcgaacaccgctgaaaaaatctataacctaggtgtagacgggttaaaagagtacattaaaacgattggtctttataacgcaaaagccgaaaatgttatcaagacctgtaagattttaatggagcagtttaacggtgaagttccaagtaaccgaaaagatttggaagctttgccaggtgtaggccgtaaaacagctaatgtagttttaaatactgcattcggtcagccgacaatggctgtcgatacccatattttccgtgttggaaaccgaacgggcttagcaataggtaaaaatgttcttgaagttgaacaccgcttagtaaaagtcattcctaaagaatttattttagatgcacatcactggctgatattacatggtcgttactgctgtattgcccgtaaaccaaaatgttcagagtgtgtggttgctgatgtatgcaactggccggaccgctttgagtttggtgctcaaaaacaaattgcggttaaaaacattgaggcagaataa

SEQ ID NO: 44431 - DNA, 654 bp, Acinetobacter baumannii
atgcgcattatcttactcggaccacctggggcaggcaaaggtactcaggctcagttgatctgtaagcgctacaatatcccacaaatttcaaccggtgatatgctccgtgctgcaattcgtgaaggtactgaattaggtttaaaagctaaaagtgtgatggaatctggcggtttagtttcagatgaactcattatcggtttagtaaaagaacgtattgctcaacctgactgcgtgaatggttgtattttcgacggcttcccacgcactattcctcaagcagaagctttggaaaaagaagggatcagcattgatcatgtaatcgaaattgatgtacctgatgaagaaatcgtaaaacgtctttctggtcgtcgtcagcatcctgcttctggtcgtgtttatcacgttgtatacaatccacctaaagtggaaggtaaagatgatgaaactggtgaagatcttgttcaacgtccagatgaccaagaagaaacaatccgtaagcgtttagcgtcttatcacactgaaacagaacaattggttggtttctaccaaggtcgtgctgcttctggtgaaaatgcgccaacttatgacaagcttgatggcttgcgtacaattgaagatgtacaaaaagatttgttcaacatcttagacaaataa

SEQ ID NO: 44432 - DNA, 1314 bp, Acinetobacter baumannii
atgttagagtacgtcagcggattgtggcagacctttttacacagacctgatttttgggccgttttgagtatcattccggtcactgcctttgtcacatgggcacatgtgtggatggctttaaaaatggtgttttacccaatcaagttttggggatttcatttaggtcctttaccagtcggctggcaaggtattgtgccacgtaaagctggacgtatctctggaattattaccgataatactttatccaagttaggttctttgcgtgagtttttagaggcaatggaccctgaagacatggcgcgtattattggtgagcaagtcggatttgaacttgagcatttgattgatgaagtgatgatcgatcgtaatgcagtgctttgggaaaatttaccctattcaattaaacgccgtatttatgctcaagcgcataagcaattaccaggtgtactcagagaattagtgactgagctgactatgaacgttgagtcactggttgatatgcgtgaaatggtggtgagccaaatggaaggtgatcgccgtttaatggtacgtatgtttttaaaagttggacaaaaagaaatcaactttatttggcatattagtgctttaatcgggatgttctttggtgttttccaaatggtggtctggtttgtggtgccttggcattggacagtaccattttgggcgtctatttggggctttttaactaactggattgcaatctggatggtatttaacccgattgaaccgcattacattcgttatccgcaaatatttagattaacaaaagatcgtaagtttccttggattgtacctgttttacgaattggtacttataatgttcaaggggctttcatgaagcgtcaagaagaagtttcagaagtcttctcaagcgtagtgacagaagatctgattacgttaaaatcaattatgacagaaatgatgtatggttcacgcaaggacaaaacgcgtcgtattgttaaacgtcatattaacgaaatcatggaaactccacttgttcgaacatctttacagctttctttaggcccaagagagtatgcaaggttaaagacggacttgattgatcgttcaattgaaattacgatgggaccggtatgtgaccctgcactcaatgcaagccgggcacagaagatttttcaaatgtttaaagagcgtattcgtgaactaacaccaaaagagtttcagaatttgttacgtccagcatttcaagaggacgagtggattcttattgtactaggtggggtaaccggatttattgctggtacaatacatttgtttgtggctttcttataa

SEQ ID NO: 44433 - DNA, 519 bp, Acinetobacter baumannii
atgagaaaaatttatcccttacttgcagttttgacagtaagcagttgggcacatgctcaagattactcatttcttccagaagcaaaattagcagatcataaagcatctacctggaatgtaggcgccggttttacacaaaaattgttacatctcaatggtgagtgggtaaatccttatggcattgcttacgcaaaagttggtgcatttttaaatggcgataaaactgctggaggacaagtcggattccgctatccgtactaccttactggaacagataaaaatggttactatattggcttttatgctggacatcttgatagtaaatcggtagatggagattataaatctcgtttaggtgctggtgttgatttggcatatgtattgttgaattcagaaagaattagtacgtttagtgtgggtatcggcgcagcggaaaaattaacggaccagaatggtgatgttgctgcagatactaaaccacaaattcaattttcttattctctaagttttggtttataa

SEQ ID NO: 44434 - DNA, 2019 bp, Acinetobacter baumannii
atgaaacagcactttcctttaaaagatatccagcaagaaaagcgcatttatcgaggtcgtatattttttgccgtagggcttgtgattatctgtttattggtactagccagccgatacgcttatctacaaatttttcattatgatgagttctcgacagcatcggataaaaaccgtattcgcctacaaccccttccacctgctcgtggttatatttatgaccgcaatggggttttactggcagataactatcctgtttttactgcaacattaagtaaagcagatgttgagaacgttgataccgttattgaacaattacagcctattttagaactcactcaagaagatgtagatcgttttaaaagccgtattaaaacagcacgtaaaactgaacgtgtggccattaaactgaatttgaccgagacaaatattgccaagtttagtgaagttaaatacaaatttcctggggttagaattgaaacccaaatgacgcgctattatccacatggtgatttatttgctcacgtgattggatatgttggccgtattaacgataaagaattaaaaagtattgataaagatttatatgctggaacaaacctgattggtaaaattggtgtagaaaaaagctatgaagatttacttcatggaacacctggttatgagtctgtagaagcagatgctcatagtaatattttgcgtcacctagggcgtaaagacccaacccgtggtaacgatctctacttatcattagattatggtttgcaagttgtcgcgtcgcaacaactcgctggtcgacgtggtgcaattgttgcgatagacccgcgtaccggtgaaattcttgcgttggtttcaagtccaagctttaaccctaacttatttgtgacgggtattaatcataaagattatagttctctacgtgacaatatagatcagcctctttataaccgtgcagtacaaggtgtataccctcccggttcaaccattaagccaatggaagcgatgggcggtttacattatggaattgttgattgggctactgccatttccgaccctggttatttccatttacccggcgactcgcacaaattccgtgactggaaaaaaaccggtcatggtatcgtgaacatgcacaaagccattatcatgtcttgtgatacctatttttatattttggctaatcaaatgggcatcgatcagatgaaccaatggatgcgtcaattcggctttggccaaaaaacaggtgtcgatttaccaagtgaaagtgaaggcttatatccaaatcctgaatggaaaatgcgtacacgcaaatccaaatggatgaaaggtgaaacgatttcagtcagtattggtcaaggtgcatttaccgcaactcctttacaactcgccatggcaactgccattacggcgaaccatggctcgcatgtagttccacatgttttacgtgcaacccatggtgcaaaaccttttaccgtacgtaatgcacctgatggaaaaattaatttcaatggtacagatgaagattgggtaaaaatgcgagaagccatgattgatgtaattcaatcaggtactggtcgtggcatccgtacaccgctatatcaaattgccgggaaaacaggtacagcacaggttaaaagtattgctcaaggcaaacgttataacgaagctgcgcttagtgaacgccaacttgaccatggtctttttgttggctttgctccggctgataaaccagaaatcgctattgcagttatttgggaaaatggccgtcatggtggttcagcagcccaacttgctaaacccgtgtttgattactggttattaacccgtaagaaaaatccgattcgaccagccaaccatcaggttaatggtggcttgatgaccgctggaattaaaccaggtgaactcccaagtggtaatgaaagtgccagctcaactcctgcgacctctgctccgacttccgcagcagcctctactccacaggcaacaccaactcgtcctgctacaaacgaggtcgatgaataa

SEQ ID NO: 44435 - DNA, 552 bp, Acinetobacter baumannii
atgaaaaatcaattacgcattattgggggcgaatggaaaagacgagttttaccattcgccagtattgaaggattaagaccaactcccgatcgtgtccgcgaaactttatttaactggctcatgtgggacattcaaaacgctcatgttctagatatctgtacaggttctggggcattaggctttgaagcattatcgcgcggtgctgcatctgtttatatgattgagccagataagatgcaggcacgatttttaaaagataatattcaattgctcaaagcgcagaattgccatttaattaatgcaactgctcaacaagccttaccacgcctaaaagaacagtttgatgtcgtttttttagaccctccttatagtcttaatttatggcaagagcttgcccacttggcagacacccatattaaaaataatgggtacatttacgttgaagctgaccgagatttatctcagcttcaccttcctgcaacatggcagcaagttaaaacaaccaaagctggtacagtccatgcagggctttaccaaaaagtaagcgaataa

SEQ ID NO: 44436 - DNA, 570 bp, Acinetobacter baumannii
atgaacttcattaaaaaatggagcgttgggctccttagcatgttacctgcgttagctatggctcatccggggcatgatcatgtacattcaggttttatggcaggctttattcatccgtttacagggctggatcatttagtaatggctttaggctttggtgtcttgctatggtcggcagccaaacagtggaaaatcgctggcgtcatcactttaagtatcaccttagtgatcggctttttggtaggtgctcaaggtttggtgcccgccaatgttgctgaatacggtattgttgcttctttaattattacagcgattgcgctatggacaaaatcaaatcggattttacctatcgctgccgctttattcgcaagctttcatggtatggctcatggtgttgagttagcacatgcagggcatatcgtggcgttagtaactggtatggttgctggtatggcacttatctattgtggtgggcttgcactcggtgcagtatttacacgttatgtgccatatggcaaaaaaattgtaggtgcctgtgcagcacttgttgcagtgattggtttgagttaa

SEQ ID NO: 44437 - DNA, 615 bp, Acinetobacter baumannii
atgacagaacgtagtccattacgagtcggaattggcggaccagtcggttcaggtaaaacagcacttacacttaacttatgccgtgccttgcgtgataaatataatatggcagtggtgacaaatgatatttataccaaagaagactcaaactttttaacccgtaatgaagcgatgtcaccagatcgtattgtgggtgtcgagacaggtggttgcccgcatacagcaattcgtgaagatgcttcaattaatttagctgcgattgatgatctgtgcgaaaaatttgatggcttagaactcattattattgaaagcggtggtgataatttagctgcgacatttagccctgagctttctgatttaaccttgtatgttattgacgtggcaggtggtgaaaaaattccacgtaaaggaggaccgggtattaccaagtcagatttactgattattaataaaactgacctcgcacctatggtgggtgcaaaccttgatgtcatggaccaagatgcaaaacgcatgcgtggtgaaaagccatttttattttcaaatatgaaaacacaagatgggcttgaagaaattattcaatttattgagaagcaagggctgtttaaggcttaa

SEQ ID NO: 44438 - DNA, 666 bp, Acinetobacter baumannii
atgtccactcataatgctgcgcaattactgcaattgctgacattgtcttctacggcattgccagttggagcatattgctattcgcaaggtgtggaaaccgccattgatattggcttaatacacgatgaatcctcggcaattgcttactttgaagaagtgcttgaaatgctgctagtacgctttgagttgcctgtacttaaacgtcttatgcaacattatgatgacccagatcagtttctaatttgggcacatttgtataaggcaagccgagaaagtagagagcttttggccgaatctcagcaactcgcattttctttaaatgcatggattaaagatgttttaaagaaaacagttgaggttaaaaagcagtttggttttgtgcctgtctatgcacagctttgcggtcgtttagaacttaaagatgttgatgtacttacggcgtatacctttaccgttttagaaaatcaggttttagccgcagtaaaaactgtcccattgggccaaatggcaggacaaagaattttatggcatttgcatgggcgagtaccacaagctgtagagaaggctttaaaacttaaagatgagcaattgagtagtgctttgccgcgctatgccatgctgagcatgaaacacgaaactcaatattcacggttattcagatcttaa

SEQ ID NO: 44439 - DNA, 483 bp, Acinetobacter baumannii
atgaaaatttacacccaacgtcttgaagatatttctcctgatcaggcatttgaaacggttgagctaacgtttgatacccgccaaaaatcacgttttcgagcggctttagcgagtggcgtagatattggtgcggatttgccacgtaccggcattttgcgtagcggttcatatattgcaacgcaagagggtgatgtattacgtgttgatgccaagcctgaacggctaatgaaagtcactgctcagactgaatttgacttgcttaaagcggcttatcacttaggtaaccgacatgtgccattaatgctgacaccaacggctttatattttgagcctgatcatgtgcttgcagaaatggtggaaggtttggggcttgctgtgacagaaaccgatcatccatttgaacctgaaagcggtgcctatgcacagcatagccatgaccatcgtttaagcccaatcaaagctttacaccatgtccactcataa

SEQ ID NO: 44440 - DNA, 1701 bp, Acinetobacter baumannii
atgaaaatgtcacgtcgtgcatacgcagaaatgtttggtccaacggttggtgatcgtattcgtttggctgacacagcgctttttattgaagttgagcaagacttaacgacatatggtgaagaagttaaatttggtggcggaaaagttattcgtgacgggatgggacaatctcagcttctagctgatgaagttgccgatacagtcataaccaatgctttaattgtagattggtggggaattgttaaagccgatgtgggcttaaagaatggacgaatctggaaaatagggaaagctggaaaccctgatattcaacccgacattactattcctttaggtgcagcgacagaagtaattgcaggtgaaggacaaattttaacagctggtggtattgatactcacattcactggatctgtcctcagcaagttgaaaccgcgctgatgtctgggacaacgacaatggtgggtggtgggacaggaccagcagcaggtacttcggcaacgacagtgactccagggccttggcatatagcgaccatgttgcaggcgattgatgatttgcctatgaatattggcttgttaggtaaagggaatttaagtttacctgaccccattcgcgagcaaattaaagcaggagtaattgggttaaaactacacgaagattggggttcaacacctgcggctattgataactgtttgagcgttgcagatgagtatgatgtacaggtcgcaattcatacggatacattgaatgaaggtggttttttagaagaaacgctagcggcatttaaagaccgtacgattcatacgtaccataccgaaggtgcgggcggcgggcatgctcccgatattttaaaagcaattgggcaaagtaatgtcttgccatcttcgaccaacccaacacgaccttatacgatcaataccattgatgagcatttagatatgctcatggtttgccatcatttagaccctgcaattgctgaagatattgcttttgcagaaagtcgtattcgccgtgaaaccattgctgctgaagatattttacaagacttaggcgcaattgccatgatgtcatctgattctcaggcaatgggacgtgtgggtgaagtgattttacgaacttggcaaactgcccacaaaatgaaagtacaacgtggcccattagagggtgacaatgagtttcatgataacaatcgcgttaaacgctacattgccaaatatacaattaacccggcaattacccatggtttaagtcatgaaattggttcggttgaagtcggaaaacttgctgatctggtgttatggaagccagccttttttggtgtgaaaccttccatgattattaaaggtggcatgattgcagcggcacctatgggtgacattaatgcttcaattcctacacctcaaccagtgcattatcgcccaatgtttggggcttatccgcgtggtgtacataacacctgtattacctttttatctcaagtcgcaattgatgaaaaagttgctgagaagctaaaccttaaaaagttaatcagtccctgtaaaaacacgcgttcaattaccaaagccgatatgaaacataatacatattgtcctgttatgcaggttcatcctgagacttacgaggtgcgggccgatggtgaattactaacgtgtgaacctgctgacgtattaccgatggcacaacgttatttcttgttttaa

SEQ ID NO: 44441 - DNA, 459 bp, Acinetobacter baumannii
atgttgattagaaaagcaacgaaagatgacacagatactatcgttgccataattgctccatatgtagatcaagtgattgcaaatgacgaagggcgctcacgctttaaaccagaaatcatacaaacaatttttggtcgagaagatattcattattttgttggagagattgatcaacagatcgtgggtatagtcgcttatatggaaccctcacatttaatgcatttttttattaaaaaaacacatttgaaactaggtctagggcgacagctttgggatttcatagaagaaaaaattaaaaatgaaaatatagacattgaaaaaattacggtgaattcaagtttttatgctcaagatatctatgaaaaatttggttttattgtaagtggtgatgctgctgaaaaatggggaatccggtttatcccgatgacaaaatattatactttgccatcagaaaaataa

SEQ ID NO: 44442 - DNA, 321 bp, Acinetobacter baumannii
atgattcccggtgaagttattactccagaaactgacattgaattaaatgttggacgagaaactttaaaagttgtggtggctaatcttggcgacaggcctattcaggtcggttcgcattttcatttctatgaagcaaacgatgccttacagtttgatcgtgaggcagtcaaaggttttcggttaaatattgcagcaggcacagcaatacgttttgaaccgggacaaagtcgagaagtagagcttgttgctttagctggtaagcgagaagtatatggttttgctggtcgggtaatgggacgtttggatgaaaatgttgattag

SEQ ID NO: 44443 - DNA, 303 bp, Acinetobacter baumannii
atggaactcaatccaacagaaaaagataagttactcatttttactgcaggcttagtggctgagcgtcgtaaagcacgaggcttaaagttgaactatccggaagctgttgcatttatttccgcagccttacttgaaggtgcacgggatggtatgacggtgagtgaacttatgcactttggaacgactttattaaagcgtgaagatgtcatggatggcgtaccggaaatgattgctgaggtacaggttgaagcaacttttcctgatggttcgaaattagtcactgttcatcagcccattgtataa

SEQ ID NO: 44444 - DNA, 876 bp, Acinetobacter baumannii
atgaatcgaattcaacaaacttttcagacttcttcagcaccattttggtatgcccagttagaactgggattttgttatgaaaactctcgcaccataatgagtcaccgaaagcattatggccccgttcgggtgcaaaaaatgctctggcccgaaaaaactggggtttgtcatgccattattgttcatccacctgctggaattgcaggcggtgatcatcttacttttcaaattgaaacagaagggcaggcgcatgctgtaattaccacaccgggagcgggtaaatggtataggacaaatggaaaacaggctttccagcatatttatttgaatgtaaaagatgattctattttagagtggatgccgcaagaaacaatgctttttgacggtgctttagcccactctgaaacagatatccaccttgaacaaactgcaagttttattggatgggatatgttggtcttggggcggcaggctcgggctgagaattttgttcagggaagctatcacaaccagtttaaattatggcgcaaaaacaagttattagttgccgatactttatattttgagggaggcgatcgctggttaagctcgtgtttaggaatgaataatcaggcagtgatggctagcttttgggccgtgccccctgaaaaattccgttcttcattctatttagagcaacatattgaactcatccgtgaactcattatgcgtatggatgttcccgtgacgttgaccttattagaagatgtactgtgtgcgcgttttttaggaaatgatgtacggcgatgtcatgatgctttcgcagctatacgggctaaattaagacgttattggtttgatttagatgaagaatttccaagaatttggaaaacttaa

SEQ ID NO: 44445 - DNA, 324 bp, Acinetobacter baumannii
atgaaaatctttttcgtgttagtaccgtttgtatttttaactgggtgtatttttggccaatcaagtgaggtcaaacgtgcagaaaaacttttaaataactttcaatgtaaaaatattgaaacaagtgaaatttctacaagttcaatcaactcttattaccagcaatctttagcggtgagtaaggaaaaagcgacctcttatgtagaaagctataaaaatggtgaagaattattcgcgatgcccttagatgaagtcgtagaacagcaataccaactttataaagcagcgtgcgattctttaggtggggtttctgcccaaccataa

SEQ ID NO: 44446 - DNA, 480 bp, Acinetobacter baumannii
atgaaaaaatcattattagcaattgcacttatgagtacccttcttgtcgcatgtaataaacatgaaaataaaacagaaacaacctctgatgcatctactcctgtacaaactgctcaatcaaataataatgaagcggtagatacagcacatacagccgagaattctttagactgggatggtaaatataaaggtacgcttccttgtgcagactgtgaaggcatcaaaactgaattagaattaaaagatgataaaacttatgagctaacagaaacctatcttggtaaaggtgatgcaaacccatttgaaacccatggtaagtttactttcgataaagacaatacttctgttattaccttagatgataaagctcaaaaccgtaaattctttattggtgaaaataccgcgaccgctttagatatggaaggtaaaaaagttgaaggttctttagctgaacattatgttttgaaaaaagaagattaa

SEQ ID NO: 44447 - DNA, 1068 bp, Acinetobacter baumannii
atgcctaagttgataagtgaaaaaaatcaattacagcaactgagcctcaactcaaatgggggagttgtctatcagcccgccagaggtttttttaaagttgtctatcaaggtttaattcttcctaacctgcctgcaccacttcgttactttaattacattagtctgatcggacagcctagaatccctctttgctataacgcaaatggtattgtgacttctgcagttgatacagcaactgtactggttagcaatagcttacatagtgtagggcacttaaaaacttattccattcgacgccaatgtcagcttaatcctagtcggtatcaattcgataaaactgatcttattgagtggcaaatcccaagagttcagcttagacgaatcgattctgaaatgagttgtgatttaatcgtccaaactccttccgatatttcgaattcatcagcattgcagtggggaatatctgactactggtctattttgtgccactgtgaaggtgagattttatataaaggacagaaatatgaggtcaatggattaggccgatttaaacatgctcgggccttacatttaccttttttatctttatgtttttatacctgccaaattattaatttgaatgaatcaactcaagttacactttctcaaataagaaatcagtggaatatcattctattttcacgtttagatattcaagaactaggaaagcagcccgtcacgtttaccgaagatgttaattttcacatccaccgggtttatccaaaagttgaaacaccgcatgggcgagaaatgtatttaccacgagagttttcttggcaatgtaaaaaaaatggaaaagttatttttgaactctatggtgaaagtcgtggtgattacaaatttgggttagctgctggatacataggaagttttcgttatcaattaagttggaatgatcaatgtcttcaaggagaaggtggatattgtgaatacattgattatcaacctttaagatggcaagaaaagaatcaaaacgaaaaaatgctcgataaattgctgcttttacaaccgtgtttatataaaaaatga

SEQ ID NO: 44448 - DNA, 834 bp, Acinetobacter baumannii
atgacaaatgcgcctaaaccagagcaagatttaactcataatgaacattcttttgatgggattacgttcgaagtggttgaagaagaagataatccggaaggacaaaaagtgaagcgcagaggtatttacctttggcctaacttaatcacgacagccgctttgttgtctggtttctattccattattgcaagtatgaatggcgaatttgctcaagcgatttatgcgatttttcttgcagcattatttgatgggttagatggacgcgttgccagagctattggtgctcaaagtgcttttggtgagcaatatgactctttatcagatttgttggcatttggtgtagcgccagcaatgctaatgtatagctggagtctacatgacttaggccgtatcggtttggcatgctgttttgtttataccgcttgtgccgcgttccgtttagcccgatttaatgtccagatcggagtggttgataagcgctattttattggtattgctagcccactcgccgcgattatcattatttcactcgtatgggtagctcgtgattatccattcatttttgatttacgcgatattgctattcaaaccattaacgcggtcatcatggtggttgtaggactacttatgatttctaatattaaatattattcatttaagcaaatggatcgtaagcgtgttccttttgtagttatgttgccagtagtactgatttttgcagcaatcacttataatattccaatgggtattttgattgtatcaatcatctatgctctatcaggttttgttaccacacttttagctaaaaaaaataacgagaccatcaaaacataa

SEQ ID NO: 44449 - DNA, 858 bp, Acinetobacter baumannii
atgaattaccgtcaccatttccatgcgggcaactttgcagatgttatgaagcatgtgcttttgctacagcttctcaaccgtttaaatgctaaagataaaccttatcgttatatcgatacgcatggaggtgcaggaaaatatgatctatctcaggcacctgcacaaaagtcaggagaattcctaacaggtattcatcgtcttgtacagctttctgacatggaaaagcgccaagctcctgaagccatccagcaatacctaaaacttgtagaagaattacgtgctcaagaaggtaagggaagttatccgggctctccgtggtttgctttacaaggtatgcgtgaaattgataaggctacaatatttgaaatgcagcgtgatgtatttcagcaattacgccataacattcatgataaacgtgcaggtttgcatgagcgtgatgcatatgaaggcttgcttgccgtaattccgccaaaggaaaagcgcggtttagtgatgattgatccgccttacgaattagagcgtaaggatttcccgcaattggttgaacttttacaaagcgcttataaaaaatggccaacaggtgtcttcgcggtttggtatccaattaaagatcgcgcaatgattgaacgttttgaaaagaaaatgtttaaaactggaattcgccgtcaattaatctgtgaaatttgtgtttggccagatgacacacctgtaggtttgaatggttgtggattattagtaattaacccaccttggcagttctccgaacaagcagatcaagccctacaatggttattccctcacttacgtatgcaagaaacaggtggtcatgccgctgtacgctggttagtgggtgagtaa

SEQ ID NO: 44450 - DNA, 606 bp, Acinetobacter baumannii
atgcactctcaaccgcttcctgactgctggaatctggaccagattttagatgacttaaatgctcatggtttcgcaattgtgaaccaagcttattctgctgaatatcatactcaagttgccaaagagtgtagccatcactttgatgagtttcgagaagcggggattcaaaatggtgtggtgagtacgatccgaagcgatcatattttatggattaacgaatctcttcctgtggctgagcagcatgtagaaacattaacttcattttgccaacatctaaatcaagctttctttttagggattaaagaagtagaagcacattttgcctgttataacccaggtgaattctacgcattacatcgagataatcctcaacaaaaaaatgatcgtattatgtctaccgtttattatttacaccctgaatggcaagatgactggggtggccaattacgcttacaagataaaaacgatatttggcacattattacaccagagcctaatcgcttagttatatttcagagcaatttgcttcatgaagttttagtttctaaacagcagcgcctctctattactgcttggcttcgtagcggaaactcaatttgggtttaa

SEQ ID NO: 44451 - DNA, 528 bp, Acinetobacter baumannii
atgtctattgaaacaaaagcgattgtgtccagaattggtgaaacagaccaactctatttaactgagaatacgcccgagcttgctttggagcgtgcagaattacgtatgcagctcgttacgttaagccgtgttcgccaagaacaaattcacttcttgcaagaagccattgttttgctggaacaagctcgtatggaatatgaagagatgccaatgagtttgtatttaaacctatcgctgcatttagctaaagcttatatgctttattttgagttaaataaggaaaaacgttttgcgctgattgctcagcaaattttgaaacctctagctcatcatcaacatggcgatatatattttttcttggcttatgcgtcagcagcacagcaagagtctgcactaactcgtcattggctcacaaaatatttatcaactgctcaatgtgatcttgagttgcttcatgaacatcctatattcaatccggtacgtcatgaaacatggtataaaaatttaatcaagttaagaactcactaa

SEQ ID NO: 44452 - DNA, 246 bp, Acinetobacter baumannii
atgtttgaacaacaaccgacattacaacttttatttgagcaattgggtttagattctgatgatgcaagtattgaaaattttatcagaacgcatcaattgccggctgaacagaagttacatgaggcctctttctggtcccaaggccaaagtgattttttaaaaagtcattgggaaaaagatgatgagtggattgtagttattgatgagctgaatgagcaattacatgaagatagtgtaaaaaaataa

SEQ ID NO: 44453 - DNA, 987 bp, Acinetobacter baumannii
atgaagcaacccgttcgtgttgccgtgactggcgctgcaggtcaaattggttacagcttattattccgtatcgcaagcggtgaaatgctaggtaaagatcaacctgttattttacaattgcttgaagttccagttgaaaaagcacaacaagcgcttaaaggcgtaatgatggaacttgatgactgtgctttccctttattggctggcatgatcgggactgatgatcctaaagttgcatttaaagatgctgactatgcgttattggtaggttctcgtccacgtggtcctggtatggaacgtgctgacttgttaaaagttaacggcgaaatcttcattggccaaggtcaagcattaaacgaagttgctagccgtgacgttaaagtattagttgtaggtaaccctgcaaacacgaatgcttacattgcgatgaaatctgctccagatcttccagcgaaaaacttcacagcaatgttgcgtcttgaccacaaccgtgcgttgactcaagttgctcaaaaagctggtgttgctgtagctgacatcgaaaaattaacagtttggggtaaccactctccaactatgtatgctgactaccgttttgcaactgcaaatggtgaaagcttaaaagacaagatcaacgatccagcttggaacaaagacgtattccttccaactgttggtaaacgtggtgctgcgattatcgaagcgcgtggtttgtcttctgctgcttctgctgctaacgctgcaatcgaccatatgcgtgattgggcacttggtacgaacggcaagtgggtaactatgggtgttccttctgacggttcttatggtattcctgaaggcgttatgttcggtttccctgtaacaactgaaaacggtgaatacaaaatcgttcaaggtttagaaatcgatgaatttagccgtgagcgtatcaacttcactctaaacgagcttgaagaagaacgtgcagcaattgctgacatggtaaaataa

SEQ ID NO: 44454 - DNA, 663 bp, Acinetobacter baumannii
atgaaatatagagacctaggacttcaatcaatatcgcaacttgcatggtggatcatctgtgcaagcgttggtttgttgagttctgttttacatgcggaacctgttaacgtgcaaggttatgttatgcatgtacagatgacgcctgctgtttgtgcgctagatccttctaaacaaaagcagcgtaaatgtcttgaaggatattcgcttacgattactggtttaatgcctgaaaccaccagaactgactgttcaacacaaagctcagctacactctcaccactgcaagctaaggtggtcgctcgggtgatgcccgacaataatgctcgcgtgcaactctggaggagtgtgggtggctgtgtgcctatgaatgcaagtcaatatttccgtacgattattaactttgctgaacgtttaaaaatacctgctaatctaaccagttctactaatgtggaaatgcaacaatctacattacgtcaacaatttaccaagcttaatccgagcttacctcaaaatggtattcgcttcacttgtcagctatcacgctctgatgtcgtactaacagaagttaaagtttgttacacggtaaatggtcaatataagcaatgctcaaatcatgttgtctctaattgcccaagcgaaattaccattaaaggcagttattaa

SEQ ID NO: 44455 - DNA, 1986 bp, Acinetobacter baumannii
atgagaccaggtaaaaagagctcatcaaacaagagtcgtgtgatgaaaaataaatatgcacatcgtagctggttaggagctgtgtgtttacttggttgttcattatcttatgccgcggaagaacaatttaacgatgcactaaatgccgccaatagtggtaatactgcattgttagatcaatatcagcttgcaatgcaaaatgatgtgttgggctactatcctgaatattggaaattaaacacgaatttaggctttcaatctccgacatcaattgtaagcttcgcacagcgctatccacagtctgctatggcagaaaagctggccgcggattatgttgaagaaaaagttaaacaagctgactttgcgtctgcacaaccaatcttgccttatgtttcgaatcctgaccaagccgaaaattgtgctttagcgcaggtgagagctaaaagtggtgatgcattagtttttgctgaatataaagatgtatggttagccactgaatcgcaaccagaatcatgtattggactcggccgtatgatgctgtctagtccattaatgagtacacaagacaagcagcagcgcctgtgggtacagttacgtgcaggtttatctggacaggcgcttgctacagcacagactttgggtttgaatttgtctttggctcagctcaatcagattcaggcgaatccactgaattacttgtggtcagcaccaaaaaccaatgacgtagattacgcctatttaatttttgcactaggccgtttagcaaataatgatttaggaaatgcttttgcaaatgtacagcgagtagcgcaaggcactccagagagcgtgcaaaagtatctctatcgaaccgtagcctatattggtggaactacggtaatgaaaaacaactttaaccgtgaagtccttcaatattttgacgcaagttatggctatccgttaagtcctgaagaagctgaaatttatgcacgacaagctattcgttttagtgcatgggaaagtttaattcgtgcaattgatagtatgtcagtttcacaaaaacaagaagatcgctggcaatattggttagcgcgtgcgacagagcaacgtggcgatagtaattctaaaaacacggcacaacgtatttataaaaaattagctgaaagtggggatgattatcacaaccttcttgcaaaagaccgtttaggcgtacgatataatcatcagccgtataatgatgagccaactgcaagtgatttacgccgtttagatcaaaatattcactttaatcgtgcatttactttaagacggattaatgccaacccaacctatactaaccgagagtggaactgggctgttcgtcaagcatatcttcagcatgatgatggattactattagcggcggcaaaacgtgctcatgatatgggatggtatgaccgcgcgatttatgcggcagatcgtacaacgaataaacataatgatacgtatcgttatgtgaccccgcataagaccaatgtcgtaagccatagttacaatgctggaattgatcctgcttgggcttatggtttaatgcgtcaagaaagccggtttgttacctcggcacgctctcatgtgggtgctggtggacttatgcaaattatgccggatacggcaaagttgattgctcgccagatgggagaaacatataatccggcagcgttaagtgaaatgaacaccaatattcgttatgggacattttatttatcgatgattcaagggcaattaagtaataaccctgttttagcaacggcgggttataatgctgggccgaatcgggcaagacgttggcaacctgattaccaaccgattgaggctgatcaatatacagaaaccattccattgcttgagaccagagattatgtcaagcatgtcatgacgaatgcgacgcattatggagtgatattaggtcaaggtgctcaatcattaatacaacgtatgaaagtgattccaacgcgatcatcaccttag

SEQ ID NO: 44456 - DNA, 1452 bp, Acinetobacter baumannii
atgacggttcaaaccttcattcccaatggtgccaaagctgcctcagaaaacactgttacccagccaacgcacaccactgatgtttcaataaagaaactatatattgaaactcaagggtgtcaaatgaatgagtatgacagtcaccgtatggcagaccttttgggggattctcatgggtatgtgttaacgaataaccctaatgaagcagacattctgctcatgaatacttgctctatccgtgaaaaagcacaagagaaagtatttagtgaattaggccgttggcgtaaactaaaagaacaaaatcctgatcttgttattggagtgggtggatgtgttgcttctcaagaaggtgacaatattcaaaaacgtgcaccttatgtcgacatgatttttggtccacaaaccttacaccgtttaccgcaaatgcttgatcaacatcacgcacaagtggaaaagccaaaaaaagaaaaaattaagctcgttgacatttcattccctgatattgaaaaattcgacttcttacctgaaccacgcgtagaaggttttaaagcattcgtttctattatggaaggttgctctaaatactgctctttctgtgttgttccatatactcgtggtgaagaagtttcacgtccacttgatgatgttcttgcagaaatcgcaggtcttgctgaaaaaggtgtccgtgaaatcagcttacttggtcaaaatgtgaatggatatcgtggtgaaacattcgaaggcggcatttgtaccttccctgaattgttacgactcgttgcagaaattccaggtattggccgtttacgttatacaacttcacatccacttgagttctctgatgaacttattcagtgttatgaagatttacctcaaatggtttcacacttacatttgccagtacaaagtggatctaacgatgtactcaaagcaatgaagcgaaatcacacgattgatgtatacattgataagattgccaagttacgcaaaatacgccctgatatgcatttatcgagcgatttcatcattggtttccctggtgaaacggatgaaaattttgcagaaacattgcaatttatcaaagacttagattttgatcactcttatagctttgtttactcaaaacgcccgggtacaccagcatctgacttaccagatacaacccctgaacacgttaaaaaagaacgtttagcacaagttcaacaagtcattaagcaatctagtattgaaaaaactgacgcaatgcttggcaaaattgaacgtgtacttattgaaaaagtatctgatcaagaccctaatattttagtaggtacagcagacaatacacgtttagtgacttttgtaggcgatgcatcgtgggttggtcgttttgcagagattgagattactgaaattaaaactttaaatttagtttacggtgaactcttgaatcttgagcctgacgtggcgtaa

SEQ ID NO: 44457 - DNA, 1089 bp, Acinetobacter baumannii
ttgactgcagcgattcgacgtaccgtaacatttcctgaaatttcaatggaacgtttaaagagcatcttgggtgcctataatgggcaccttaagcaaattgaacagcgtttagatgtcaaaattactcatcgtggagatgttttttacatagatggtgagatagatgctgttgggagagccgaagcgttattgcaacgactctacgaagaaacagaggcgtcccaacaaatcagtgctgacctgttacacctcttgattcaatcttcgcaaactgaacgaaacttcgaactagttggcgaagaaatggatgagcatgatgcgcccatggatgtctatttccagactcgaaaaggtcgcattaatccacgtggtgccaatcaaaaacgctatgtacaacgtattttacaaagcgatatttcttttggtgtaggccctgctggtacaggtaaaacttatttagcagttgctgccgcagtggacatgttagaacgtaatgaaatccagcgaattttacttgtccgccctgcggtagaggcaggagaaaagctcggtttcttacctggtgatttaacccagaaaatcgacccatatctacgtcctctttacgatgccctctacgaaatgctgggcttcgaaaaagtcgccaagttaatcgaacgtcaagtgattgaagttgcaccacttgcttatatgcgtggtcgtactcttaaccattcatttgtgattttggatgaagctcaaaacactacaccagaacaaatgaaaatgttcttgacccgtttaggttttggctctcgtgcagtgattacaggtgacattacccaagtagatttacctcgaggccaacaatctggtttggcacacgcccttcgcgtacttgagaacattaaagaaattcatattacccgtttccattcccgcgatgtagtacgccatcaacttgttcaaaaaattgttgaagcttatgagggttgggatggtgaacaacagcgtcttaatgctgaagcacgtgctgaacgtaaagcacgccaagaagcattaattgctgaaaacgatacagcagcagacttgcaacatcaggatgcttaa

SEQ ID NO: 44458 - DNA, 477 bp, Acinetobacter baumannii
ttgaaaatcagtttaagtttacaacaagactttcaatcccctgagttagagctcaaacgagctcaactcaaaaaaattattgagacaactttacgccacgttggctataaagaagattgcgaaattggtatcgcatgtgttgatttggaagaaagccatcaacttaacttgcaatatcgagagaaagataagccaactaacgttctatcttttccaagtgatattcctgaagaagttttaccaatgctcgacgcattaccgttgggtgatttagtaatttgtattccagtggtattacaagaggctctggaacaaaagaaaaccgcacaaaatcattttgcgcatcttttagttcatggggttctacatttacttggttatgaccatgaaacaagtgatgaggatgctgaagaaatggaaggtttagagatcgaaatcttagctaaactcaatattgccaacccatatcaggaataa

SEQ ID NO: 44459 - DNA, 885 bp, Acinetobacter baumannii
atgttgaaaaaaagaagtctatccatagagcctttttattattggtggcaagaccgagtctttatcgctgcaataatattagcaatcttactgcatatttttgtgttgctcatccattttgcgatgcctgcgccgtcagaacaatcgactaaagaaattgcaatatcgattcgtcctactgaagatgtaatcaagcatgcagactttttagcccaagctgatcaacaaggttcaggggcttttcgggaagctcatcggatgtcgagtaactctccagcgcctatgccaagtgatgcttcaacaggagaagctcagctagaaactttagaaaaagtgcagcaacaaagagaacttaaatttgaagaaaaagtactcatgactgtattgagttggcagaaacaagcagaggagagccaaagaaaaaaagcacttgaacaattacaaagtcagtttcaggcaaaagctgccatggtagcgagtcttgaagctcagtatttacaacgtcagcaagattttagtcgccaacaaaagataaaaacagtagatggtattcaagccaagaaagatgcgtcagcagcttatctagataaatttcgtgaaaaagtagagctttatggcaaccgttattatccagaagaagcgaaacagcaacagttaaaaggtgaagttcgccttatggtaattttgaatgctcaagggggaattcgtgcaattcgtttgcttgaaagctcaggtcatccagttctagatgaagcagcaaaggcatcggtacggcgtggagcgccgtttggccgttttgatgcaaatatgaaagatatttcggaacttcgtattattcgtacatggcgttttgatccagctgaagctgaatttgaagttcattaa

SEQ ID NO: 44460 - DNA, 672 bp, Acinetobacter baumannii
atgcaaacgctattttcctcattagtcaaacgtcttcataaagtctaccgaaaagctgaagccttcattgaggaagaaagagattttacattatcgcaaacttttctaaatgcgaccttagaacgctacgtgactaataatgtcgagtttttagatgatttacatgcagatctttatcatgactggttaagactctatgccacaatgcatgttaaaggtttagagaccactttgtcggtcgacttaaaacttatccagatggaatttaataaagaacaacaacttattgtttttgagcaaattagtaatacacaaattgtagaagctaaatataaaaatttctggcaaaaaattgctgtaaaagcggctattttttactatcacaaaattctaaaaaaagatccattaggcatgattctggagcgatttgatgtagcccaagaaaaagatgacctgatcttcttagaccttaaccgttggtttgctaaaaaggccagtattattgaaaccttaggcaaggttcatatcaactatgcacgagtacgtgaagcagaattagttgtctttggtaatgttaatctggctgctttacttttccgtgatcaagatgatgattctgaagatgaacttggagacactgaaattacgccaatacagcaaaaagatgtataa

SEQ ID NO: 44461 - DNA, 714 bp, Acinetobacter baumannii
atggcaacaaaatttctgaaatcattcagcatcgcaactggtatttcgacaactttgcttattgcaagtttctctagccacgcacttgccatgagcccatttcaggcaaattatcagtttacctacaataataaaggtatgggttcagcgacacgtgcattgagtcaacaaggcaataattggacttatcaattcactgcaaaagcaggtggaatcgcttctgcaagtgaaacaagtaaatttagttttgcaaacggtaaaattggttcacaaagctttagtcgtaccagtaaaattttgatccataacaacacaatgagtattaattttaatcctggcaataagactattagcacgaaaaaagacgataaagcgcgctcattcgcttggcaggcaggtgtacttgatgagctaaatgcagaattacagattcgtgaagatttaaaaaatggttcacttaaatcgtcttaccctctagccgatgcaaaagaagttgaaaatcgtcgttttgttaaacaaggcaacgagaaaattaaaacctcttatggcacatttgataccgtgaaagttgttttacaacataagaaacctgagcgcagcacaattttctggctagctccgaaattagactaccttccagtcaaggttagtcatattgatggcaaaacatcttatggtttgttattaacaagttatacaggtaaaacgaattaa

SEQ ID NO: 44462 - DNA, 576 bp, Acinetobacter baumannii
gtgcacgcactagaacagaaaatcttaacagaaggtatcgttctatctgatcaagtgttgaaagtcgacgctttcttaaatcaccaaattgaccctgtactcatgcagcagattggtaaagaatttgccgctcgctttaaagatgcagggattaccaagattattaccattgaagcttcaggtattgcgccagcaatcatggcaggtttagaacttggtgtacctgtgatttttgctcgcaaatatcaatcgcttactttaaaagacgatttataccgcgctaaagtgtttagtttcactaaacagacagaaagtaccattgccatttcaaataagcacatcaactcaagcgacaaagccttagtaattgatgacttcttagcaaatggtcaagctgcgcttggtttgattgacttaattcatcaagcaaatgcagaagttgtaggtgtgggtattgtgattgaaaaatcattccaaccaggccgtgatttattacttgaaaaaggttaccgcgttgagtcattagcgcgcgttcaatcacttgctgatggcacagtaacttttgtaaaagaataa

SEQ ID NO: 44463 - DNA, 594 bp, Acinetobacter baumannii
atgcaaccttacattcttgtgctttattacagtaaatatggttcaactaaagaaatggcgcaccttattgcgaatggtgttgaatcggcaggtatgaatgtaaaaattcgcacagtacctaatattgcaacagtggtaacagaagctgagccaagcattcctgaagaaggtgatatttattgtactttagaggaactggccaattgtgctggcttagcgctagggtctccaactcgctttggaaatatggcaagcgaaatgaaatatttttgggatcagaccacaagcctttggttaaatggtgctttacataataagccagcatgcgtttttacttcttctggttcaatgcatggtgggcaagaaagtacgttattaacgatgttacctccattatttcatcacggtatgatgattttaggattaccaaactctattccggctttgtcgaatactaaaacaggtgggactccctatggcgcaagccacgtgagtggtccaagacatgatcaaagtttaagccaagatgaaaaaattttatgtgaagcacaagggaagcgcttaggcgaaatcgtaaaaaaacttcattcttaa

SEQ ID NO: 44464 - DNA, 1248 bp, Acinetobacter baumannii
atgttagaacgttttttgaagaagcttcctttttataacaagacctggtttcaatttattttattcgtaattaagcgttttgaagcggatcgttgccgtgaacaagccggctccctcacctatacgactctttttgccgttgtacctatgttaacggtatttttagttattatttcttcaattaaggcattggaacctgccagacaacagttacagcacttaatctacagtaattttttacctaaaagtacgattgcttttgataaagctcttaatgcttttaccgaaaagtccagtaatttaactgtaattggtgtgctattcctctttgtcacaacagttttaatgcttacttcaattgaaaccgtttttaaccgaatatggcgagtaaaagaaacccgtagcggtattgtaggctttatgcgttactggaccattatttcgcttggtccaattattttaggcagtgcatttgttatttcatcaactgttgcttccatgaatttattgagcaataacttcacaggttatcaacttgatggcgcctttttactctggcttatttcttttgttctcacaattttaggtttttttattttatattggactattcccaaccgcacagttcccctatatgcagcagcaattgctgcatgcttaagtgctgcattatttgagacactcaaaaatttatttagctttgttatgtcaaatttcaccagttatgaaatcatatatggtgcgtttgcagcagtacctatttttctattatgggtcttcttatcttggaatattgtattgcttggtgtcgaggtgagttttgctcttaccgcttttcattcaggcaaagagcaaaaaagacatccggttttaatgctactcgacatcttggaattgttctataaaaagcaaaaacttggtgaaagcgtaagtgataaagaagcattagaaattttaggtcgtggtgaagttggccgttggcctgcttatgttctcttactagaagagcaaaatctggttaaacgtaccgataaagatgaatatgttttggtccgcaatttatctcaagtcgacttttggagcttcttcactgcactgccttatccattacctttacgtcaggatgtatcaaatgtgcatgatgatgacgaatggatggaaaaaattggcccagctttagtagagtctaatgattatttagctgcaaagctctctattccactttcaacaattttcgaagagaaataa

SEQ ID NO: 44465 - DNA, 915 bp, Acinetobacter baumannii
atggaagagcgcaaaaatctggataccagagcttcggctttaatggtgcttttatgtatggtcttagggctgcaacaggtggttctgaaaatagcagcaccagatatttcgccgattatgcaaatcgctttacgttccggcttatctgctgttctagttttacctttattgtggcgagatcattcgattcatctattttcttatagacaatgcaaagctggcgctcttgttgctttatttttttcattagaattttatttcgtcacccaagccttaaagtttacctctacctctcatacagtagttttactgtataccgctccaatttttgttgcattagggcttcattggaaatttcctactgaacgtctgaatcgagcgcaatggggtggcattactctggcttttatggggatcattcttacattttacccaacaactatagctacaaatgcgccagctctagcacaagttttgttaggcgatttatatgcacttatggctgggcttgcatgggcactcagtacaattattgttcgtttatctcctttagctcaagcgccggcaactcaaacattgttttatcaactgtttggctgttttgttctactcttactaatcgcttttttaacaaatcaaacaacaattcatttcaccactttagcgatcttaagcttaagctttcaaactttaatcgtatcttttgcaagtttactattatggttttggttattaagaaattatcttgcatcacgattaggggtattttcttttttaaccccattatttggtgtgttatttagtattttgttattagaggaaaaactagaaattaaatttatttttggaagtattttagtgttgtcaggaattgtcatcatgagtctaaagcagggcaaagctaacagcagctaa

SEQ ID NO: 44466 - DNA, 795 bp, Acinetobacter baumannii
atgaaaaaatcagctcaacgtgtgcaggattttcaagaaattccggctcataacgcaattcctgatttgctttggttccgtgttcgtaatgcacccgcagaaacggtttatcctcaacatgcgcatgcatggggggagtttatttatgcgtttagtggtgtactcgaagttaatattgatcaaattaattatttaaccccgccaccttatggtatttggctacctccttacaccaaacacagtggtattaaccgcaacgaagtgactcatgcaactttatatgttcatgaaagtctttgccaaaagttaccacagaaagccggtatcctattaacgtccccacttgtacctgctttactcgatcacttgaggcaaaacccacaagatgaaacccaagtcgaatatatacgcctactccaagttttattagatcaactcatacaggctgaattagtgggtagttatttacctacaacagatcatccagctttagcaaaaattctaaatgatttacatcaatgccctgccgataacagcaccttgcaagaattagctgaacgaataaatatgactgaaagaacattggcacgttacagtcaaaaagagctgggaatgtctttacatgaatggaggcaacgattaaaagtaatgaaagcaatgaccatgcttaatcaaggaaaaaccatagaaagtatcgcttttgatttgggctatgccagcgcatcggcatttatttatatgtttaaacgttggatgggttttaccccagaccagttccgaaagctctatcaataa

SEQ ID NO: 44467 - DNA, 642 bp, Acinetobacter baumannii
atgaaaacacgtccttcaaaaatcgtttgtgtgggcagaagttatgctgatcatgtaaaagaactgaacaatgcaatgccaggacgtccggtgttatttatcaaaccaccaagtagtttgattggtttagatgaaggcatttcatggaatcctgcgtggggtagttgtcatttcgaatgcgaatttgttttacgcattgatcagccactaaaaggagaaactgatccgcaaaaagtattgcaggctattggtgcagtgactttagggttggatttaacattacgtgacttacaaaatgagttaaaagataaaggccaaccttgggaaagagcaaaggcttttgatggttcatgtgtgcttgcagactgggtagatgtaagtgaaattacgaactgggaagagactagatttactttccatattaatgatgaattacgtcaagacggtaatactgctttgctcatgtttaatattgcttatcttttagtagatattaatcaggtgttctcacttgagccaggcgatgtcattatgacgggtacacccgcaggtgtagggccattaaatgctggcgatcagctaaaaatgactttgaaaggggctactcaagattttgtttgggaaacttttgttaaagcataa

SEQ ID NO: 44468 - DNA, 498 bp, Acinetobacter baumannii
atgaccgagcaaaaaagcgctttatctttacgttattatttaaatttagaagagtctcaagacggatttggcttggtgacattcggaaagaggcaattcacacggtttttgacacctgttattagtattgcaattattatttggggcttatatttaggcttttcaggtgttggccgctactatgttgctttaggcgttttcttcttggttatgcaaggtctaatgcgctactggcttttacctatgatgtttaaacgtcaatttgtacgttatcaatttggtaagagcgagcaaggaatcgatttatatcaagattattttgagctctatgctgctgggcgtaaacaagctgtacagtatagtgaagtgcagacttttgctaaaggcaagctgacttatatgcttgagcttaaaaataaaacggtcatcattgtaccgaaacgtgcatttgctcaggcttcagatcaaactatatttgaaaatacatttaagaaataa

SEQ ID NO: 44469 - DNA, 693 bp, Acinetobacter baumannii
atgtctttctttgcaaaactatttggcttcaaacaaaaaacaacagctcaagaagatgtggctttgaaagctgctaaagagctagaaccttcaaatgaaacctcttttatagaacttattaaaaaccgccgctctatttatgcaattggcaataacttaagccaatcaaatgatgagattgaaaagttaattcaagaagcaataagacacagcccttcagcttttaactctcaatcatctcgcgctgtgatcttatttgaacaatctcatcataaattctggaatacagttctagaagttttaaaaaccattatcccaactgaagcggtatctggaacacaacaaaaaattcaaagctttgcagcaggcgcaggtacagttctgttttatgaagaccagagcgttattaaaagcttacaagagcaatttgaactttatgctgataattttccgatctggtcagaacattcaacagccattgctcaatttgcagtttggaatgtattagctgaacaaaatattggtgcttcattgcaacactacaatccaattattgatgagaaaattaatacctcatttaatatcccagcagaatggaaactaagagctcagctagtttttggttctattgaaggcgcagcaggcgaaaaagcttttattgatgatgaaagccgcttcaaaacattcggctaa

SEQ ID NO: 44470 - DNA, 216 bp, Acinetobacter baumannii
atgagtaaaaatgaatttaatacgcgttgtgtatgggccggacatgacctttcagcgtgtaattgtatttataattctttagagcagcattattcacctcaatttgtagaaagtttaccaaaattaagtttgcaaaatattgatgcaaaaatgaactttgtagaaaccatgaatcaaacaatgcagcagtgccaattgagtgcgagcaaacactaa

SEQ ID NO: 44471 - DNA, 906 bp, Acinetobacter baumannii
atgtcttattttgatatcaatcgttctggcgagttagcaatttttataagggtggtcgagcttggaagtttttcagcggtagcaagagcatgtaatatgacgccgtctgccgtaagcaagttaatttctcgtttagaaaaaagattgggtgtcaggttactcaatcgttcaacacgtcagtttcagcttaccagtgaaggatgccagttttatgagcaaggcattcaaatactcaatggcttggacgaactggaacaatcggttaccgcaaatcatataccgaaagggcgaattagaatccataccagtttttcatattggacacactttttattgccatgcattagtttgtttaatcaacgttaccaggaaattgaattagaagctcatttgagtgatgaagtaattaatttggttgaacaaagaattgatgttgcgattcgaacaggacctttgaaaagctccaatttggtggcccgctcgcttggcagtacttataaacagtatgtttgctctcctctatatattgaaaagtacggttgtcctgagcatccagatgaactacatgaacatcagcttttagatgtaagttatcaacgccagaacaaaacctggttattcaaaaaagcaactcaggaaatcagcctaaccccctctaaagttttaaaagtaaaccatggcgaagcaattttacagttggcactggcaggtgctggcattgctcaactaaatgaattccagattcgaaatgcgttacagcaaaaacaactcgtcaaaattcttgaagattggaatattcatgcttctgaagaatttcatgctgtctggattggccacgataagtatgttcctaatcgcgtacgtacattcttggattttttggtagagcatgcctctataaattag

SEQ ID NO: 44472 - DNA, 1239 bp, Acinetobacter baumannii
atgaaactttatcaagctcccctattttctttggttttaattacgagctttgcacaagctgatgtagaaaacagccaatggattaccacttggtctgcgagccctcaaaaagtctggaataaagacttcgtttttccaacactcattccagagcaagtatctaatcagactattagacaaatgagcaaaattagtttgggcggtgaagctgttcggctcgtttttaccaatcaatatggtaaacagccactttatattgatcaaacaacgattggtttagcgaacgcagcaactctaaaatctaagagcacctatcccgtttatttttctggtcaacttaaagcaagaattttacccggcaaacaactcataagtgatccaattcagttgcctgtacccgatcatgctcaattagtggtgaatagctttattcaaaagcctacaatgtttaaaacatttcattgggatgccaaacaaaccagttggctgattagtggaaatcagacaacaaatttaactacaccaaccgatgccaaaacaacgacggcacggttattactgtctgcaatagaggtaaaacccaaacaaaaggctcatgtagttgcagttgttggagattcaattaccgatggggcgactgcaaccttagatgcaaatacaagatggaccgattttttagcgaaacgtttatcagcacaccaagtagcagtgattaatagtggtatttcaggaaatcgattacttaccgatggtatgggcgatagcgttttaaaacgtttaaacagtgaggtatttcagtatgcaggcgttaaaactttaattgttttggttggtatcaatgacatttcatggcccggtacagcttttgcacctaaacagcaaataccctcttttgaggcgctcactcaaggttatcgacgtgttgtaagtgaggcccataaacataatattcaggtgattggtacaaccttacttccgttctctggtgctttgcctaatacccctttagataattattatcaacccaacaaagatcaattacgtcagcgcattaaccactggataagaactagccatacctttgatggtgtgcttgatcttgatgaaggcttaaaagatccaaaacatcccaatcgattaaatccaatttatgattctggagatcatttacatcctaatgatcgcggcaatcagcatatggcagaattggtagatttagatcaaattattaaaaattaa

SEQ ID NO: 44473 - DNA, 1287 bp, Acinetobacter baumannii
atgatgaaaattttaaatacaacggttcaaaaaagcttgttggcagtttctgtgactctgcttatgtcttctgcttttgcaggccaagtaaacccagaaatagagcaacttcgccaagaaataaaagaactacgagctatgctacaaattaatatggaggctcaaaaatctttagctcaaaaaagagtagaacaagctgctcctgtagttactcaagctccaccacctatacagcaaacattaactaaatctggtgcggaatttaacttatacggttatatacgagcagatgcttcttatcaaattaagggtgcatctagcatgtataacaatattagcggcgttcctcttgaaaatacgccagaagaatctgcccagaaagaccagttgcacagtactgtgtatgtgacacgctttggattgaattttaaaacccctacagccgttggtgacgtaggcggaaagttagaaatggacttttttggggcggctacacgtgatcagtttcggatacgtcatgcctatttaacttttgataaatggcttattggtcaaacatggtcgacatttattgcccctgaatattatccagaaacgattgatgcaggtacatttgtaggtagtgcattattaagatcaccgcttgttcgctatagcgataacttaacggcaaatacaagttttgcagtatcagttgaagacccgaaatatactgcggcaacagatccagataataaaatgcgtttacccgctttagtggggcgtttaaatcataaatttgccaatggttcaatgctttcaggccgtagttttgttgcagaaaaaagaactaacaatgatagcgagtgggcgtggggggtaggcttgggcggtaaatatcaaattacccctgatacattacttaaagccgattattaccatgttaagggtgatggacgtttcttgctatggagtaacagtggctatgcaatagatgatcaaaataatatgcatagcaatgaatttgacacggtttctttgggtatcactcatcaatttacaccgcaaattcgctcgactttaggctatggctatatgaaggctaaagatgataaccgttttgccgaattacagcgtactagtaccacccaaaacaaacagctttggcaaggttgggtgaatgcactttataacccgtataagccgattactttgggtatcgaatatgtttatggggaacgagaaacatttgataatcgtaacgggattgataaccgcttcaacatgatagcgagttatgatttttaa

SEQ ID NO: 44474 - DNA, 672 bp, Acinetobacter baumannii
atggcaaaagactttaatagccctaaagtagtcgaaggatatgatgcgcatattcgtaaattaattccgggctatgatgtgatccaccaacaggtggatgccattttgcagtcggtgttgcgaccagatcctcatatcttaattgtgggctgtggtacgggttacgaactcgaatatttacttaaaagacatccaaactggcaatttacagcggttgatccatctttaaccatgctgcaaaaagctcaggagcaggtggagattttaggtaaatctacccaagtcacttttgttcacggtgaaacttcagctttacctctcgagagttgctttgatgctgcactttctattctcgtggctcattttattgcagatgacataaaaccagccttctttaaggatatttatgatcgcttaaaagaaaaggcgcctttacttacctatgacctcatgacttgtgtaaatctacagcagcttcaagcattacgttatttgtgtttggctcaagggttaacagaagaacaatgtcaaaaaatgttggagcgtatggctgaggacttttttagtttaacgactgaaggatatataaaacttttggaaaagacaggctttgaaagcgtacagccatatacgcaaattttgacttatcaggggtttatggcaaaaaaataa

SEQ ID NO: 44475 - DNA, 1695 bp, Acinetobacter baumannii
atgcaacaagaacggttaagctacgcctcgggaccaagtacacaacccttattgggtatgaccattggtgaacaatttgatcaggcctgtcagcaatatgctgaaaaggaagcgattgtcagttttcatcaaaacagacgattaacctataaagctttacaggatgaagtaaacgcttttgcttgtagcctattaaaattgggattaaaaaaaggagaccgattagcgatttggtcacctaactgtgtggaatggaccattacgcagtttgcagcttttaaagcagggattattttagtcaatctaaatacagcttataaaagtcatgagcttgaatatgtgttgaataaggtctcatgcaaaggattgattattgcttctcaatttaaaacgacggattaccaagaattactcacaaaaattgcccctgagttaactacctgtacagataaagtgctcagttcagagcgactgccacatttaaaatttgtcattaaaattgatgaccaacaacatactggtatttatcgttttagtgatttactaactacaccaacttctgaacagctagaacaattaaaacaattagccagacagctccagtttgatgaaactattaatatccaatttacttcaggcacaacaggtaacccgaaagggaccatgttaacccatcataatattttaaataatggttattttgtcggtgaaggcattcgtttaaccccccaagataaagtctgtatttctgtgccattgttccattgttttggcatggtgatggggaatctggcgtgtgtgacgcatggggcaaccatggtctatccatctgctgtatttaatcctttggaaactttaaaagcaattcatcaagaacgttgtacggcagcttatggcgtaccaaccatgtttattgcaaccttagagcatgaacagtttaatgattttgatctgtcgagcttaagaacaggcattatggcaggtagtccttgtccacgtgaaattatgcaacgtgttatagaccgaatgcatatgtctgaaatcaccatttgttatggcatgaccgaaacctcgccagtgagtgtacaaagctcggtaaacgattcgattgataagcgagtaagcacagttgggcatgtccatccacatgttgaaattaaaattgtcgatttagaagggcaaattgttccgcaagggactttgggtgagctatgcgtccgtggttattcagtgatggctggttattggggtgaagaggaaaagacccgtgaagtgattgatgcggctggctggatgcatacgggtgacattgccgagatggatcaagacggttttattaaaattaaaggccgtattaaagatgtcgtgatccgtggtggggaaaacctctttccaaaagagattgaagactttttatatactcatccagacgtaagcgatgtacaggtgattggcttgccagatgcgaaatatggtgaagaactttgtgcatgcattattctgcatgagcatcaccaagtcgatgaagacagcatccgccaattttgcaaagaacacatttcacacaacaaagtgccgcgttatgtccgattctttaatgagtttccaatgactgcttctggtaaagcccaaaagtttaaattgcaggaaattatgcgagctgaacttaatttaacgggaaatgtctttgactaa

SEQ ID NO: 44476 - DNA, 618 bp, Acinetobacter baumannii
atgagctataaacgatcatctttaatgcaagagcggatggagcaaaatcgtaaatcgattttgaattcagctagaaaaataatttcagaaggaggatttaaggacgcacaaatacaaacaattgcagagcaagcaggtgtatctagtggactggtttatcgctacttcgataataaaagccaagtgctaatagaagttttgtctgatgccattaatacagagctattggtcatcgattcgattaccgaaagtgacttatcggcaaagcagaaattacacaaggcggtggcaacttttgtaaaacgggcactgaatagtcctcagcttgcgtattcactcatgtttgaacctgtcgattccacggttgaacatgaacgttttcgtgtgaagcaattgattaaacaaagtattaaaaaaatacttgcggatggaaatgcaagtggtgagtttgtcttggatgatttaaacacagcagcactttgtgtagtcggtgctatgacttatgtggtggttgaacccctagacccagctcaaaatacaaagtttgatcatgcgcacaaagactatttttcaaaacagattgctgacttttgtgtagatgctgtgcaaaagaaatag

SEQ ID NO: 44477 - DNA, 1173 bp, Acinetobacter baumannii
atgaacctacgcagcttgaatttcggtctagatgaaactttaattgcgcttcaagattcggtagccgcattttgtgcaaaggaaattgcaccaattgcccaacaagttgatcaagacaacaaattccctgcacatctctggaaaaaattcggagatatgggccttttaggtatgacggtttctgaagaatatggcggtgccaatatgggttatttagctcatattattgccatgcaagaaatttctcgtgcttcggcagctattggcttgtcatatggtgctcattctaatttatgtgtaaaccaaattaaccgtaacggtaacgagcagcaaaaacagaaatatttaccaaaattaatttccggtgaatatgttggtgcccttgccatgtctgagccaaatgccggctctgatgtggtcagcatgaaattacgcgccgagcaaaaaggtgatcactttgttttaaacggttcaaaaatgtggatcactaacggcggtgatgcagatgtactggtcgtttacgctaaaactgatccacaagctggcccgaaaggcatgaccgcattcttgattgaaaaaggcatgaaaggctttagtcacggcaaccacttagacaaactcggtatgcgcggctctaacacttaccctctattctttgacaatgtagaagtccctgctgaaaacgtacttggtggtgtgggtaacggggttaaagtactcatgagtggtttggactatgagcgagcagttttaagtgcaggacctttaggcattatggatgcttgcttagatgtggtgattccttacttacatcagcgtgaacagtttggtcaggctttaggtgaattccagcttatgcaaggtaaacttgccgatatgtattcaacatggttggcatgtaaagctctcgtttatgcggttggtgctgcctgtgacaaagcggatcatgaccgcagcctacgtaaagatgctgcaagtgccattttatatgctgccgaaaaagcaacatggatggcgggtgaagcaattcaaactttaggtggtaacggttatatcaatgaattccctgctggccgtttatggcgcgatgcaaaactttatgaaattggcgcgggaacttctgaaattcgccgcatgctgattggccgcgaacttttcaatgaaaccaaataa

SEQ ID NO: 44478 - DNA, 1602 bp, Acinetobacter baumannii
atgaaccaattacaaagcaagattaatgttcgaagcgaagacttcaaaacaaaccagcaagccatgcaaacattggtcacagatctcaaacaagttgcccagcgtattgctttaggcggtggtgaaaatgcccgtcaaaaacatttggctcgaggtaaacttttaccccgtgaacgtattgatcaactgattgatgtcggcacggcatttttagaaattggtcaattggcagcgtacaacgtttatgaagatgatgttcctgctgcgggtgtgattgcaggtattggtcaagtcaacggcatcacttgcatgatcgttgctaacgatgcaacggttaaaggtggaacgtattacccacttacggttaaaaagcatttacgcgcacaagaaattgctgaacaaaatcacttgccttgtatttatttagtagattcaggcggtgcctatttaccaatgcaagatgaggttttcccagaccgtgatcactttgggcgtattttctataatcaggcacgcatgtcgagtcttggtattgcccaaattgccgtagtaatgggtagctgtaccgcaggtggtgcttatgtaccagcgatgtctgatgaaacgattattgtccgtaatcaaggtacgattttcttaggtggacctcctttggtaaaagctgcaactggcgaagtggtaagcagtgaagatttaggcggtggcgatgtacacacacgtctttcaggggtagctgaccatttagccgaaaatgatgaacatgcaattgcgattgcgcgaaacattgttgcgaacttaaataaaaagccaaatgagttaaacaaacaaattgatgaaccattatttgatgcatcggaactctatggcgtggtgccaagtgatgcgcgtaaaccttttgatgtacgtgaagtgattgcgcgtattgtagacggctctcgttttgacgagtttaaagcccgctttggctcaacacttgtaacgggtttcgcttctctctacggcatgccagtcggcattattgccaataacggaattttattttccgagtctgcacaaaaaggttcgcactttattgagctatgtactcagcgcaatattccattgttatttatacaaaacatcactggctttatggttggtcgccagtatgaaaatgaagggattgccaaacacggcgctaaactggtgatggcagttgccactgcaaatgtccctaaactcaccctaattattggcggttcatttggtgcaggtaactacggtatgtgcggccgtgcttattcaccacgctttttatggacttggccgaactcacgtatttcagtcatgggcggcgaacaagcagcaagcgtactttcgactttaaaacgtgaccagattgagcaaaaaggtgccgagtggtcagcgcaagaagaagacgaatttaaacaaccaattcgtgaacaatacgagcgccaaggccatccatactatgcttctgcccgcctttgggacgacggtgtcattgacccagcgcaaactcgtcaggtacttggtttaagccttgctgcggccatgaatgctccaatccagccaaccaaatttggcgtgttccgcatgtaa

SEQ ID NO: 44479 - DNA, 804 bp, Acinetobacter baumannii
atgagctatcaatttttacaactcgaacaacaaggtcaggttgcctatgtttggctgaaccgccctgaattgcacaatgcttttaatacgacagtcattgaagaattgcatacttgctttaagcaaattaatactcgtgatgacattcgtgttgtggttttagctggtcgcggtaaaagcttttcggcaggtgccgacctcaactggatgaaacaggcaggtcaggcatcttcagcagaaaatgaagcagatgcattaaaacttgcgcaaatgcttgatgcacttgcaacacttaaacaaccgactattgctcgcgtgcatggcattgcctttggcggcggtatgggcttagcatcggcatgtgatatttgcattgccagcactgatgccaagtttgcaacttctgaggttcgtttaggacttgctccatctaccattagtccctatgtgattcgtgcgattggtgcaagacaagcctctcgttactttttaactgccgagcggatttcagcacgtgaagccaaacaaattggtttagcacacgaagtagcagatgctgaagacttagataaaaaagttcaagaaattattgatgctctattactcggtggcccgcattcccaagcggcctcaaaacaactcattcaaatggtgagcaaccagaccatgagcaatgacttgctgcaacagacagcacatcatattgctcaagttcgtcaaggcagtgaggcaaaagaaggtctaagtgcctttttaaataaacaacagcctgcttgggtttctaactcgaataacaacaattaa

SEQ ID NO: 44480 - DNA, 1992 bp, Acinetobacter baumannii
atgtttgaaaagattttaattgcgaaccgtggcgagattgcctgccgcgtaattcgtacagctaaaaaattaggtattagaacggttgccgtttactcagatgcagatgcaaatgcccaacacgtcaaacttgcagatgaagcggtttatattggtcattcccctgcaacacaaagttatttacaggttgatcatattattcaagctgccattgatacaggcagccaagcggttcatccgggttacggcttcctttctgaaaatgaccagtttgcactcgcttgccaacaacacaacatttgctttattgggccaccagtggatgccattttagcgatgggcttaaaagcgacctcgaaagctttaatggaaaaagcaggtgtccctttaacaccgggctatcacggaaccaaccaagatgctgactttttaaagcaacaggcagaccgaattggctatcctgttttaattaaagccagtgctggcggcggtggtaaaggcatgagtctggttgaacgcagtgaagattttctgcatgctttagcctcttgtaaacgtgaagccaaatccagctttggtaatgatgatgtcttgattgagcgttatgtgattcaaccgcgccatattgaagtgcaagtgtttggcgatacacatggcaactatgtacatttgtttgaacgcgactgttctgtacaacgccgacaccaaaaagtgctagaagaagcccctgctccacaaatgccaagcgagaagctcgatgcaatgcgccaagctgcaattgatgctgcacgcgctgtaaattacgttggcgcaggtacggttgagtttattgtagaacaagacggtacagcgtatttcatggaaatgaatacccgcctacaagtcgagcaccctgtcactgaaatgattacaggtgaagacttggtcgagtggcaacttcgcgtcgcttatggcgaacctttacctaaactacaaaacgaattgcagattcatggacatgcgcttgaagcacggatctacgctgaagaaccagaaaaaggctttttacctgctattggtaaaatcgactatttgcgctacccaactcaaaaccaatatgtgcgtgtagacagcggtattgttgaaggcgatgaaatcacgacctattacgacccgatgattgccaaactcatcgtctggggtaaaaaccgtgaagctgcgcttattcaaatgcaaaatgctttaagccaattccatgtcgatggtttaggcaacaatattgcctttctggaaaagattgttcgtagcgaatcgtttaaacaagccaagcttgataccaacctgattcaacgtgaacaaaacttcttgtttagccctgaagagatcaaaccggaactggtggtagcagcggcatttattgagtttttaagccaacttaataacaacagttcaagccaaaaacagctttggcaggctcaaccgctttggcgtttaaatattgcctatcagcacagtattaaactgaactatttaaaccaaaatattcaaatcaaatttgcctcaaatgaagatggcttcaccgcagaatataacggtcaaagctacccaatttcaggtcaattgattgatgctcatactgcctctgttcaaattggtgggactcagcaaaagctatcttttaaccaaagtcagcaaggcattaccttgttccaaaatggacaaagctataagtttgtttatatttgccaagattttaatcaggcagatagccaagccgatgaaggtcatttaaaagccccaatgccgggtgtggtcactcaagtgctagtcagtgcaaatcatagcgtgaagaaagacgatattttaatgacgcttgaagcaatgaaaatggaatataccatccgcgcccctaaagacggcgtgattgtagactcctacttccaagtcggtgatcaggtcaaagctggcgatgagcttgtggagtttcagcctgctcaggaggaagttgcatga

SEQ ID NO: 44481 - DNA, 903 bp, Acinetobacter baumannii
atgagtgagtttgtcaaaatcgtggaggtcggtcccagagacggcctccaaaatgaaaagcaggctttaactgtcgaacaacgcttaaacttcattaacgatctaatcagtgcaggcctaaaatccattgaagtcggttcatgcgtttcggcaaaatgggtaccgcaaatggcccaaagtgacgagctatttaagttattaccccaaacaaccgatgtgcaatttagtctgctcactcccaatattaaaggttttgaaactgctcaagcggtaggatgcaaagaggttgcggtgtttaccgcagcttctgaaagttttacccgtaaaaatatcaactgttcaatcgacgaaagctttgaaaagtttagcgatgtcatgaacgcagcaaaagcacataacatccgtgtacgtggttatgtttcttgtattgtcgattgtccttatgaaggcgcaattgcccctgagcaagtcgtaaaagtggttaaacgactctatgacatgggctgctatgaagtgtctttgggtgaaaccattggcaccgcaacaccagatcgcgttcaaaaggtatggcaagcctgccttgctgaactcgatagcaaggttttagctgggcatttccacaacacctatggcatggcaattgccaatatttatcagtctttacagcaaggtattcgtgtttttgattcgtctcttgcaggacttggaggttgcccttatgccaaaggcgcctctggcaatgtatcaaccgaagatttgttttatttgctgtcacacatgggctttgaaactggcattgacttagagaaactgatgcaagccagccaaaatattagcaacgtattaaaccgaaaaagcttgtcgaattatgcaaatgcgtattggcaaaccaagtgtgcatag

SEQ ID NO: 44482 - DNA, 942 bp, Acinetobacter baumannii
atgcgcaaaaatctcgatggtggacttttgcatgcaatgcatgcattcctgaaagtgattgatagcgggagtttcacagcagcagctgagcagatggatctgaccacagcacaggtttcacgtcttatcagcgagctagaaacacgcttaggtacaaaattaatacaacgctcaacgcgccagcaggcactgaccgatattggtgcgacttatgcagagcgttgtcggcaagttatttcaatggtggatgaagcagaggcagaagtcaccggaacagcatctaaacccaaaggtcgtttacgtgtattaagtatgggaagctttgggcatcactatgttttccctgtcatggccgagttttgtaagcattatcccgaattaaccgtggaatatacgacctcacaatacgttccggacctgttggcaaaaggggtagatgtcagtctttatctcactgaatcattaacagattctcgttttgttgcacgtagaattggcactattttttctgttttatgtgcttcacctgcgtacctggaaaaacatggtgtgccgaagtctccagaagacttaaaaaatcatgcctgtttacgcttggtaaacccgtctattacaccagattggcatttgttaaatgccaatggtgagtcttatcaaatcgacattggggggcaactcattgcagataaccctgagttattactagatgtggtacaacaagatatgggtgtcgcgttattgccaatgttttcggctttagacgcggttcaaaatggaagattatgtcatatcttgccagagtggcgttcgcccgatatcggagtttataccttattgccttcacgccattttattgatgccaaaacacgcgcatggctggattgggtagaagaatatatttctccaaaaattgaaatggatgcatcttatttttataaataa

SEQ ID NO: 44483 - DNA, 3483 bp, Acinetobacter baumannii
atgaatatagctacaaaagtcactccaaatattattgcaacaaaggatgtgtcacttgaagataaatatgtaagtgataacggtacagcatttatgaccggcattcaggcacttgttcgcttgcctcttgcccaaactcgccgtgacgcgatcaatggttatcatactgctggttttatttctggttatcgtggttcccctattggtaactatgataatttcctttggcaagttgaaggattacttaaatcccataatgtcgtatttcaacctggtgtaaacgaagacttggctgctaccgcaatctggggtacacaacaagcaaatctttcaggtcaaggcaaatatgatggagtgtcttcatggtggtatggtaaaggcccgggtgttgaccgttcaggcgatgtactccgccatgctaacttagctggtacctctgaacgtggtggtgttgttgctttatttggtgatgaccactcatgtaaatcttctacagttccccaccagtctgaacatgtcatgattggttgcggtattccaattttctacccaacatccgttcaacaaattttagactttggtgttcacgccattgcagtttcacgtttttctggtctttggacttcaatgaagctagtcagtgaaattgtagaaacttccgcttcagttcatgtcgacttagaccgtgtcactcctgttataccagaagatgttaatttcccagagggtggcgtcaatattcgttggccagatcatggcatccaacaagaagaacgtctttataaatatcgcttaccagctgttttggcctatgcccgtgcgaataaaatcaataccgtaacatggccttgtgaaaatgcccgtgtcggtattgctgcaagtggtaaaggttatttagataccattgaagccctacgtattttaggaattgaagatgaaacagcccaacagcttgggctacgtgtttatcaggttggtctgatttggcctttagaaccacaaggtattcgtgaatttgccaaaggtttagaagagttgatcgttattgaagaaaaacgtccaattcttgaaacacaaattaaagatgagctttactcacttcctgatgaccaacgtcctcgtgtcattggtaaagcaactgacggcaaaggtgaatggagtacctctattgaagaagcaccactcattggtcactatgagtaccagcctgaaccgattgcaaaaatgctggctgctcgcttcttaaaactagatattccagaaagcttaaaagtacaaattcaaagcagaatcgacttactactaaaagcagagcaagaatcaaaacgtgttattgaccttgctgaacgtaaaccttatttctgcagtggttgcccacataactcatcaacagtcgttcctgaaggtagccgtgcattaggtggtattggttgtcactatattgctgtttcgcttgaccgcggtaccgaaacattctctcaaatgggtggtgaaggtgtaagctgggtcggtgcatcaccttttaccaatgaaaaacacatttttgctaaccttggtgatgggacttacttccactcaggttacttggcaattcgtcaatctatcgctgcaaaaaccaatatcacctataaaatcctctacaacgatgccgtcgctatgacaggcggtcagcatgtagatggtcatttgagtgttgcacaattaactcgtcagctcgatgccgaaggtattaaaaaacaagtcattgtgactgatgaaatcaaactgttaaatgaagaagacggtattgcaccaggtgtagaaattcgccaccgtaatgaacttgacgcagttcaacgtgagctgcgtgaaatttcaggtgtaactgctttaatttatgtacaaacctgtgccagtgaaaaacgccgtcgccgtaaacgtgatgcttaccctgacccagctgaacgtttattcattaataccgatatttgcgaaggctgtggcgactgttctaaaaaatcaaactgtttatctattgagccagtagaaacggctttaggcactaaacgtcaaattaaccaaagtagctgtaataaggacttcacttgtgctgaagggttctgcccaagctttgtgactgttcatacacgtgatatgaaacgtcctgctaaatttgaaggtattagcgcaggatggccaacgtccccaatcattcctcagttatatgatgttccaagtcgtattatggtcggcggtattggtggtacgggtgttgtgactattggtgcacttcttggtatggcagctcacctagaaggcaaagcaacacgtgttatggatatggcaggtcttgcgcaaaaaggtggtacggtttattcatacgtacaacttgcagcaagtgatgagcaaatttcttcaaccaaaattccagcaggtcaatgtgaattactcattggtgcagatgcggtagttgctggtagtggtgcagccctttcacgcttaaaagaagatgctctagtcattgtgaatgaagacagcactcctacttctgagtttattaaatctcgtgactggtatgcgcctattaccgatttaattgaccgtcttcgtggtcgtgttcgtcaaggtcaactggtttctctaccagcggctcgcattgccacactactcttaggtgattcaatttataccaaccagttattactcggtatggcatggcaatctggtcgcattccgctattacgtgaaagcattgaaaaagcaattcgcctaaatggtacggctgttgaaaagaacatcgaagctttccgcgtaggttgtcatcttgcaagtgacccgactttagctgctcgtttacttgcagcaatgccaaaaactaaaaatccgcaaacattggctgaacttgttgaagaccgttctgctcgtctaacagactactggaatgaagcttatgcagctaaataccgcacacttgtagaattggcagctaaaaaattaccagaagagttaacaggtacgattgcaactcagctttatagagttatggcttataaagatgaatatgaagttgcacgtctactaacaggtaaaagcttcaaagaatcgatcgaaatccaattcggtaaaggcttacgtttaacgtatcatcttgctccgccagcgttacttggtggcctgaaaaatgtccgtaaacgtgcgtttggttactggatgcgcttcccaatgatgatgcttgctcgcttacaatggcttcgagaaactttccttgacccatttgcacgtcaagaagaacgtcaacacgaacaagcttggcgtgaccgttacatcgcatttgttgaagcacttgttgaagcaccagacaatcataacttggcagttgctgaacaaattgcaaaattaccggcagaagttcgtggttatgggcatatcaaaatgaaagcaatggacgctgcaaaacaacgttgggatgaacttaccccaacactgctaaaagtccgtaactaa

SEQ ID NO: 44484 - DNA, 804 bp, Acinetobacter baumannii
atgaatgcttattatcaattactgaatagaacaattggtcctcaaggtgaagtgattgctcattattgctcaactgttcatgcacaaggtgcttggaaccctcatgaacagcatatggcgcctgcaagtggtgtcatcgcagtagagttagaacagttttcaccgcgacaagatatgcgaattggccgaattagttttgatatttttggtttgatcgcttttggtgaatttacgattaagacccatgtgattcgtgccggtaaaacgattgaattgattgaagcagaattacaagcacaaggtaaaacttgtattgtggctagagcatggcgcatgtgcactcaagacagttccgagattgcggggcttgaagatcaaccaattcatcatcccgatacctttagcgaatggacgggcatgaaaagatggccgggtggttttatccagacattagtcactaaaactaatgatcagcaccgcgcgggcaaaggcattgtgtggctaaacaatgacaaagaaatggttgaagggcagccgaccacagattttgcgcatttaattggcatggtagatgcggcaaacggcattgtaccaagacaagaaggagaatttacttggggctttccaaatcttgatttacaaatccacatgcaccgttatccgcaagggaaatggctgggtttggaaaccgttcagcaatatggttcggatggcattggtttaaccagtgcagttttacatgatgtatatggcccatttggacgaagcgagcagattttgactttgcgtaaaatgattaaataa

SEQ ID NO: 44485 - DNA, 375 bp, Acinetobacter baumannii
atgatgtttgtggataacagttgtatagactcgactgtatttaagaaatcacctgctgaaagatttaaaaatcttaaaacccaaaaaaaagtaaaagagttcttcattaagcgccgaggatataagcgcccagacttcaacagaatgattgtagatttgcgcaaccttggatggtcacatgagaaaatagcctttgtattaccaatatcaggtgcatctactgttagcgaatgggcacgtggtggagtacctaactatgaaaatggtgaagcatttattgaactttggaagaatgaaactgggattgatagattcccacgcgaaggtgaatggcaaacatataaatacgatattggtcaattagggttactttaa

SEQ ID NO: 44486 - DNA, 1368 bp, Acinetobacter baumannii
atgaatacatcaatccacaacttacaaattgagcaagctgttctggcagccttgatgactgtagcaaattcatataatcaggttgaaagtttgctaactgaagaagattttcatgctacacgccacaaaatgatttttagcgccatagttgacctggattcaaaaaattcgccttatgatgccgtattggtaaaccaatggctagaaatgcatggatactcagaagctgctggtggtgagcaatacatcatgcagcttctaggtgatgcaccttcaagcttttataacctaatgtcgtatgctgagaaactgaaagatcttaccacttgccgcaaagttgaagcacaagcccataaggtcattcaaagtgcccgtagtttgaccgtaagtcgtggtgatttagttttgaatgcacagacagcctttgcggaaataagtacagaacaaggtagtgaaaaccttttccatattcatgatgctgcaaacaatacgtttgttgagatgcaccgaaaaatggaagccgcgattgctggcaaaacactaattaatggtattcagactgggatatatgaccttgataaaaagcttggtgatgttgagcccggttgcctaatggtagtggctgcacgtccagcaatgggtaaaacaacgatgcttcagcttattgcaaatcatgtagcagtcattcagaaaaagcctgcccttatcatgtctggtgagatgccaaaagaacaaattgctatgcgtctctgttgcgccattgcaccagcagatattgggatagtacgcaactcccctcaccttttgcctaaagacgaatttacggcgtataccaatgctgttgtaatgcttcaaaatgtaccgatgtatatcaatgatacgtctcgcccctcgatagcgaatattagggaatctatccgtaaagtaaaacatcagtacggcgccgttggtgtggtgctggtggattaccttcagatcatgaagactacaaaacagtttgcccgagaagatttaaagattgcctacttcactggtgaacttaaagccatggccaaagagtttgattgcgtcatagtcctattatctcagctcaaccgtgaactagagaagcgtccaaacaaacgcccaatgctgtcggatctacgtgaatccggtgcaattgaacaggatgcagaccagatcgttttcttgtaccgagatgagatctataacaaagaatctcaatatcgaggtattgctgaggccatagtagggaaaaaccgccacggcgaaccgggtactgcatacatgtgtgctcaattgaagtactgccaatttactaatttagatcatgaagcacttaatcaaatccaaggagcaacaatatga

SEQ ID NO: 44487 - DNA, 831 bp, Acinetobacter baumannii
atgagcattgatgcaattcggtggtcatggacagcttctgttaaaacctctgcccaacgcctggttctgctttcactagcagaccgggctggtgaagaacataccgcatggcctagtattgatcgcctagctgctgatactatgctagacaaaaagacagttcaaaaagttatattagagctcataaaacttgggctagtgagcgatacaggcgaacgtacgggaccaacaaaaagagtccgcatacttaaattaaacggcgtaaaaggccgtgaagaatataaccaaaatcgggatgattcaggttcaaaaaataatactaaatccagaacaaatgtacctaaaaatgggaacattaaacattcccaaaaacggaatgattccgataatggaaatatccccgaaaacgggattttgaataatccccaaaacggtactttgaatgtacccaattttgggatgcagaaccaaccattgaatctaccaataaatctctctcaagagcatgactggattcctaatgttgatcagctgatgacaaagataaagatggcaggtcacggccaaaatatagatttgatctttggcctacctagtttcgaatttgagctgagtgcattcaactcttactttgagaacagtggattatctgatagcaaaaagcttcataagttcacggcttggatcgtagataagtttgaacgctataaaaagcaaaatcctgcatatggcattcatccttctttggaaactggacagcaagctattactgctcggccatttatcaatttgccgactaagcctaaaagcttattaggagatgctcaatga

SEQ ID NO: 44488 - DNA, 168 bp, Acinetobacter baumannii
atggataaatcccaagttccagttaataaagattcagttcagccaactacagagccgaaacaaaattcacaatcttctacatatgtagaatctgtccgtataacgccagatcgactcattaatgccatgatcaataatattcggcaaggaggatctgatgagcattga

SEQ ID NO: 44489 - DNA, 555 bp, Acinetobacter baumannii
atgaacgctaaagtacaaattcaattacaagagcaattagtccctttctataccgctactaatttattaaatgcttatgcacttgcatatgaagtagcaactcaacttcgcactttaatcaatcaaataggtaaagctgcaaccttcgttaaaacatatgctgaagaacgtagtttcgataattcaatcttcacagagattgaaaatttaattgcaatatctcttcaactttccaactctcatgctgatatttgtagcgctgaaataaatagacatcgtcaagcaccatatgatcaatacgacgctggcgatctatttggagcttactcacttgctcaagaaaatacatcctggctagaaactttaatttctcaaattaaaatcgaagttgaattgagtaaagagacagtaaaggatgttattcacagtgctgtctttgcaccccttgagcatttaattaatattgctgagtatttagctgaaactaatgttggaactttttctactgaaagtgaaaagtatgaagctgaatgggagacatctaaaaatggataa

SEQ ID NO: 44490 - DNA, 315 bp, Acinetobacter baumannii
atgacatatccaactatttttagtctcgcccttttcaaattaattttattgatctatattaagtctgtctggtgcaaaatcactagattagctttggtcggctataattacacaagcgcatacagtccgcttcgggctttttttatgcgtaaaatctctatgcttccgcattcctatggtgaagctggagagggacatcttcggatgtgcgggtctcttgtgtacctgtcgaccaacccttttcagctttgccaccctcacttggtcgtgactggtaaagctccgaaacaaacacaaggagcgcattcatcatga

SEQ ID NO: 44491 - DNA, 696 bp, Acinetobacter baumannii
atgaatgctcctattagtttaattttaccttctcaacaaatgttgagttcagatatcgctctcattaccaatatacgcttagactcagtcaaaagaacaattgaacgtttagcagaacgccgtgttattactttaccaccaacggtggaaaagcctacagctggacgcacaagcactgaatacgtattttctggtgaacaaggtaagttagattcgataacagtagtagctcaactctgcccagaatttactgctgcgattgtgaaacgttggtatgaccttgaacagcaaacaccagcatttgatatcaacaatccacagcaccttttacaagctatcgaggttcaagccaaacagaatctacaactaacttcagaaaacaaagccttgtcacaagcaatagaaactatcactcatactgaacacggcgtgaagttccagcaagcatgtaaaattctgagtgttaagcagcaagtgttagctgaatggcttagaaaacataactgggatcgctatctaaataatgcgagggcttcaacttactacagtgaaaatcgaggatactgtgaaaccaaatattcactaaaagaaggcgtaaaagcctctggacaaccatatagttatacgcaaaccgagtttttcattttgcccaaaggcatgcaaattttggctaaaagatttggagaatgtgtatga

SEQ ID NO: 44492 - DNA, 228 bp, Acinetobacter baumannii
atggttatcatcatggttcaaacaaagcctatccgaattcaatttagtactgcttgccagctacttgatgtaacacgagagtcccttcgacacactatacgcaaagatcctacatttccacgtccgatgaagatgggtacatcaaaacaagcgcccgtattcttcgactatgcagaattggttgaatggcataacagcaagaaaactgctgctgaaatggaggcctaa

SEQ ID NO: 44493 - DNA, 1152 bp, Acinetobacter baumannii
atggctttaattaaaacaatttcagaattaccaagatggtttagtattaagaattatcagcgaaaaaaacaaacagcctttgattttttacagcaagttatttatagaaaagccttattagactttctagatgatcctaactttttaattccaatagaaattgaagttgatgaatacaataaaaatgagtttatttttggagacataccatatatatccttaactaaagtatgttcagttaagaaaaaatcaatcaaatacaaatcttcagaatacaaagaaatggagaaaattttgcattatgccctacaaaaaatagaagaagatcctttattggaaatgggctttagagatttaaattatagttatgaatttgcatggatatattgtttgaatcaatatgcgaaaaaatattacagttatgaccaacccccaattcaagatgtgaatgtttgcgatattggggagaaattttgtatgcttcctgatgacatagcaaagtatttactctttaattttagaaatgaatacaataatgaaggtcaaacaaaaaaaattattgagtttctaaaggaaactaattcaaatcttaatttagattttcttcaaaataattatgagaaagatgatctttatgatttaggtgaaaattttactaattcattatcaaaaaaagaatatcaagatatagaatcctatactcacagaagcttcttgaaagttgaaagagaagtttgtgagttggaacatccttataacattaaaccaatgattagtataaatttagcttgtaatgataatcttattaaagatcagtttaatgaatggttacaaaagcaaagaattaaaataaatcaaatattaagggatagtgaaatagatacagaaactgataaaagtaaggcaaggcaatctatgttatacaaggtttatacataccaaactcttgcatatatagatttggttatatggtctatcgtttcagataataaaataaagctatcagtacttgctcaagcccttttccctaatggtgcttatgattcagattttattagaaaaattttaaaaccactagttgaacaattattaattccttctagtaatgaaattttagaactattccatttaagaaatatggaagacttttaa

SEQ ID NO: 44494 - DNA, 1344 bp, Acinetobacter baumannii
atgtatccttattctgccatggctaagaaaactgttccgctatccgactccaaatgcactggtgcaaagccgcaggaaaaagattattccctatatgatggtcatggactgattctattcattcgtaaaagtggctcaaaagtatggcgatttaaatataaaagagctaatggtaaagatggcttaatgacattgggtaacttccctgctttaagtttaaaagcagccagagataagcgccgtgaattggagacattattagccaatggaatagatccaattgaatacagcgaaatacaaaaggctaaactagacaataaatataattttgaatctatagctcgagaatggcatacagcatataaaaatactggacgctggggagctgaaacagcagaaagagctcttaagaatatggaagagtatgttttcccaaaacttgggaaaaaacctattgatgcaatcaagccaaaagaactgattcaagtaattaaaagtattgaagacttaggttataccgaagttgtaaaaaaaacccggcaacggctaacaagtatttttgcatttgcaatttcaaaaggttttattgaaagtaatccagcctatggtcttcaagatattttcatcctttcaaagaaaaccaaacatcacccacaattactattagaaagattgcccgagctacaagctaaattagcttccgatacaggccatccacttactcgactatgtgttgaatttgccttgcatacatttgctcgttcaagtgaaattagatttgcaagatggaaggagtttgattttgagaatgctatctggaccattcccccaactagagatttcgtagaaggttataaatattctcatcgcggtgcgaaaatgaaaacacctcatttaattcctctatcgagccaggcactagctataataaaagagatctacaaatacagcggacacactcaaaatgtttttcctaaaaacggcgatccgcatggttttatgagtgaatccactatcaataaaactctacgccgtcttggatatgacacaaacactgaagtttgtggtcatggatttagaggtatggcctgtgccgccctaatccaaagtaaactattccaaaaagatgctgttgaaaaacaaatgagtcatcaagagcgtaataatgtacgacttgcatatacccataaagcagagttcttagaagaaagaaaaacaatgctcaattggtggagtagttatttagatgtgactaaagaaacaagtattagtccatacgattatacagcacagattttaggtgacgagatcatacaatttaagtatgcaaaattaatgaagtaa

SEQ ID NO: 44495 - DNA, 1356 bp, Acinetobacter baumannii
ttgaccaacgaatcttctacacttcaacgaggactaaaaaatcgacatatccaattaattgctatgggtggagcaattggtaccggattatttttaggctcggcgcaagtgattcaatctgcgggaccatccattattttaggatatgccattggtggcttaattgcttttttaattatgcgccacctgggagaaatgattgttgaagaacctgttgcaggatcgttcagccattttgcgtataaatactgggggaaatttcccggatttttagctggatggaattattggatgctctatgttctggttgcgatgagtgaactcaccgcggtagccaaatatattaattactggtggcctcatattccagcatggacttctgtcttatttttctttgtcgtgattacggcaattaacctaacaaacgtcaaattttatggtgagtccgaattctggctcgctattattaaagttgctgcggttatctctatgattgtttttggcctttatttgctatttacagcagatgtaggttcaagcatttcgtttagtaacctttggtctcatggtggattttttccaaatggctttagtggcctcttctatatgttggctttcttgatgttcgcctttggtggtattgaactgattggtatggccgcggcagaagcaaaagatccgaaaaaaaccattccaaaagcaattaaccaagttgttttccgtatcttgattttctatatcggttcactagcgatcttactttcattagtgccgtggaaccaattagatctaggcggactcgataaaagtccatttgttatgatttttagtcaaatgggtattggttgggctgcacacttactgaactttattattttaaccgctgctctctctgtttataacagtgggatgtttgcaaatagccgtatgctttacggtttagctcaacaaggcaatgcaccaaaaattttcaagaaagtaaataaacaaggtgtacctgtaccagcagttttgctatcggcattactcatttttggctgtgttcttttaaattactttgtaccagaagatgctttaagccacttaatgtatattgttgttggagcactggtattgaactgggcgatgatcagtatgactcacctcaagtttaaatcagcaatgaaaaaactcggtcaaaaaactcactttcctgcactttgggcaccgtttagtaactatctggttttaggttttattgctgtagtactctacattatgtggagtcagggctttaaagaatcagtgatgatgattcctatttggatcgttctcatgtttattttgtttaaagtactcaatgccaaagaacagtaa

SEQ ID NO: 44496 - DNA, 1188 bp, Acinetobacter baumannii
atgagcttcgtaccgcaaattaaaattccagcaacttacatgcgtggtggaaccagtaaaggtgtattctttaaacttgatgatttgccggaaaaagctcaagttgcaggtcaagcaagagatcaactcttgctacgtgtcattggtagcccagacccttatggaaaacaaattgatggaatgggtggagcgacttcgagtaccagtaaaaccgttattctcgccaaaagtacacggccagatcatgatgttgactatttgtttgggcaggtttcaatagatcaagcttttgtagactggagtggtaactgcggtaatttgacagcagcggttggttcatttgcaatttcaaatggtttggttgatgccgatcgtattcctgaaaatggcctctgtactgttcgaatctggcaaaaaaatattcaaaaaactattattgcgcatgtacctatcaccaatggccaagttcaagaaaccggagactttgaactagatggggtaactttccctgccgctgaagttcaaattgagtttttagaccctgccgatgatggtgaagagggcggtgatatgttcccgacagggaatgttgttgaccaattagatgttccagaaattggtagttttcaagcgacatttattaatgctggtattccaaccattttcttaaatgcagaagatttaggctacgaaggtactgaattacaagatcatattaatggtgatgcagcagcattagcacgttttgaaaaaattcgtgcctatggtgcagttcagatgggcttaattaaagatatttcagaagcagccgcacgtcagcacacaccaaaaattgcttttgtctctaaaccaaaaaattacacagcttcaagcggtaaaaacgtttcagagaacgatgtcgacttactcgttcgagctttgtcgatgggcaaacttcaccatgccatgatgggaacagcagcggtagcaattggtacagcggctgcgattccaggcactttagtaaatttagcggctggtggtggagaacgtgaagcagtacgttttggacatccatctggaacattacgtgttggtgcccaagctgaacttacaaatggccaatgggtggtgaaaaaagccattatgagccgtagtgcgcgtgtgttaatggaaggttgggtacgcattccgggtgacagtttctaa

SEQ ID NO: 44497 - DNA, 912 bp, Acinetobacter baumannii
gtgtcatcactctctcaagttaatgcggatgttttaaaacaagctcaacaacgtattcaacaagatttattgacgacactggctgcattctcaattcccgaacctttaaaaagcgctgtacaccatgcagttatgctcggtggaaaacgtgtgcgcccggctttgtgttacgctacagcttctttacaagataatccaaattttgcggctgctcgccgtgctgcggttgctgttgaactcatccattgttattccttagcacatgatgacctgccttgtatggacaatgatttgcttcgccgtggtcagccaacgtgtcatgttgcatttggtgaagataccgcgttacttgcgggtgacattttacaatcgatggcatttgaagttttagggagccgtttgtttgatgaacaagggcagggaaccgatgctgcaattgtcttaaagcaaattcaaattttagctacagctagttctaaaatggtttgtggacaggttttagacttacaagccgaagctaagcaaatttctcaagacgaactagagaatattcaccgtaataaaacgggtgcgcttattcaggctgccattatgatgggggcagtgacaattttctcgggtacagatcaggcaattccaaaattgcgccaatacggacaagcaattggactggcttttcaggtccaagatgatattttggatattacgtcgagtactgaaactttaggcaaaaccgctggtaaagatgaacaagtacaaaaatcgacttatcctgctctaatgggactagagcaagcacagatttatgctaaagaattgcatgatcaagctttcgaagctttagcgcatttcggtgaaaatgcaaaagaattagttgagatttcacaattcctgttagctcgtactaattaa

SEQ ID NO: 44498 - DNA, 369 bp, Acinetobacter baumannii
atgaatggtgaacagcttcatcaactcgcaatagaggcggcgcgtaatctcccttttagtgagcaaactcatccatttggtccagagtatgaagtttttaaaattttagaaaaaatgtttatgctgacagtggaagtgtctggcgtaaaaatgattaatgtcaaatgtgacccttataaaagtcaggaatatcaggaactctatccatttattattcccggctatcacatgaataaaaaacactggatttcgattaaaccgcataaaaatttaacaagcgattttctccgggatttgattcgcgactcttatgacttggtcgtaaaaaagcttcctttgaaagatcagaaaagattaaacaaccaataa

SEQ ID NO: 44499 - DNA, 855 bp, Acinetobacter baumannii
atgccagttggtactattattgttttagcctttttggcttttgttgctgttaccatttttaaaggggtacgtattgttcctcaaggctataaatggattgttcagcgtttaggaaaatatcattctacgcttaatccggggcttaacttcgttattccttatattgatgacgtggcctataaagtcaccactaaagatattgtgcttgatattccatcacaagaagtcattacccgtgacaatgctgtattacttatgaatgccgtggcgtatatcaatctgactacacctgaaaaagcggtgtacggtattgaaaactatacatgggccattcaaaaccttgtacagacttcactacgttcaattgtcggtgaaatggatctagatgatgccctgtcttcacgagatcacattaaagctaaactaaaagctgcgatttctgatgatatttcagattggggtatcactttaaaaacagtagaaattcaagatattcagccatcttccaccatgcaagctgccatggaagctcaagccgctgctgaacgtcaacgtcgtgctacagttaccaaagctgatggtgagaaacaagctgcaattttagaagcagatggtcgtttagaagcatctcgccgtgatgccgaagctcaggttgttttagcagaagcttctcaaaaagcgattgaaatggtaacaagtgccgtaggtgataaagaaattcctgttgcttacctgttaggtgaacagtacgtcaaagcaatgcaagatatggcgaaatcaagcaatgctaaaactgttgtgttacctgccgatgttttaaataccatacgtggcattatggggaagcataattaa

SEQ ID NO: 44500 - DNA, 462 bp, Acinetobacter baumannii
atggagtttgttgtagaaccttggcactggtttgtattgggtatcttacttattctttctgagctgattctccctgcctttgccgctctctggtttggtattgcagccataatggtttgctttctctattggttatttccagatatcagccttactactcaaatagtgctgtggattgtgttatcggtgctatgtacccttctctggtttaaatttattaagcctttatctattgataaaactaaagcaggtttacctcgagaagcgacgattgggcaaattggtatggtgattcagaccggacttactcatgaccaaattattgttcgtttccctatgcctattttaggggccgatgaatggaactgtcgaagcaccacccctgttaaagtcggtgatcgggttcgagtcattgatatttcgggtaatgacttaattgttcagccccacagcacttcataa

SEQ ID NO: 44501 - DNA, 918 bp, Acinetobacter baumannii
atgaaaattgctcaatttgccagtatcggatttatctctttagccctatttggctgtgataagttcagcaaaacaccaacaccgaccacttcagttaaagcgcgcgaaccagtgatcgcacttgcattgggtggcggtggagcaaaaggattttcacatattggtgttatcaaggttttagaatcacatggtattaaaccgaaaattgttacgggtacaagtgccggtagcttcgtaggcagtatctatgccagtggacaaacgccttatcaactccaaaatcttgcgctcaaattgcaagagtctgatatccgcgatttaaccctgaatcgccaaggtattattcttggacaaaagctacaggactatgttaaccgtaacgtgggtaacaagcctattgagaaattcccaattcgttttgcagcggtagcaacccgtcttgataatggccaaaaagcagactttattaaaggtaatgcaggacaagctgttcgtgcatcatgcagtattccaaatgtgtttgtaccagcaaccattggtaagcagaaatatgtagatggcggactggttagcccaattccggtcaaaacagcacgtgatatgggtgctgatattgtgattgccgttgatatttctgcacgtccggcaggaaaccgacctgcgaatatgtggggattgcttgatcaaaccattaatattatgggtcaacaaagtattaatgaagagttaaagcaagctaacgtggtgattcagcctaaagttgggcacttaggtacactcgatttaaaatcaagtaatgaagctattttagaaggcgaaaaagctgctcaaggtcaaattcgccaaattgaaactgcaattgcaaacttcaaaaaatctccagctgcatttaagcctgcgccacgtcctaaattttaa

SEQ ID NO: 44502 - DNA, 627 bp, Acinetobacter baumannii
atggaacaacatttccctaatctaccgtcgcaggttccccaacgtggtaatgctttaagtcgagcattatttaaaaaactctttttggcacaaggctggaccatagaaggtgaagttcccaactttcctaaagctgtagccattatttctccacatacatccaatattgatggctggtatggttttcttgccatttttggactcggtatccaaattacggtgctaggtaaagacagtttatttaagccaccttttaaacgggttttagattgggcgggtgttattcctgtaaaacgtgactcggccaatggtctgactgaacaagtcgttgcgactattcaacagtatgacaagatctggattggaatggcgccagaaggcacacgtaagaaagcgaaaaaaatgaagagtggcttttaccatattgctgcaaaagccaatattcctattgtgatgttttcttttgattatgaccgtaagactattcactgcttagactatttaactccaagcggaaattatgatgaagatctcgccaagatttttgaacgttatgaaggaaaaatatcaccgaaaaatcgtaattggcttgcagagcctttacaaaatcttgtgaaaaaaacctag

SEQ ID NO: 44503 - DNA, 1248 bp, Acinetobacter baumannii
atgttccgacagcaaaatctttatcttttgctcttttccttatattgggcacaaggtttacctgtaggttttatgacgcatgccttacctgtcatattaagagctcaaggtgtgtctcttgcccatattggtggttttgggctgctcatgttgccttggtcaatcaaaatattttgggcaccgtgggtagatcgacatgccatctcgcatttaggtcactatcgtagctggattttacctgctcagtttttgacggtgggtgtactttgtattttatcttttttccctatacaagttttagatcagcctctttatctctttattttttttattacgctgttatttatgaacttaacaggcgcaactcaagatatcgcgaccgatgctttagcggtcaatttattgcaacacgatcagcaacattggggaaatacttttcaagttgtaggttcacgacttggttttattgtaggcgggggagccgtgttatggtgcctagactggttatcatggcagccgacttttctattattagccgctttagtctttattaataccttacctattttactatttaaagagccatctcatacttctcattcacctcatcaatatagccaaccaagtctagttacaaagattaaatcttacttggggtacttctctcaaaataaggaacttcgttcttggttaatcgtccttataacttttaaggttgcagatggtttagccgggccattacttaaacctttaatggtggatatgggcttaagttttactcagattggtatttacatcaccatgcttggggctattgctgctttattgggggcacttattgctggctggatgttaaaatatatttctaggtctacagcattaatggctttttcaatattaaaaattatgagtttagggggctatgcgtatttggcttatgcttatgaacaaaaggtaaagataaatgtatggcttatctatgccgtaaatgccctggaagatgcctttgctgccatgctactggtcgtgatgttaactttggttatgcattacagtcgaaaaaactatgcgggtaccgattttacttttcaggtttcagtcatggcgacagtcagtggtggcctttacagctttagtggagtcattgcagatgtgcttggttatttccattatttgatagctattgtcagtattgcggtactctttttaattcctatttacttatggaaagctgccaaaactgtataa

SEQ ID NO: 44504 - DNA, 1305 bp, Acinetobacter baumannii
atggatctattccttaatcgtaaatcgtttgttgttaaaagtttagctattacagtaacagctttaatgatgagtggggcaaatgcggcaacttctgataaagaggaaattcgaaagcttcgtcaagaagttgaagcattaaaagcattagttcaagaacaacgtcaagtacagcaacaacagcaacaagtacagcagcaacagcaagtacagttagctgaagtaaaagcacaacctcaacctgtggcagcaccagtgtctccattagcaggatttaaatctaaagctggcgctgatgtgaacctttatggttttgttcgtggtgatgctaactatattattgaaggtgcagataacgactttggtgatgtaagtaagtcagacggtaaaacacatgataaattacgtgcgactgctaaaacaacacgcctcggtttagattttaatacacctgttggagacgacaaagttggtggtaaaatcgaagtcgattttgctggttcaaccacagattcaaatggctcattgcgtattcgccatgcttatttaacctataacaactggttgtttggtcaaacgacttcaaacttcttatctaaccatgcaccagaaatgatcgacttctcgacaaacattggtggtggtactaaacgtgtacctcaagtacgctataactacaaactaggcccaactacacaattatttgtttctgctgaaaaaggtgatagtactacttcggtaacaggtgatagtattaagtatagcctaccagcattaactgctaaaatcactcaaggctatgcagaaggcagaggttctgcttcagctcgtgttctggtagaaaattataaatcacagcttgctgatgatgataaaactggttggggcgttgcagttggtactgactttaaagtttctgatcctttaaaactctttgctgacgcatcatatgttgtgggtgataatagttacttgtatggtagtaactctccttacgcagtagatgggaattctattgagcaaaatgaatttgtagcagtacaagtgggtggaacttataagattttacctaacttacgttctactttagcgtatggtgctcagttctctgatgatggtactgattatgcgagattaaatgcctctgcaaatgaaaaagttcaacaagcatggatcaactttatctatacgccagttaaaccaattgatttaggcgttgagtatgtaaacggtaagcgtgatacctttgatggtaagtcttacaaagataaccgtgttggtttaatggctaaatatagtttctaa

SEQ ID NO: 44505 - DNA, 444 bp, Acinetobacter baumannii
atggaacttacacaaaataatttacaggctcagataaaggcaacctctaccttttcaactcaaactacagagcaatcatcaaaaaatgaagatgagtacaacccatttgattggtttgctaaaggcttaaaaaattatgctaacttcaatggacgcgcaagacgaaaagagttctggttttttaatttaggggttgtcctttgtaatatgtttgccatgattttagatgcgatcttcggaacagaatttttattttatgccttagtttacttggctactgtaataccaacacttgctgtaagtagccgtcgattacatgatattgggaaatcaggttggtggtatttaattagcttaaccatcattggtatattcttgctgatctactggtgggcaagtgaaggttcttcgaatcgcaaccaatatggtgagcctgccaaataa

SEQ ID NO: 44506 - DNA, 273 bp, Acinetobacter baumannii
gtgcaaaagtcattcccatgtacccaatgtggagcatgttgccgacatgttactctgtcagaattgacaatctatcttgatcgtggtgacggcatttgccgtcatcatgatacaggtacacatttgtgtactatctatgaacaacgtcctgacgtctgtcgggtagatacctattatgagcaacattttaaaagacaatatacgtggggtgagtttatagaacttaacctgattgcctgtaagcagttaagtgaattagataaaagtgagtag

SEQ ID NO: 44507 - DNA, 432 bp, Acinetobacter baumannii
atggctaaacaagaacttatgaaagctgctaaaaatttaaaaaatgtcacagttattccaaaaccatcaccagatatggcttttcagtcctttaagatgcttgttgatgcgcatcatgaatataagatgactgtgcagactgaaacaacaaagcgagaagcaatacaggcttggcgagatgttaatgttggaaaaattgaacagcaaacagagtttctaaaagcatatttagctgaaacttttaaggaaagacgtcattcaattgatgaaatgttcgaacgtttagataaaggtattgaatctggaaatatggatttggttaatttagcaatggagagcattactaccattgttaaagcttctccattaaaagaagctgagaaaattatacaagcaatgaatgaccccaaagttgaatcaattgagttctaa

SEQ ID NO: 44508 - DNA, 930 bp, Acinetobacter baumannii
atgccattaccagtaattttatggggtgctgctgctgcacttggagccacgggagtttttaaaggagctaaagccgtaggcagcctaaaagaagccaaagaaataggaaatgaggcagagagtaaatataacttagcactttatgaattagaggaagaaaaggacaaaacgaatagtgcattagaggaattaggacgtcttaagttaaatatttttactcaccaaattaaacacacaattgatgtcataaaaaaatctaaagaggctagtgggaaactagaaaattttgaatcctctatttctatagatgaacttaaagaaatggaagcaatggttcttaactcattacgacttgaagcagggttattagctggaacaacaggaggagcattagcaggtttaggggcttacagtagtgttggattcttagcatcagcttcaacaggtacagctatttcagggctttcaggtgtcgcagcaacaaatgcaactttggcttggcttggtggcggttctattgctagtggtggttttggaatggctggtggaatgattgcgcttggaggtattgtagctggtcctgctttggcaataggtggctttatgttagcaagtaaagctgaagaagccttgactaaagctgtagattatgcagcgcaagttgataaagctgttgcagaattagatatgttaggtgttgccttaatagggatccgacaaaatgtagatgaagttactgatacattaaatgaattggttcaaagatttgaggttatgaaggttaatgacgattcagacccacaagcatttaaacaaatgattgtaaatactaaaatcttaaaagatttattggattgtagaattatagatgaagaaggatctcctattaaaaatatcagacatacctgtcaaggatttctaaaaatttaa

SEQ ID NO: 44509 - DNA, 903 bp, Acinetobacter baumannii
atggaaggcagcctttcaacacatgagcgattggcagaacggttagttaaaattattgttaaattaaactcaggtgaaaaactgagcgtacatgagttggcgcaagaatttaagacccacccacgtaccatacagcgtgattttgagcgtttggaaattacagaattaccactggtgcgggatgaagtgactaaacgagtttatttaaacccgatggctttaggtaattatggtgtgcaagatattattcattttgcacagatatctggtgtgcacaaactatatcctaaattgaatgttccttttttacgagggatattggatcaaaataaggcaccgacttatatcgccaaaggttattcctacgaggatacatcactttttacagaacattttaaacagttaaatactgctatacagcaaagaaaacaaattcagtttctttataaaaatgtgagcagaaatgttctgccatatcgggtgattcatcatcatggtagttggtatttagcagctactgagcaagaagaactcaaaacgtatcggttaagtcgcattagcaatatcagcatatctcaagaccatatctttgagcatgatgcgaatgtattacaacacttagacaatgaagacagtatttggttcggtttagaaaaaacagaagtcattttaactgttcaagctgaggttgcgatgcattttttacaacgtgcattgctacccgagcagcaggtgattaagcagttggaagatggtggattattaatttctagtcaaattagccattaccagcaaattttacctttagttcgttattggattccacatgtaaagattgtaaatcctgttgaattgcaggaggaattggaaggggaattgagagggtatttgaattttagttaa

SEQ ID NO: 44510 - DNA, 255 bp, Acinetobacter baumannii
atgactagaagcattcacacagatgagatggttgcgcttcgaaattggcttagaaaccagcgaaaagcacaaaagatgactatgcgtactttagctgaacgcatggaaagaccacattcgtttgtacaacgggtcgaagaaggtgaccgtcgtttagatttagtcgaatatgtttggtattgctctgctttaggcgttaacccacaaacaggactagatttagttataaaaagtacgtcattcacgcattcctaa

SEQ ID NO: 44511 - DNA, 834 bp, Acinetobacter baumannii
atgcaaaaacagttatatcgaatttttattattgtagggtgtgtactcaccacaacattatctggttgtaaattgccaattccctctgaagctggtgaagctttagccaaccttggggctcgcttttcgatacgagcaattattgaaaaatgggataaaaaccaaaatagcgaactaccatttcagctaaaatcaggtgagtcttatgaaaaagtcaaaactcaacaagatgaattttacgtggtacatcgtttaaacaacgtaacagaacactattcacttgatgggaaattaagatggtcaagtgctacgccagtaacacctccaccaaacctcgaagaagaagtttcagccctgaactggaatgatgccaccccctctagtcttgatgataaccaactctacccggagttaaattttcccgatttcagtgctcctggttatcgaaaatataccgaccctgaattattacaacagattgatgctgaatatcatgctggcatgaatttcagctcaaacccaaaagaccacgggttaaagccaatttcatctgcaccagaaataatcaaaggaatatctacattcatgcatgataatggccctaaattcgtcaatcaggcatttggtcggcccaatgtatccgatgtgactctctcatttgatggttggctagagttggatgaaaatgaaatactttaccgagctgttatcgattccgctcgctttcaatgtacatggtatcaggcggtagtaaatactttaacagggcagttaatctatgaagagtttatgccttgctttgcggcaggcgaagaaaatttagatgcaatctaa

SEQ ID NO: 44512 - DNA, 1029 bp, Acinetobacter baumannii
atggaagaactgacctctgaccaacttcttgaacaaatagatcgatatgaaaaaaatgttcttgattctttttactacacgtccaataagtttaatcaacttaaattcgaggaaatcacttcccctactgaattcgataatgggaatcgatacgataaaatacttaaagttatatcaagtagccctccattggactacacctaccttcgggaagaattgctgaagaatccatttcaaatagcatcagtagaaagcacttatattttttgtctatgtaaagatgcccgttcaaaaatacattcatcttccttgatagaagccaatcgcatcatacaacgcattcaaaaggttcatgaaacaacgcataacatcattaaagcaggggtagaatacactgctatttcctccaatatgacattttgtattgatgaagaggaaactgaacaatcaacttatcaagataagctttattacctcccccattttaaaatccattttcttcaagctttactcgatgttagtcctgacctccttgaccgtaaaaccactctcacttatatacgacaagagatagaatatattctaccagactaccacaaacagattctctataacgaacttaataaaagcgttctagagaatggggaaaaatggaaatctgttcactttgcagcgacacagcttgaaaacaaaataaatgaaaaaatatctgagctgattgactctaataaagatcatttcacaaaaggtagggaagaattgattgagttttatagtgaaatgatcgaatgtttaaatacagaaataaacgataatatctggctccaacaaaatactgaagatatttccaacgctcagaataaaatagatgaattaatcaaaatattatcaatagaagaagaactttgcaaaaatatagataatttaatgttcttaaaaaagaaatgttacaaccacaaaacactcgaagcatggataagacaaaataaatcaaaacctgaatggaaaagattatttaaaaaattataa

SEQ ID NO: 44513 - DNA, 1224 bp, Acinetobacter baumannii
atggtaatcagaaaaaggagaccaaacaaaatacgagaaccggttattccgcatcatttgcttgcagcaatgatacgagagagtcagcttatcttgtcacctacagatgatgacaccaccctgattttcagtgattaccggattgactacatgttgttgtgtggacaaatggttggagccatcaagaggaatagatcaccaccagtaaagattatctcaattgaaggacccaaccccaaaatcgttttgaaatattcaaaatggtttaagccctatgtccttttctttgacatgctcatagattgtgacctatcggactttaaggattttgaggtctgtgatgagattcaggctttttttgaagcaaaagataaactgcaaacccagtatccacaattgatcggtctctatgagggtttttttacattagggaaggaaacttacctaaaacacagaatccaaccgctcaatcagtttatcaagttgattcgtgaagttttaaatagcccgaaacataggtctgcaattgcgaaacgagaacgaaaaagtagagacgagtttcgttcattaaaagaatggattgatgctcactttgaagtgtatagcaaattactggtcattcgaattgatctggcattaaagccacctcaatccagtctgatcaataacaacttggttgattttaacaacacctttcattctcagcacaacctgagctacctcaagaacagggtcaagagaattagacacaacaaaagcaacaacaaactgctccagaagattattggctttgcatataagttcgagcacggtgttcgcaaagcgatgcacatacatgccatgtttctggttaacggccagccccatgagcgcgatgagtattatgcaaatgaaatcagcaagtactggatcaaactaacccacggtcaaggatgtacctacaactgcaaccgtgaaaaaaaacagtatgtaaatttaggaataggtccaatgggataccacgatattgaaaagcgcacaaacctgctgatttgtttgcaatacatgagcaaatcagctcagttctttatgtttaaacctcttgcagaagtcgcttatcgagcaatccaaaaatcaaaagctccacaaaagcgatctaaagccggacgtccacgtaaacaccctaatccagacattgtactgcctaaaaccaagaagtgcagtaagaaaggagataaaaaatga

SEQ ID NO: 44514 - DNA, 1029 bp, Acinetobacter baumannii
atgaatgtgctcaataaatacgggcaagcaatggcatcccaaaatgtaaggataatgctacaagaatccgtaccaagattaccactacctattgactcaccaactccctcaattggtgatttctatgcctattgcaattactttgcaaaatgcaatacaaccagtgtaatcaaatacgaccattactatggatgtcatcctaaggccaacttaacaaaactcggcaagaatattcatgagtccgtaatgttcgctttgtactcacccattgcttctttacatattcaagggcttatattgctgtcaccactcagtagtattgttctaagcaagattcaacaacatgctctacctcaaatcaatttatatgatccatcagcggagcctcggttcaataattttattgccgatatccactatactgtgatgcaaggtaatatccgaaaacaacagagaaattgggaaactcgccaaaaggttgcgatttttgatttcaaactttggctcatgtccgtatttaaacaaagtccaggtttctttatcgaaacatatgacatgaaagaacctgatgagatgcatccaaaatcacccaaagatagtcttctttttgaaacccacattaagtccatcgtaaaagaacacaaatatcggccagaagtattatcaatcatttcaaaatggaccatcatgccgtctggtcagttaattttgaaaatttttgttttggttgaatgcaacgattctgatcacttatttagtgagcccaatcaaccatctggaaagctatatatcccccaaaagaatcaaggcttcgttattatcgagcgagttcctttacccgagcaaattcaacccaatttctttcatcatgatgcacccaacttcggcaatcatatgcaacgcctagaatcttatttgtgccatacggattattacctaagaattggtgacatgaagccaacaatgaaaatcctttatacccgaaatgacgacaaattacctggcatgtgtaaggagcactcaaaatga

SEQ ID NO: 44515 - DNA, 267 bp, Acinetobacter baumannii
atgatcgaaaaacgctaccgtgtaaaggaactggtcaattatcctgagcgccctgccaaggattatattgatcgcagtgggcgaagacgcaggctctctcacagacctgcaacaaaaggtctactcaaccttgcagaatccacattctggaaaatggtacgtaagggtgactttccaccacccacctacctgacagcaagcatgccaacatggactgaaagtcagattaatacatggcttgaggctagaagtagtagagctgcataa

SEQ ID NO: 44516 - DNA, 1215 bp, Acinetobacter baumannii
atgactacacgtggaatcaataaactaacggctttacaggttaaaaaagcccaacccaattctgagaagatgtataagcttccagatggtggtaatctttatttgcgtattgatacgaatggcagtaagtactggatctttaactatactcgaccttatattggtaagcgcaatgatttgtccttgggcacctatcctgaagtcactcttgagaatgcgcgtcgtatccgtgatgaatataaaaagttaataaagcaagggcttgatcctgcaatggtacggcttgaaactaagagtcaaaagcaaaaagaacttgaaaatacttttcgggtggtgagtgcagattggctcaaaaaaagagagctagagggtaagcaggatgaagagactatccgtcgtttaaatcacgatgtattaccttatattggagatatgacttttccgcaactgacgctagaagtgcttgaggttaaaatttttcaacgtattatcgatcgtggtgctttatctgttgcgaagcgtttaaagtcagatttaaatcaaatttttaaatcagctcgtaaaaagaagttggttcagtacaacccagttgaggatattgaattaccgaatcctcaaaggggaaacttcgcagcagtaacagaagaacaagacctagctccgatgctggttaaaatctggaattattcaaaaacccatgaacggtgtttgattacgacacaagtggctttgaagatatcagttctgacatttcaaagacctggagagatacgtcgacttaaaaaggaatattattacccagatgagcgctgttttaaatttacagcgagtaagacagggcagttgcatatagttcctttgtctgatcaagcttttgagttaattgaatcgattattgatctatacccgaacagtgaatacatttttgtcgggcgagatgggaaaacagttctttcagataatacggtgaatacggcgcttaaacggctaggttatggtggaaagcaaacggctcatggtttgagagcaacggcacgaacaatgctagatgaaattctggagcaacgtgtggatttcattgagcatcagttggcccataaggtgaaagacaataatggtacagcttataatcgcacaaaattcttgaacaaccgtcgtgagatgatgcaggaatgggctgactatttggaatctttacttacttgtaatatatag

SEQ ID NO: 44517 - DNA, 2031 bp, Acinetobacter baumannii
atgacaagttacgccaatttattaaaaccattacatttgggcttcacaaccattaaaaaccgtgtggtcatgggatctatgcatacggggcttgaagaccgcttttttaactacccaaaactggcagcttattttgaagagcgtgccaagggtggagttggtttgattgtgactggcggtatttctccgaaccgtcaaggatggttggctccggctggcggaaccatgaatagcttatttgatattccgcagcaccgtttggtgactcatgccgtccataagcatggttcaaaaattctgatgcaaatattgcatgcgggacgctatggttaccagccatttgtagtatcttcgagtgcaataaaatcaccgatttcaccatttaagccacgtcaactttctgaaaaaaatattctcagtaccattgaagattatgcacagtgtgccgacattgccaaaaaggcaggctacgacggcgttgaaattatggggtcggaaggatatctgattaaccagtttttaagtcgccatgtaaaccagcgtacagactgttggggtggtgaaattgaaaaccgtatgcgttttccggttgaaattgtcaaagcgatccgcgcaaaagttggcgaaaaatttattatctgtttccgtttatcgctgctcgaccttgtgcatgacggtaacaccatgcaagaagtggttacggttgcgaaagctttagaaaaagcgggtgtcactttattaaatacgggtattggttggcatgaagcacgtgtgccgactattgtcacttctgtgcctcgtgcagcgtttgttgattatacggctcatgtaaaacaacatatttcaattccggtaattgcgtctaaccgtattaatatgcctgaaactgctgaagagattttggcaactggcaaagcagatatgattcaaatggctcgccctttattggcggatgctttttgggtaaataaaactgcgaccaatcgtgtagatgaaattaatacgtgtattgcctgtaaccaagcatgtttagatcatgcatttaaaaataagcgtgtatcttgtttagtaaacccacgtgcaggccatgaaactgaattggtttatttaaaaaccaaacaaccaaagcgtattgccgttgtaggtggtggtgtagctggtatgtctgctgcaactgttgctgcaagtcgtggtcatgcagttaccctgtttgaagccaatgcagatgtaggtggtcagtttaactttgcaaaggttgtgccgggtaaagaggaattccacgaaaccattcgctactttaaagtacaacttcaaaaaactggcgtagatgttcgtttaaatactcgtgttaatcgtgaacaacttgaacgcgaaggttttgatgaggtgattgtggcgactggagtcgtgccgcgcgcattaaagattgaaggaagtaattcacctcaagtcctttcttatgctcaagttttacagggtgctgaagttggacgaaaagttgcagtgattggggcaggtggtattggtttcgatgtctcagaatttttacttaaaccaccacatcaaccacagcctcaacctttagccgagtggcaatgtgagtggggtgtagacccagatccaaattatgtttcggaaggcggtatgcaaccaccagtagttgagccagcaatacgagaaatttatttactgcaacgtaaaacaaccccactcggtattggtcttggcaagacttcggggtgggtacatcgtgctcagcttaaaaagcacggtgtacgcatgcttcgtggcgtgcaatataaagcagttaccgatgaagggctttggattgagcataatggtcaggaccagcttttacgtgtagataccgttgtggtgtgtgcggggcaagagtcggtaaaagacttgatgccaaaagaaggcgagtcgactatagcgaactaccatattattggtggagcaaagctcgcagcagagctagatgcgaagcgtgcgatcaaagaaggagcagaattagctgctcgattgtaa

SEQ ID NO: 44518 - DNA, 396 bp, Acinetobacter baumannii
atgctatctaggcctaaatacttatttcatggctctacaagctatcgagaatatcttgagccaaaacaagccataggcgatggagaaatggacaatgccattggtatatatgccgttgaagataaaagaattgcgcaattatttgcaattgaatatctcggcctatccaatgacgcccgcttcagtattaaatttaaggatgacttcgtctatgttgaactttaccaatgtagcgtcaattgggatcgtattggttatttatatacacttccttcagagaactttataaaaattgaccatatgcaatggctatcatcagaaagtattattcccacgaaagttgaacctgttaatcctcacgatttcaaaacatttatccaacaacgttcaaaatag

SEQ ID NO: 44519 - DNA, 1344 bp, Acinetobacter baumannii
atgactgataatgcaactatcttgcagcatgtaccagtaggcaaaaaagttgggattgccttctccggtggtctagacacttcagctgccttattgtggatgaaacaaaaaggcgctgagccttatgcatatactgcaaacttaggccagccagatgaagatgactacgatgcaattccaaagaaagcagaacaatatggcgctgtaaaagctcgcttgattgactgccgcttacaattggcgcttgaaggtattgctgcaattcagtgtggtgcattccatatcagtacaggtggtgttccttatttcaatacaactccactcggtcgtgcagtaacaggtactatgctcgttactgccatgaaagaagacgacgtaaacatctggggtgacggttcaacttataaaggtaacgatattgaacgtttctatcgttatggtttgttgactaacccaaatcttaaaatttataagccgtggttagatcaaaactttattgatgagcttggtggccgtgcagaaatgtcacagttcctcatcgacaacggttttgactacaaaatgtcaaaagaaaaagcgtactcaactgactcaaacatgttgggcgcaactcacgaagcaaaagatcttgaatacctaaatgcaggtatcaaaatcgttgacccaatcatgggcgttgctttctggaaagaagaagttgaaatcaaaccagaagaagtgactgtacgttttgaagaaggtgtacctgttgcattaaatggtcagcgttttgacaatccggttgagcttattcttgaagcaaaccgtatcggtggccgtcatggtttaggtatgtctgaccaaatcgaaaaccgtattatcgaagcgaaatctcgtggtatttatgaagcaccgggtatggcccttcttcatattgcttacgagcgtttggttactggtattcacaacgaagatacgatcgaacaataccgcattaacggtttacgtttaggccgtttactttaccaaggccgttggttcgactcacaagcgcttatgttgcgtgaaactgcacagcgttgggtagctaaagcgattactggtgaagtaacacttgaacttcgtcgtggtaatgactacaccatcatgaacactgaatctccaaacttaacgtacgaagctgaacgtttaacaatggaaaaaggtgattcaatgtttacgccaatggaccgtattggtcagttgactatgcgtaacctcgacattaccgatacacgtgcaaaactaggtatctatacagatgctggcttgctttcaatcggtcaaggttctgctgtacctcaattagataataagaaaaaataa

SEQ ID NO: 44520 - DNA, 1260 bp, Acinetobacter baumannii
gtggcgaataggggaaatgtacatcaattactcaaatctaaagaagaaatcgagtatttggtcactctacatacccatcgttatgccatgcctttgcccaaacaactggaaaaaaaattctggtgtttaaatcttgatcgaactagacagaacatctcaaagtttctagcaagtggtgtactcacttatttaatttttattttattggccctgccgaccgactatttagtgattggggtaccttatattactttggactttattcattgcttacttagtgcaatgaatattgcacttgccctgttattgttctgggtttttgccaaatttacaaaactctccgagcacttttatttagctgcatgtggcattgtatttttaaccattattattaatgcgatgttattgcttagtgtcggaaatatggcgcttaagaaccagtctatgttgcttctttcatttttatatatgctcgggttcatattaagcggtattaaacctttgcatatgctttgtgttggtttattggcagcatttttagtttttgcttttcttattttgttagacgtaaattgtgactatattgcgttgggccgtgctttgttcggtagttgtattttaggtttctcgattagcagtatgctcatctcaagagaaagaagcctttttttaaataaccagcttgctgaaattaatgaacagatcttacggattgaagcgtcggagttattgcatttaagccagcaggatgccctgactcaaatttcgaatcgacgtacatttgatgagatgtttgattttttctactaccgagcaaatcaagagaagcgtcctttagctgttttatttattgatattgatttttttaaaaactataacgatttttacgggcaccagatgggagataaagtcatctctagcattgccgcagcaattaaaaactcaattcgtcatgttgactttgttgcgcgttatgggggcgaggagttcgttgtacttttacctgaaacacctgcacagggcgcttattcagtggctgcaaatatctataaagccattgaacggcaagcgattcctcatgcagcttctttagtgtcgaagtatgtcactatcagtttagggtttaccgtatatacgggtgggctaaagatgggacaagataggcttattcatgcggcagatcaggctttataccgggcaaaacagcttggccgtaatcaaatttattatcagccattacaagtcgctgaaattgcctaa

SEQ ID NO: 44521 - DNA, 1035 bp, Acinetobacter baumannii
ttgaactctattaccctgctccagccagatgattggcatgcacatttacgtgatggtttagcattaaaacgtactgttccagatttggctaaacaattcgcccgcgcgatttgtatgcctaaccttgtaccgcctgtaaaaacagtagaagaagctttagcttatcgcgaacgcattcttgctcatgttccagaaggcaataattttgaccctcgtatggtgctttattttactgaccacacttcaccagatgaagttcgtaaaattaaagaatcagaacatgtaaatgcgattaagctttatcctgctggtgcgaccacaaactccgataatggtgtgagtgatattcgtaaagtttatgcagtcattgagcaattagaagagcatcaagttccgttattgcttcatggtgaagtaactcataatcatgtagatatttttgatcgtgaaaaacgcttcctagatgaggtattatcacctctattgaaacagttcccgaagcttaaagttgtgcttgagcacatcactaccagtgatgcagcacactttgttttagaacaagaccgtaatgtggcggcaacaatcactccacaacatttattatttaaccgtaatgatatgttggttggtggtattaaaccgcacttctactgtttaccaattttaaaacgtcaaacgcatcaaacgactttacttgaagtggcgacaagcggtaatcctaagtttttcttaggtacagacagcgctcctcatgcacaaaatgcaaaagagaatgcttgtggatgtgcaggctgctatagtgcaccaaatgcaattgagctttatgcacaagcatttgaccaagtcggtaaattagagcgtctagaaggttttgctagccattttggtgcagacttctacggtctaccacgtaatacttctaccattactttggttaaagaagataacctcgttccagaatcttttgattatttagataatcaaaaaatcatcccgctgcatgccgggaaaacgctgcaatggagaaaagtgtga

SEQ ID NO: 44522 - DNA, 663 bp, Acinetobacter baumannii
atggagaaaagtgtgacacaagaaaactctgtcccggtcattggccaacgttttcgtggcttcttacctgttgttgtcgatgttgaaacggcaggttttaatgcccagacagatgcattgctagaaatcgcatgcattccgattgtgtataatgctcagggacaatttgtccctggtcctgcatttcatgcacatattaacccttttgaaggggctaacctcgaccgccgttcgctagacttcattggtattgacccattcaacccaatgcgtattgcaatggctgaagatgaaagaactgctttacgtcgcatttttaaatcggtcaatgaagttcgtaaacagcaacattgtactcatgcagtactcgtaggccacaacgcgcattttgaccttggttttttacaagcagccattgctcgctcaggtacaaaaaaccaaaacccgttccatagtttttcagtgatggatacggtcacgttaagtgcagtaatgtttggacaaactgtacttgcaaaagcatgtattcaagctggaattgagtttgatggtaaagaagcacactctgctttatacgatactcaaaagactgctgaactgttttgctatattttgaacaaactgtctccttacctccttgacagtttggtggcggcttcttaa

SEQ ID NO: 44523 - DNA, 267 bp, Acinetobacter baumannii; identical to SEQ ID NO: 43415

SEQ ID NO: 44524 - DNA, 1254 bp, Acinetobacter baumannii
gtgagctttgatttaagtgttattcctcataaaaacattgttttagctgttacaggtgggattgctgcctataagagtgccattttggtccgtcgtcttaaagattatggttttgacgttcgggttgtgatgacacacggggctcaagcatttattacacctctaacctttcaggctctttcaggaaatcctgtacataccgagcttttagatcctgaggctgaagctggaatgggccatattgaattagctcgttgggctgatttattactggttgctccagcaagctgtgacacattggctaagtttgctaatggtttggcagatgacttactcagtactttatttttagcaactaaagcgcctgtgtgggtcgctcctgcgatgaaccagcaaatgtgggctgcaaaagcaactcagcgtaatttacaaactctggttgaagatggcgtgcatgtgattatgccagatgcaggggagcaggcgtgtggtgatgtaggcttaggccgtatgccagaaccagaagaaattgcaaggcaagtggcgggttatttccatcaagcccaacgtgcaattgctgaaaaatttgggttgttggcaggtaagcgagttgtaattactgccggaccaacccgtgaagcgattgaccctgtccgttatatctcaaatcatagtactggaaaaatgggctttgctttagctgcggcatgttatgcagcaggcgcaaaagtcaccttaattgctggtcccgtaagtttagatactccaaacggtgttcaacgtgtaaatgttgcttcggctcgacaaatgttagatgtcagtatggagtcgcttgagactggctgtgacatctttattgcgacggcggctgtagctgattatcgcgtcgccgaagtggcagagcataaaattaagaaagcaggggatgagctgaatgtttcccttgtaaaaaatccggatattgtggcaaccattgcagctcaggaaaaacgtccatttatggtgggctttgctgccgaaacgcagaatgttgaagaatatgcagcagggaaactcgttgctaaaaagctagatatgattgcatgtaacgatgtttctcgcgccgatattggctttgcttctgatgaaaatgcgatgacagtattttttgctgaaagttaccatatgaaaaaacgtgagttagaaaaagcatctaagcaagaaatttctcagcaattggttgaagctatttcggatgcattacgccgtaaataa

SEQ ID NO: 44525 - DNA, 708 bp, Acinetobacter baumannii
atgaatacttctattaaaaattggccagaacaagaacggccaagagaacggttattacaacaaggccctcaaagcctttctgactctgaactactcgctatctttcttcgctcaggttcacgtcaacattcagcagtagagctcgcacgtttactgattcaacagtttggtagtctaaacgctgttttcgatgcatcttacaatgaattagctcaatttaatggtattggagctaccaagtattcccaattactggccgtaaaagagcttggacggcgttatctcgactatcattttagtcagactgagctaagccttcattcttctcatttagttctagattatttgcgttacgaattaaaaggtgaaaaacaagaagtctttgcggtactttgcttagatgccgagttgagaaaactacattttaaaaagttattttttggttcagttcaacactgcgctgtttcagtgaatcaaactttacgttatgccttacaacaacacgcttgccaattagtaatagcacataaccacccatttggttccccacagccctctctcgaagatattaaactcacacagcaacttgaacaggcctgtcagcttgtcgaaattcgtctgctggaccattttattatctcgccagaaggtagcttttcatttgctgaacaacaactgctcaaccctacctcaatagccgttcaatga

SEQ ID NO: 44526 - DNA, 912 bp, Acinetobacter baumannii
atgattgttcgtgaacagcccagtatttttaaagttttattctcttggcgagggacgatattacctaaaattttgccctctttaggggtagtaatgctgatttcggcaatcattggtggggttgaatacattaacctttatcgttttccagaaattcctttagttggctttactttaattggtgtcgtactttctatttttttaggttttaagaatactgcatgttatgaccgctggtgggaagcccgaaaattatggggggtcctgattgcgacttcgcgacatttcgaccgtgactgccggattttaactcaagcccgccgtgaacgtgtcattcagcacgttattgtattcgccaatgtgttacgtgaccgtttacgtcgtcaaacagccaaccccaccgagctaatacaaaccagtggcatgagccaacaagcacttacccaactttaccaacaaaataacgcacctcaatatacgcttagccttattcaatgggaattattacaagcgcttaaagaaggggaaatttcagatattatttatgctcaaatgaataagaatgttgcagatctaagtgtcgtacaaactggctgtgaccgtattgcaaatactcctattccgtttgcttattcagttttgcttaaccgtactgtttattttttctgttttatgttgccgtttagcttaggatctttgcttggtttagcaacgcctttactggttggaattctggcttatacatttttaggacttgatgctttaagtaccgaaattgaagaaccatttggcacgcaaagtaatgatttacctttagatgcaatggtacgtagtatcgaaattgagcttttggggacacttggtaagcccacacctcctccaattcaagctcaagataacaacttgctctaa

SEQ ID NO: 44527 - DNA, 852 bp, Acinetobacter baumannii
atgcaaggcatagatttacatacacatagcaatatttctgatggaactttgtctccggaattgctagtgcaagctgctgtcgatgtgaagttgcatactttagcgctaaccgatcacgatacgatggatggattgcagcgtgcaagaaatgctgcacaaccccatgatttgcaaattatttctggtgtagagatttcaagccagtggtcacgaccaagcacgaaaaaaagctatggcgtacatattgtggctttaaatatgcaagatgaagctccaattttagaagcattagaacaacaaaaaagaattagagcacaaagggctgaagttatttgtgaactattaaaaaaatgtattggctttgatatttatcaagatgttctcgataaagttgaaaatcaaccagaccggattaccagaacccatattgctaaagccttagttgaaaagaatgtagtgagccgtcctcaacaagctttcgatcgttttttaaaagaagggaagcgtgcttttgtaaagtttgaaggattgggtttaaaagaaaccattgaggttattcataacagtaaaggatttgcagttttagctcatccaacccgttatgatttatcggctacaaatacccggtatttgattgagttatttgcaagttgtggtggagatgcggtggagttgccgcctccagtagatcctttatctactcgccaaatgattgatcgtatgattgaccagcatcatttggccatttcaattggtagcgattttcatggtgaaaatatgccgtggattaaattaggaaacacccctaaaccagcgagtaaccagcaaggcatttgggaacgttttatctaa

SEQ ID NO: 44528 - DNA, 615 bp, Acinetobacter baumannii
atgaaagcactactggactttgttccattaattattttcttttatttatataagacagttgatccagccgatacacagcatcctttactcaaactgatcgggtctgctggcggtgttgataataataatattcttgtcgctactaccggtttaattatttcaatgttggtagtgtatggtgcgttgttcatcatgcaaaagttccgtctagataaacagcaatggattgtactgttcatgacagtcatttttggtggtattacccttatgttgagcgatgatttttacatccgcttaaaagccgctattttgaatctagtttttgcaggtgctttcttagtttcaccttggtttggtaaagaccgtaagccccttattcaacgtttatttgatccgattttagccttaagcgaaaaaggttggaaaaatttaaactttgcttgggcagctatgtttgtcgtgatgtctggtttacatgttttctttgcttttttattccacggcggaaaatattggggcgaatttactgcatttggtgacatgattgtcatgttttcatttatcattattcagttcattattttacgtaaacattttaagtcaccagatgcttaa

SEQ ID NO: 44529 - DNA, 303 bp, Acinetobacter baumannii
atgcctttttttgttctaagctgtaccgataacgaaggaactctagagaaacgtttagcagtacgtcctcaacatatcgaacgtttgcaaaaacttgatgatgaaggtcgtctagttgctgctggagcgatgccaaaagaccctaatgacccgcaagctggtttttatggcagcaccatgattgtagagtttgatacacgtgaagccttagatgaatggttaaaagaagaaccatttttgaaagaaggcatctatagtcatgttgatgtcaaaccatttaataaagcatttccaaaagggtaa

SEQ ID NO: 44530 - DNA, 480 bp, Acinetobacter baumannii
atgcagcttgcaaccaaaagctttcttggcttgtgtttgatatgttcaactgccggagcagttgaacctgctgcgacaccagcaacgcctccaactgcagcgtcaacacaaaatgctaaaccagcacctacttctgcaactgtagctaaacccgcgactacaacagcaccaaccacaacacaaccgcttacagcagaacaaatcgcaaagaacaagcaacagcaagatgcaaaaattaaggctttagttcaagatcaagcatctcgtctaaaacagctagaacatgcaaaccttgaagcgctagcacaaaaccaagaattgcagctaaagaacgataacttgtctgttcaggtacaagttttacaaagtgaacgtagtgctcaaatgttcttatatggcgcagtaactcttgcaggtggcgtactgcttggcttctttattgcgagttatgtttacaccaaacgtcgacgtcagtggtaa

SEQ ID NO: 44531 - DNA, 1872 bp, Acinetobacter baumannii
atgaacaaatcaaaccgtatacaaactgctgagctggattgggaatctattgatggtattgaagttcccatttccaaacaatttggtgatgtctatttttctaaagataatggtctgcttgaaacacggcatgtatttttaaatggcaatgacctatcagaacgattagccaatttacaagattttgaatatttcagtgtaggagaaaccgggtttggcactggtttaaatattcttgcgctctggcaactatggcaacaagtacgtccaaataaccacagtcatttacatgcaattagcgtcgaaaagtttcctttaagcaaagctgatctcattcgtgctttaaatgtatgggatgaacttaaaccgctttccaaacaacttattgagcaatatcccttacctcttgcaggctgccatcgtttaagttttccagaagagcgcttcagcatcgacctatggttaggagatgcacaagatatttttccaagtatggtaaaaacgaaggcagtgaatgcttggtttctagatggttttgcgccttcttgtaatccggacatgtgggaacaaaatgttttaaataatattgttcggctttccgactatggcactacctttgcctcatttagtgtagctggtgtcctcaaacgtgggctaaagactcacggaatcgatatttctcgtcctcgcggttttggtcataaaagggaaatgcttaaagccgtttggaaagcacctgtaagtgaagaaattttattagaaccagttagcgatactttccatttcactcagcagcgtatcgccgtaattggcgctgggattgcaggtttaagcacagcttgggcatttgctcaacgtgggcatcaggtcactctatttgagcgtacagcgccgttatcaggtgcttctggcaatccattggcattgcttaatccgaaactatgcccaattgaacaaagccatgagcatctcatgactttaagctggcaacatgcattaaatttctataaaaattttcaagcctttcgtcccattcaaatacagcaaatggctttaaaaaatgcacaagatcttctcgatcttgctgatcaatatcctgctgatattgtcacgcagcaaacaagctcacttgaatcagactatccacatattttgttgaccgaagctggagcagtttctccgcaccaattacgcgatgagattttgcaacatccaggtattgaactgaaaattgccaatatcacgacacttatttcttttgaaaataaagttcaattaaaaagtggtaatgaaactactttagaggctgatcatgtcgtggtgtgctgcgccagagaaagtgctgctttatttgaaaattatccgctattaaaacctatacgtggacaggtgagctgggttgataattcttttgcaaccttacctttaaacgaagcctatagctatggcggctattgtatgcaactgaatgcgtctgaacttattttaggagcttctttctacccaagccgagatgatcaagaagtactgattgatgaccatgtgcataactttgaattaatccacagcgttttccttcattatgcaaaacaattaccaccagtcgaacaatggcaaggacgagcatcagttcgcgctcaaagtccagattattttccacttgtgggaaaaatgcagaaggaaagccctatttctacttttgcaggtttaggctcaaagggctttttatttgcgccgctttgtagtgaagttttagtggcccaaattttaggtgaagcttgtcctgttcccaaaagcctattacagaaattagatgcccaacgttttcaaaagaaagttaaacctaagaaaccttattttaaatctcaatag

SEQ ID NO: 44532 - DNA, 315 bp, Acinetobacter baumannii
atgatccgtaaacaagaaattacaacatttgagttcccagaaaatgctgttatctgggatgtccgtgattcaagtgcttatgcagaagggcatgttaaaggtgcggtaagccgcccaattaatgatttaaatgctgatattttgaaccaggtcgctgcggatcagccgatttatattttatgtggtggtggtagcaaagctcctcgtgcagctgagaaactagaaggcttagatgcctcgcgtgaatatgtcgtgctgatgggagggacgcgtgcagctcgtgacgcaggtttacctctagagcagggcgcataa

SEQ ID NO: 44533 - DNA, 489 bp, Acinetobacter baumannii
atgccttctttcgatattgtttctgaattagagttatttgaagttaatcacgctgtacaaaacacccaaaaagagattgcaacacgttttgacttccgtggtcatgatgtttctatcgaattaaatgaaaaaaataaagagataaaaatcagtacagaaagtgatttccagtgtgaacaagtttataacatgttagaaaatcacttttataaacgtaaaattgatgtgcaagcgcttgaccctcagaaagcaacagcatcaggcaaaaattttgtacaagtgattaaactaaaagatggccttgactctgatacagcaaaaaaaattaataaagccattaaagaaagtggcatcaaagtgcaatcatctattcaaggcgacaaaatccgtgtaactgataaaaagcgtgacactttacaacaagtgatggcttttttacgtgaacaacaatttggtctgccattacaatttaataactttaaagattaa

SEQ ID NO: 44534 - DNA, 495 bp, Acinetobacter baumannii
atgtctcaatccaatcgtctattaaaactggtaaaagcaacttcaaaattccctaaaggtattcggagtacgctttggagtaaggcatttggccgcattgtgccaatggtgggtacagcaaacattcgctatctggaagtagatgtaaaccatgtgacggttcgcttagagaatcaaaaaaatatgcagaaccatattaaaggtgtccatgctgcggctatggcgcttttggcagaaactgcaacaggttttctaacgggtttacatattccagataaccgtattttattaatcaaatcattacatgttgattatttaaaagtggttgaaggtggtttaacagcaacagccactctctctaccgaacagcaaaaatatattgctgatcatgagaaaggtgaacttgttattccagttacggtcattgatgatgcaggtaatgaaccgattcaatgccaaatgttatgggcatggttacctaagcgtaagaaataa

SEQ ID NO: 44535 - DNA, 423 bp, Acinetobacter baumannii
gtgtcagaagcttataccaaaccagaaggaattttatccttacaaacgattgccatgccagcagatacaaactggagtggtgatgtgtttggtgggtggatcgtgtcacaaatggacttggctggagcaattcacgcggagcgttttagtcgtggtcgctgtgctacgatttccattaatcagatgacctttttggttccggtaaaagtaggctttgtcattagctgctataccaaaatcctaaaagtgggtaatacctctattcaaatgcaaattgaagtttgggatagccatgatgactctcgtgccccaattcgtattactgaaggggtctttacctttgttgcagtagatgtaaaaggcaacaaacgtcagattcctgaggaagcgaaacagaaatttcttgcctctcaagaatcgtaa

SEQ ID NO: 44536 - DNA, 438 bp, Acinetobacter baumannii
atgattattgtatgtgcatcgtgcggtgcaaaaaatagagtaccagaggaaaaacttaccgctcaaccgagttgtggacaatgtcatcagccattactcccgcttgagccaattgagttaaatgaacaaaactttagcaactacatcacaaatagtgatctgcctattttgatagatttatgggcagaatggtgcggaccttgtaaaatgatggcgccacattttgcacaagttgcaaaacaaaatccacgtgtcatttttgccaagattaataccgaagagtctcctcgcttaagccaagcatttaatgtgagaagtattcctacccttgtattaatgaataaaaccacagaagttgctcgaatgagcggcgcattacgcgcgcctgaattgcaacagtggctagatcaacaacttcaaacgaatttcgggagctaa

SEQ ID NO: 44537 - DNA, 897 bp, Acinetobacter baumannii
atgcacgcttatacggttgagcctttatatgttccatgtgatcaggaaatgatcgcagctgacttttatattccaaaaacaaataataaatctgcggtaattatcatggcacatggttttgccggattgcgtcaattcaaactcatccaatatgcccagcgttttgctcaagctggctatgcggttattttatttgattaccgatattggggcggaagtacaggtaagccccgagagatgatttctatcaactctcaactagaagactggaagaccatgattcaatatgcttctacgtgtaaatttatagataaccgaagaattgtattgtggagaacatccttaagtgggggatatgctttaagcctagcttctgaattaaagaatattcaggccattatggtacaaattccatatgttgatggtgctgaaacagcaaaattatatccactccagcgttatccccaagctttaaagttgtcgagccaagattatatgggttcaaaaatgggccttaaccctaaaaggttgcctgtggtagatcaatataaattgtgctttatgccaacagcagatagctattatggttatttatcgattgtgaatccggattattactggagtggagaagtcccggcacgcgtgttttttaatttgatgcgttatcgcccaattcaacttgtacgtcaaattaatattccagttttatttattgcggctcagcatgattctttgattccaattgagtctagtcgtgaagctgcgactaatattgctccttttgtgagttatcatgaatgggatatgaaacattttgatatctatcacggttcatggtttgaaaaagcagtgacgacccaattagaatttttacatcagcatataggagtgatgtaa

SEQ ID NO: 44538 - DNA, 336 bp, Acinetobacter baumannii
atgtcagagaatgttggtttcgcaggtcaaattggcccagaacatgtgggtcaggttgtagaaaaaggctttaaatctattattaataaccgtcctgacatggaaggtggtccagaacaacctaccagtgctcaaattgaagaagcagcacgccaagctggcctagattatgtttatcagcctgttgtagctggccaaattactgaacttgatgttcgtacttttgcaaatcactataatgaacttccaaaaccggttctcatgttctgccgtactggaaaccgttcaaacaatctttatcaattagccaaacaaatggatttgttagacgattaa

SEQ ID NO: 44539 - DNA, 1194 bp, Acinetobacter baumannii
atgaaacttactcaaggggtatgtgtgcttactttagctgttttcttatcagcttgtggtggaggtggtgatggctactataatcaaaactcagactcgggttcaacgacaacaccaactacaccttcaaccgatcaagaacttgccaattctgttttaaatagtgtaaagcaagaaggaaaatatttatttggtgcatatgatcttaataatgaaagcttatcaaaaggttatatcgatcatgcattagatacttttgcacaaggcccgctcaagttaactttagatattagaaaagtggaccttactaaatatactgatcattatcgtgaaaaatgttttattaatagtactacagattatcgcgcttgctacgtatttaaaggtgaagaaattaaatccttacttacaggttataatgattgggattttgatattacagcagatgatttaaagaatattaagcttgcttctgataatatttctccaaatttacaggaatatcaatctaataccagaatttatatttttgagaatgaaaataaggataaaaacttccaggatgtgactattactggagcctttgcatatccattccaacagtcatggggacttcaacaaactaaacaaaaaagatttgtcttaattaactcaaccacaagcgattataaaattactacaactaccatggtccaagatccacagacaggccagccaaatgaaaaagaagttaccacaggcgcaatgagcgtatataaagataatacctcaactgatggcgatctctatgtaatccaaggtggttctggtttcaatgtacttatcaatgataatcctaatgttcctttcgcagaaccaatatcatttgttgtaaactcaactcctggtaatacgaataacgcaacatatagagtgagattaggtaagaatcaagtattaagcttaccaaatattactggtattgaaggaagtagagttgagaatgaggctccaacgacgaatatacagaagtttaatggtagtatttatttagaaggacaaaatatttttacttttaaacaagatttgaatggaagtactttagactttaaacatgtaattaatggcgtaagtattgaaggtcaatctactaatcaaaatggagttgtttcaactaccttaaaatcaccattcgcgcaaaaatttacattttaa

SEQ ID NO: 44540 - DNA, 1374 bp, Acinetobacter baumannii
atgttcgatcttattatcattggcgcgggtacggctggtattagcgcttataaagaagcagtaaaatacactaataatcttttaattataaatgatggcccttgggataccacttgcgcacgtgtagggtgtatgccgagtaaagtcttaatctctactgcaaaccgtatgtatgatatacaaaatgctcaagaggttgggctgagtgcttcagcagatattagtactgatcaggttatggagcatgtgagaaccttacgtgatcgttttactaaggccacagtaaaagatgtcgaacaatggcccactgaacataaaatttcgggtaaagctcattttattgatgcaaaaactattgaagtaaatggtaaacggtatcagtcaaaaagttttattttagcagtaggctctacacctaattatgatcaaacttggaaacaagaattagatgatcgtcttattactacagatcaaatatttgaattaaacaccctacccaagtctatcgctattattggaagtggagtaattgccctagaaattgcccaagccatgcatcgtttgggtgtagaaaccactatatttgctcgtagtaaaagaattgggatatttactagtcctaagctacaacaactcgctcaagaagaactgagtaaagagttaaattttttatttgagacattgcctcatgaggttaaatctacttctgatggtgttatattgaattataaaattaatgaaaaagaggagtctatccagactgagtacgtgttatctgcaacaggtcgttcgagcttacttgacacgctaaagttagaaaatattgataagtcttttaaagatattaaattactacctgtaaatgcaaaaactaaacaactagataactatccaatttttattgctggtgatgcatacacttctacccctttacaacatgaagctgcccatgaaggtaaaaaagttgttcataactgtttgaattatccacagcttaattcagttaagactctccctcccttaggaattgtatttagccatccagaaatggcaattgtgggacaaagttataaacaacttaaagatgatggagttgattttgtcacaggcgaagcatcttatgaaagacaaggtagagctatcgtactcgggaaaaataagggtgctattgaagtttatatagagcgagaaagtcagaaattgcttggcgcagagttatttaccgaagctacagaacatatggctcatctattaagctggattattggagaagaactaactttaaatgatattttagagaaacctttttatcatccaacactagaagaaggcgtgcgtactgctcttaaacatgctcgcagacaattgaaataa

SEQ ID NO: 44541 - DNA, 1890 bp, Acinetobacter baumannii
atggctgtaatgtgtacggataatatcattgcaactttggaatcccacgcaaaattaaatggaaataagatcgcttttgagtatttgggacgccagtctggtggtattcaatctctgacatatgcagatttgaatgagcgagttcaacatcaagcccaaatattaatgagtattgtagacagtggtgaccgtgccgtattgctgttcgaacctgggttggactttatcgtatcgttctttgcctgtctgaaagctaaaattattgcagtaccagtcagcttaccgtttaaccgtaatggtttttctaatattttgaatattatgaatgactgtgagcctaagattgtactcacgacaaaaaagattcttgagctcgcaggtcttatcacactaaaagctcaaaatgaaaatttgatattacatgctgttgatgccgaattgcagcgtgacttggtggaaaaagattttccgcttattactgaaaaagatatctgcttccttcaatatacctcaggctcaacaggctggcctaaaggcgtaattgttactcataaaaatattatggccaatgaggtcatgattgctgaagcttttggtacacaaccagaagatgttggcctgacatggctgcctgtttaccacgatatggggttgattggctcggttttgcaaaccgtatatgtgggactgacttgttatgtcatgtcgccgctggacttcattcgaaaacctcttaaatggctacaatttattagtgaaaaaggcgtcacgattagtggtggaccaaactttgcctatgaattgtgtctacatcgcatcactgatgagcaggctgcagcgcttgatctaagccgtgtgcgtgtgctgtttaatggtgccgagccgatcaaggcacatgttatgcaacgcttcatggaaaagttcaatacacaatcaaggctccgacttgatactttcttgccatgttatggcttggcagaagtgacgctcttagtcagtggcgtaactggccctctcaatgcaatttcacttgatcgtgacaagttaaatgcccatttggtacagaccagccaagatcagacagccgtgcaagtagtgagctgtggcaagatctcgaaacatattgattgccgtattgttaatcctcatacccgtaaagaggtagcggctcatgaagtcggtgaaatctggctagcaggtgagaatgtcactgcaggttactggcaaaagccggaagttaatcaggaaacttttgaagcaacgatccttaatgaagcgggacaacctggccaagtacactacttaagaacgggtgatatgggctttatcaaaaacggagacctttatataaccggccgccttaaggatgtgattatcattcgtggcaaaaactattatccgcaagatatcgaatgctctgttgaaatggcacatcctgctgttcgtaaaggttgtgttgcggcagtgaactttgctgattctgaaggggttacggttgtacttgagattaagaaaaagtccttagataagacacttaattttgaaaccatcaggactcaagttaaagaacaagtggcggctgatattggcttgcctgtagacggtgtctatttactgcaccaaggccgaataaataagaccactagcggcaaaattagaagaagaaaaattaaagagcagatcgaacgcggtcaactggtctgtttaacccatccaaaccgtagaacggtgattgctcgaaactatgtcaagaacggcttagacgtcatccgtgatcgtgagcagcgggggcagctgattcgttatagctccaatctactcaactcaatgatcaaggaacgtgaagtacgcacgctgatttttaatcgtctgaaaagtgctttgttttaa

SEQ ID NO: 44542 - DNA, 1794 bp, Acinetobacter baumannii
atgtcacttacgtccaatttgcggcagtttcaatctgccgctcgtctggagcaaattttaggctccgtacatgatatcaataatgatttttcttggtccgcagctatcgagcgtgatgagaaagagcaatatccacagcgagctgttgattttctgaatgcggtgggtatgaaccgtttctatgtgccttcagagcttggaggccgtatggaaattggtgaagagttgttatatctgcatcgtgtgttggcacgacgcgatctaactattaattcaacctatagcacgaatgcttggtctgtgatcgtatggatcggtggtaatgcgaatcaatgtcaaaacatcgctaaccgaattttgagtggtgctgctccagcgctggcttatagtgagaaagcgcatggtgctgacctgttatctagtgaagtgactgcgcaaccttccgacagtaagtacgtcttaaatggtgagaaatggtcgatcaatcgcgccactttaggagattctttaagtctgattgctaaaacatcgaacgatcgtggaccacgtagtttaagtgcattctggctcgataagcgtcatatggcttctaaaggaacgtatagcctgaaccgtcttccaacagtaggtatgcgtggtctagatatcagcggtattggttttaataacgctgaaattcataaagatgccctgatcggtgaagaaggccaggggttagaacttggactcaaaactctacaggtaacacgtgcatattgcagtagtttctctctaggcgctggcgatacgatgctacgcatcgcaaccgagtttgcgattgaacgcgagttatataacaaaaaagtaatcagcataccgttggtacgtgagcaactcgctacagcttatgcctaccttttagcagcggaggtgttatcacttgttggtgcgcgagggttacacgtttgtatcaatcagttcagtacatggtcaccaatcgtcaaggtactggtgcctgaatatgtagagtcgcttgccaaaatcacatcctcagtgcttgggtcacgttttttcttaagaaatgcatatgcagatggaatgtttcagaaagcattcagggaccatctgattgtcagtgtgtttgacggtagtagcaccgtctgcctagacagtctgagttttcagctcaaatctgccaataaagggcgcagcaaaaaagccgaccatctcaatcaagctgaagcgaaagcacgctatcgccagttatatgacttacaggtagagacaggtgctattgatttccgtgagcttgagattttcaaccgagatggcgacttagtgatggagtcactcgaaacaatcatcgaaatgctcaacgactctaatgtcacagcagggttgtctgctgagacactcaccacgctacgtgaacaagcaaaccaacttctggttgagcagcattcgttggatcaaaaaattcaggattacttctcaaattctgagcaaagcaaagagtttgaaacgctgcgcttcagtcttgcccgtaactatgccgagttattcgctcgtattactgtgttgggtttctgggtttttaaccgccatggtttaaggcctgctttacaggatggtgcatggctgatcattttcttaaatgccgctgaagggcagacagcccctccaatgacgtcattacgtgaaagcacattggcagatttgctagaccgaatttcaaccaaccatatgttatctgtcatcgattttgcactggcaccacgtgatgccaaaccggttaaagaggaaattatcccatga

SEQ ID NO: 44543 - DNA, 261 bp, Acinetobacter baumannii
atgaataaagataaagcttactggagcgcaatcattcgtacgctagtagccaaagaaatgcgcgtagagcctgagacgattgatccagaccaaaaatttaccagttacggtcttgattcgatcgttgctttgtctgtgtctggggatttagaagatctgacgaaattagaacttgagccgacactattatgggattacccaacaatcaatgcgttggctgaatatcttgtttctgagttgcaacagggagttgcttcatga

SEQ ID NO: 44544 - DNA, 2007 bp, Acinetobacter baumannii
atgaacaaccttgcacgactagaaccggaagttctgtctcgtcatgcgatttctgcagaacagctcggcatttggtacatccaacgtttagagccaacttgcagtgcctacaatatggtggtggcctttgatgtgaaggttaaccaaccattaggcaataagccgatggagattctggaagcggtaatgcatgattatccgctgttgcgtgtcagcatgcctgccaatgatcagggaattgagcaactgatctgggatcgcgtgtatccgaatatcatcttttctgatgctcgtcatattgaagcttctgatttgacgcaattggttgagcaagacaccaagcagccgtttgacctgactcagccaccgttatggcgtattcattgttatgaacgtggtcaaaatcattatgtgatcgcatttgtaattcatcatgcgctcatggatttttggtcaattggtctattgctgcgagacgttagcaaacgttttggactcgttgcagagtcggatgcagtgaacggaatcgagtttgcacagtatgccgataagcagcagagcagcgtgattgatgatactgatgagagcttaattttctggaaaaatgcattgaagcatgcaccacatgtgcatagcattccgcttgactatcctcgtccagccgtacagcaacataaaggcagttcactagttttccatgtgcctgagtcagtgtcatctggtcttataaacttggcaaaagattatgagatcacattgttcggacttgtgctatctggcttttatgttctgctacacaaactctctaatgaaaataatctagtcattgctacgcccgtagcaggtcgacttgaacgttctttacgtaatgcattgggtcagtttgtcaacacgattgctattcacatggacatcgatgctgaccagactttacgtcaatttacgcagcaggttcaggaacaattaagacaaagccttaaacatcaaaaaattgccttttctagagtagttgaagctgtctcaccaaagcgtgatggcagtattaatccattggctcagataggaatgttctgggaacgtctgggtggtatggatgagtttaaagaactactcctaccaatccagactccggccactttggttggacaagatttgacgttaggaagttttccggttcgccagcaagaaggacagttggatattacgctggaaatgggcggtgaatatcaaggtgaactcgttggcgtattgaaatacaacactgatctattttctgcgcagtctgccgagaatatggtgcaattgttgcaagctgtactcgcagagatggtggcccatcctgaacgtaagattgttgagctagatatcgctcctgattataaagatggcattcagttcgaggctctccgtggaaaggtgactgattatgctcagcatgatctacttggaatgattctaaagcagattgttgagcgtggtgaaaatcatgctttaacctcaaaggatcatgcggttagctaccgtgagttaggtcaacatattgctggtattgctgaatatttgcgtgcacacggtattacacgtggcgatcgtgtaggactaatgttagaccgcacggcgttattgccagcagcaatccttgggatctgggcggcaggtgcagcttatgtaccgctagatcctaatttcccaactgaacgtctacagaacattattgaagacgctgaacctaaagtcatcttgactcaaaccgagttaatggatggtcttaatgtttctgtgtctcgcttagatatcaatcaagctggtgttgtgtcactagagcacgtgcgcgagacgcttgcctttggtgacatagcttatgtgatgtacacatcaggctcgacaggtaagcctaaaggtgttcgtattgggcatccttcaattatcaatttcttgctatctatgaatgatagattgcaagtaacgactgaaactcagttgttagcaatcaccacgtatgcatga

SEQ ID NO: 44545 - DNA, 3651 bp, Acinetobacter baumannii
atggtgaccatagaacatgctttcctcataccggccaagattgacaaggttttcaactaccttgcaaacccagccaatgatgcaggttggcaattgtcgtgtaaacattctgaactgctagacagtactccgcgtgtgggcagtaagtacgagattggttttagctttattggtcgtgaaatgtcctttaaaggtgaaattacacatctagtaccgaacgaattgtatgcgtttaaagtagtggagggaccctttcactacacaggtacttaccgtttcaaaccacatccggaaggtacgtggattgaatgggtgtttgaagcagagccaggtagtttttttggtgtattgccgccagcactgctaaaaaagatggtgctcgcccagttcaagaaagatgtcgacaatcttcaagcattggctcaaaagggtgaagcctatgagtcagttggcaatgaaaataaaccaactcacgaggccaataaaccacctcgtaagactcaacaaatgatggagaaatacgcgcgttggattcttagtcatcgccgtattgtcttgactgtggtgatgctcttaacacttgctctagcatatctggcatctggtgtaaaaattattattgacccagatgcacttgcgcctaaagggcatccctacatcacctcgaccaagctgattgaaaagaaattcggctccaaatatatggtcgtgattggtattactccgaagcagggtgatatttatcagccgcaagtattggagaaagtcaaacgcattaccgaagaagttgataatgcaccgggcgtggtccgttccacgatgatgagtctggctgcacgtcaggcaaaaggtatcgaggcgaatgcagaagggttcgatgccaagaaactattgccgagtagttcagtcactcaagaagatatcgatcacctgaaaaaactgctggcactgaatccaacctatatgaattcagtggtatctaaagatcaacaaactgctgcgattttgcttgagcttgaggaaagtccagagggcttccagaaaatgatgggcccgattaataaaatcgtagaaagcgaacaatctaaagatatgaccatcagtgtcggtggcaatcctgtgtatctggataaagctgaagactactctaagcgtatcaatattttgttcccgattgccgtattagtgattggtttattgcactttgaagcattccgcagcaagcaaggtttgattctgccgctcgttacagctttgttggctgcggcatggggtatgggcatgatgggcttgttcaaacagccaatggatatctttaactcgcctacgccaattctgattctggccatcgcggcagggcatgccgtgcagttactcaagcgctactatgaagattttgatcgcctgattgctcaagggatggagcctaaagctgccaatagcgaagctgtagtgcagtctttggttcgtgttggtccggttatggtgttggctggtggtattgcagcagctggattcttctctctgttgactttcaacattccaacgattcgttcattcggtatttttacaggaattgggatcatcagtacgctggtgattgagatgacttttattccggcactccgctcaatgttgccaccaccttcggttgtgaaggtcaaacgcaaaggcttgccaatttgggattggattccaaaccgtattggtgatgtcattttgtcagttcgtccgcgaatgatgttaatgactgcgattgcggcaatgggcatcttccttgctattggcacgagccgtattgtggtggataacgatagccgtaatttcttctctcgtgacttaccaatgcaacaagatgacagattcttgaatcagtctctcggtggcacaaacagcctttatattatggttgatacgaaggttcgtgatggtattgaaaatcctgaaatcctaaaagcgattgataatactgaaaagttcgcgaactcaattccagaggtcggtaaaaccatctctatcgtggactatatcaaacgaatgaatcaggcaatgaatgctgatcagccacaagcatttcaggttcctgcaaccaaagatgtcgttgctcagtatctgctgctgtattcaatgtctggtgagccgacggattttgattcatacattgataccactcaacgctatgccaagatcacgattcttctgaaaactggcagtaatcatcgcattaaagaaatccttgagtcgctaaaaacgtatatggcgggtcaattgggcgacaaggctgtagtgagttttggtggtgatgtgacgcagaccattgctttgactgaaacgatggttcacggcaagctcatgaacattctacaaatttcatttgccgtattctttatttcagcattggttttccgttcgatttcagctggactgattgttctgactccacttctgttctcaattcttgccatctttggcatgatgggctggctcgatattccgctcaatattccgaactctctcatctcggccatggctgtaggtattggtgcggattatgccatctacttcctctaccgcttgcgtgaaatcttgcgcgaagaaggcggcgatatcaaagacgctattcgtaaaactttaagtactgctggtaaggcttctctttttgtcgcgactgcggttgccggtgggtatggcgtattgtccttatcacaaggcttccacgttcatcaatggctcgcgatgtttattgtgattgcgatgcttttcagtgtatttgcaaccttaattatggtacctacaatgattctaatattaaaacctcgttttatcttttcttcaaagaagaagagcattcctgttgcacaaactgtggtgacaagccttttgttaggtacggcgcttacaatgtcgattcctaaaacatctcatgcagatgaagttcaagatattgttaatcgtagtgatgatgcctctaagttcttgtcttcaacagctagcgccaaatttattttgacctctaaaaatggcgagcaacgtgtacgtttaactaaaaatatgaccaagcttgctggaaatactcagaacaacatgcgtttgactgagtttatctcgccagcagatgtccaaggaaccacgacgctgttaattgaaaatgcaaaaggcagcgatagtatgtttgtctatttgcctgcattgaaaaaagtacgccgtcttgcatcagcgaataagggtgatgcttttattggtacggactttagttatggtgatgttcttggctataagctcagtgactggaagtacacgaaactggcagatggcaaatttaatggcaaagattgctacatgattgaagcaacgccaatcaataatacggtgaagagtgactttggttatagcaaacgtcgtatgtgcatactcaaagacaactttgttacagcaaccatcgatatttgggatacagcaggcaaaccattaaaacatattgaattcaccgatatccgtccttacggcaaagtgaaaccaagatggcaagccatgaaatctatggcgaagaatctgcaaactcaacatatgacgcaagtgatcgtcaatgattttgcggcagaaaaaaccttatccgataagcttttctcaccgcagagtcttgaaaaatga

SEQ ID NO: 44546 - DNA, 1272 bp, Acinetobacter baumannii
atgacgcaaggtgcctattgggtatttgcatgctgcagtagctttatgctactgcagcatgcttatgcagatgacagcgaaatgagttttgtgagccagaactcagccagactcgacgtgtggtcatcagatcgtgatttaagttcgttaaaaaacattggacaggcaagtttctggtccaatggtacgctcaagtttaaccctgcatttaagctgcattacgacatagtggttggagacgaaacggaccatactgtgaacccagatcaggtgagtaaggtaaatcgtaacttacgtgagttatatgcgtcatataattgggaccagaccgtctatgtcgatgttggtcgtcagattgtagtctgggggagagcagatggaattaacccaacggataacctatcgccccgtgactatacgcgtctagtaccagacgagacagatcaacgtctaggaaatgatgcaatcaaattgacttatattcctgaatctggaaccaataaatggacagcattgtggtatccgcgtagtcgttcagatgtgattccattgcgtcagattgctggtgttcagtatgacatagaccgtaagagccgtcccgcatttgcaatgcgttgggattattccgtagatggtctagatgtaggggcatcgtatttctcaggtttagaccacatgcctgatctatcactacagtcgttatctccaacaggggcaacattacaactgaaaaataaccctatgtctgtctatgggtttgatttcagttataaccataacgatatcgtatggcgcggtgaagcggcatatacaaagactaactcagatggcagcgaagatcttacccataaaaaaaataatttaactgtggttatgggaccggaatggtcattaaaaaattctacgctgagtttagtaggcgtgtacaagcatacagaagactttcaaactgccgatagcctaacaaatccatcattgagtacagtctaccgttatcagcaaacaatcagcgatcaatatgagcaagatcagtatggagctatgctgcgttatgcgcttaacctattgaatgacaatttaaagttagagtttacaggattctattttgcaccagagcctaatgaattgttgagagtacgtattaactacaacctcaatgatcactggcagttaaatgcaggtggagatcgcttctggggcaggaatgatacggtactaggacaatttagagataacagtctggtgtatgcccaggttcgatataacttttaa

SEQ ID NO: 44547 - DNA, 2538 bp, Acinetobacter baumannii
atgtcagaatggttcatatccagtatatgctttaaaaagtgcactacatattatttagtattgagtctcgcaattaatatccccttaactgtatatgcatcagacaatatgaatagggaaaatattttaaaagctgactttgatactaattttttagtgggaaatgcacagaaaattgatattggtcgatttaagtacggtaatcctattttaccgggtgaatatagtcttgacgtctatattaatgggcagtggttaggaaaacgaaagtttgtttttaaaagtactcattcgaatgagaatgcaaagacctgttttaccccagatatgcttttagaatatggagttaaaccagaaatttttcatcatgaagtaagtagtacctatacctgtaatgacttagacaagtgggttaacgatgctttttatcaatttgatacttctcgtctgagacttgatatttcaataccgcaagtagctttacaaaagaatgctcaagggtatgtcgacccacgtttatgggaccgtggtataaatgcagctttttttgcatacaatgcttctgcctatcgtattgtaaataataaccatgaaacaaatcatgcgtttatgggtacaaatgttggtctaaatctctatgattggcaattacgccatactgggcagtggaaatggcaagatcataatgaaatacaagaaaaggtttcttcctacacatcaaataatacatatgcccaaaaggcttttcccaagctcaatagtgttgttactttaggtgattattttaccaataataatttttttgatgccctgccttatcgtgggattaacatatcaagtgatgaccgcatgcttcctaacagtatgctcggatatgctccccaaattcgaggttatgctaaaaccaatgcaaaagtagaggtacgtcagcaaggaaatttaatttatcaaacgactcttacacccgggagttttgaaattaatgatctttatcccacaggcttcggtggcgaattacaagtctctatatatgaaacaaatggagaaattcaaaagttttctattccttatgcttctgtcattgagatgctaagacctaaaatgagccgatattcttttactttgggacagtttagagatgccaatatcaatctaaaaccatggctagtgcaaggtaagtatcaaagaggtatcaataactatttaacaagctatacaggctttcaggcaactgaaaactaccagtcttttttaataggtagcgcatttgcaaccccaatcggtgcaatttcatttgatgcaactcagtcatcagctgagttcgaacaaaagcccacacttaaaggacgaagttatcgtttaagttataaccgactatttactccaaccaacaccaatttaacattagctacgtatagatattccacagaaaattatttgaaattacgcgattcaattttaattcgtgacttgcaacaacaagatattgatagcttttccgtggggaaacaaaaaagtgaatttcagatcacattaaaccaaggccttccaaatcaatggggtaatttttatttagtaggctcgtggattaattattggaaccagcctaatcgtaatcaacaattccaatttggatatagtaatcaatttaaagatctgacttacagtatttctgcaattactcatgagtttgaccaagaaaatcaaaattctggtcacgaaacacaatatttgttgtctttatcttttccacttcaatttaaaaaaaataccgttaattttaatagttctattgcaaaagatagccgaactttaggaatgagtggttatatcggaaaccgctttgattatggctcatcaatttcatatcaagatgcaggacaaacaagcctaaatattaatggcacctaccgtactaactatacaactataggcgcttcttttggtcagtccgatacataccaacaagaaatgatcaatttaaatggaagcttggtcgctcactcacaaggtattttatttggcccagaccaagtacagaccatggtattggtatatgcgcctcaagcgactggtgctcgagtcggcaatacacctggtctaagcattaataaacaaggttatgctgtcattccttatgtaacaccctatcgcttaaatgacattagccttgaccctcaagggatgccatcaactgttgaacttacggaaacaagtcatcgtattgccccgtatgcaggatcaatcactaaagttaacttttcaacaaaaacgggatatgcagtttttattagcacccaaacacctaatggcggccatttgccatttgcagcacaagtttttaatcaaaacaatgaaatagtcggaatggtagcccaaggtagccggatttatttacgtactcccctaactcaagatcatctttatgtgaaatggggacaaagtaatagtgaagaatgtcaacttgattatgacattcaatcaaaaatcttacaggaaaaacaatcaattattatgacagaggcagtctgcaaatga

SEQ ID NO: 44548 - DNA, 1020 bp, Acinetobacter baumannii
atgaaaaaaatgcttataaagagcggtttactcatcactagtttttttatttataaccaaacctatgccaactgtactttaagcaagggctttaccacagtcgatattccaatgacgattggaactattgtagtacgcccgaccgatccaatcggaacagttctccaaaagaatacttttactatttcacccaataattcgactgcaacttgcaaccgtgccaatgaccaaattacagcggcacttccattaaactatcctgttagctcgattggaaataatgtgtatgcaaccaatattccgggtataggtattcgactttatagagaggcattcgactctacagatttttctggatattacccttataaacgcagcttgactcctaatacaacatatacgctttcaccaggatattttgttatggaagtgattaaaactgctgcaactacaggttcaggtgcattagttgctggtcgttacagtacctattatgtaacaggacaacaaaatcgccctttcttaacaactacagtattgagcagctcccctattcttattgcatcatcttcttgtgaaattcaaaacggcatagatacggttgttcagcttcccactgtgatgaaatcaggttttagagctattggatcaactcaaggtgagaaaaactttaatttatcgattctttgtaatggtggggaaaataactcaggtgtaccaacgagtaatacactgagtttaagctttgactacatttctgacacttcaaatagccaggttattaataacagcgctgctgagtcaactaaagcaaacggagttggtgtggaattgttatggaatatgaatggcgcgaacaatcctattcgaaaaggaaacaaactagatattggtacagtaagttctaaccagacagtacagtacgatattcctttaacagcgcgttattatcaaactgcttcgaatgtaacagccggtgaagtcaaagctaatgcaacggtaacgatccaatatgattag

SEQ ID NO: 44549 - DNA, 180 bp, Acinetobacter baumannii
atgctcattatttggaaaatattttgtattttattattaagtttaggggctttcggagttggtttaggtattagttatttagattttttcttattttttattggtttactttttttgctgtgtttttttctagccttgaagcaagcaagagaagatgcaggaagttttcctgatgaataa

SEQ ID NO: 44550 - DNA, 852 bp, Acinetobacter baumannii
atgattgattgggaaaatttacattacttttcagttttttctgaagagaagacactttcagctgctgcaagaaagttaggtgttgaccatgctactgttgcaagaagaattgcccagttagaagataatttaaaactaaaattagtggaccgtagacctcgtacttatattttaacttcagagggggagcgtctggccaaaatcgtgacacgtatgatggaagaaacattttctattgaacgtctagctcaggcaggacaacaggaaattagtggagtagtttcggtaagtctaccgccagctacggctgcgcatttagtaatgcctcatcttggtaagttttatcgtcaatatcctgagctacaattgagaatactcggtgatgttcattatgcctccttacagcatcgtgaagcagatatcgcagttcgctttggacgccctaaagatgattatctaattgcgcgtaaagctggtgaagttccttttggcatatatgcagcccaagaatatttggatgctatacaagaagaaaactatgaatggattagcgttgaagttggtggagttcaaggacaaaaacagcaaaagttaaaacaacggttaaattataaagagcctgttatggttacgaatcatcctgagcttcaatggcgggctacttgtggagcagttggcttagctgtactacctgattttttaggccagcaaggtcatttagtaaaattacctgatgatgacccaatgagtgctgaaatttggttagtaattcatgaagatctgcggagtagtcctgcagtaagggtagtgatggattttcttttagattgttttgaatcttttcgtatttaa

SEQ ID NO: 44551 - DNA, 930 bp, Acinetobacter baumannii
atgaataaatcaatggtgtatgcctatactggtgttgtaatcacaatgctgttttggggctcggcatttaatgcgatgtcttatgtgattcaatatatgccacctctttcagcagcagctgaacgttttacaattgcaagccttggtctatttattctttttgcagctataggaaagctacgttgggccgcattacggcaaaatttagctatctatcttattattggaattataggtattgccggttttaacctaggctgtttctatggtttacaaaccacctcagcagtcaatggcgctttaatcatggccacaacacctttaattactttattgttaacaattttacttgatggagaaaaactaacacttaataagtctattggtgttgtatttggcttaagtggtgtactttttgttattagtcatggccatatttcaacgttactacatttaaaaatagcaatcggtgacttattcatcttactaggtggtgtcagtttttgtttagcgaatatgctatcacgccgttatgtaaaaaatgctacacctttagagaccacaaccttttccatgatgtccggtgctttgactttaatcatattaagtgtaatttttgagcacccttctcaagcaattgctatggcgcctatcactgcacacttagctatgggatacgtcattatttgttctaccatgattgcttatttattttggtttaatggtatccaaaaactaggtgcaggccgagcatcaatcttttttaactttgttccggtttttagtatgttagttgccttgttagctggtcaatcacttaatatctggcaacttataggcacagctttagtcatgcttggcgtgatgagtagtggaggatttattcagattaaacgtcctacacttatagctaagccttgcacaaagtaa

SEQ ID NO: 44552 - DNA, 465 bp, Acinetobacter baumannii
atgaatttggattttacaactatcgaaaaacaggccaaattgctaaaagaagagcaagagaaactagaacagcaagatcatgattttcagttagctttagacaagcatagagaatcattaaaaaatttatttaaagaactttttcatgatcgagaaattaaaacagaaaatggaggacagttttgtgtagtatttggtgattttaaaatatctctactcattgaaacagccaaattcgagaatggtgttcctgttaaattaaattccgttaatccaattattgttaaatttaaaaaggataagcccgttgcaaaagcccaattttctgatgcaacccaatatcttgatagtggttttgaaacatcccactatcagtactattacaaacacgctgataaaacacaattagttcaattttcggagttacctgtattttttcaagcaatccttgatgcagaagtctga

SEQ ID NO: 44553 - DNA, 1416 bp, Acinetobacter baumannii
atggactcatcagctgggaaatcgaaaagcggatttgttgaaaaccgaagtattgactttattcctgaaaatgaaaggcatggcagtatatttgcccaatttacgctttggttcggggccaatttacagattacagctattgttacaggtgcattagccgtcgtattaggtggtgatgtattttggtcaatcattggcctctttattggacaatgctttggtgctgccgtcatggctttacacgcagctcaaggtccaaaactcggccttccacaaatgatttcgagtcgagtccaatttggggtatatggtgcctgtatccccatcattcttgtttgtcttatgtatattggctttacggccactggtgaggtactcgcaggtaaagcaattgctcatctagcacaggtgagtaatacaacaggtattttaatctatgcttgttttattattatatttgcgacaattggctatcgtttaattcattgggtaggcaaagttgcaagtgttattggtttaattgcttttgttattattttaactcaaattttagctctctctaatatttcagaattgcttgctgtacggcattttagctggtcatcatttttattagcagtttctctttctgcttcttggcaaatttcatttggaccttatgtagcagattattctcgttatcttcctacaaaaacctcttcaacacgcgtattttgggcagttgggcttgggtctttaataggctcccaaatttcaatgatgctcggtgtatttattgctcaagtctcgaatggtggttttgttggcaatgaagttcagtacgttgtaggcatgaatccaatcgctcttgtgattacttttttatattttagtattgcattcggaaaggtcactttatctacacttaatgcttatggcagttttatgtgtattgcgaccatttggaacagttttaagccaagtgctcaaatttcaaaattaacgcgacttacaattgttcttgcaatggtaattatctcaacatttattgcagttgtaggtgaacatacttttttaagcgcattcaaatcttttattttgttccttcttacatttttcattccttggagtgcaattaatttagttgattactattttatttctaaagaagaatgcgatgtagatgccttatatgacccaaatggtaaatatggccgctggaacacgattggaatcgcttgttattgtattggtatcttacttcagttgccctttattgatagtaaattctataaaggacaaattgccgaactgttgggtggagtcgatttatcctggttagtgggattgttatccactgcagttttatattatgtacttgccaaaagagctcaaataaaaatttcaaaagctcttcaacttgaacgaataaaataa

SEQ ID NO: 44554 - DNA, 438 bp, Acinetobacter baumannii
atgcaaggtttaaaacgtcgtattgtttatgtttcttcatatgaaattattggaatggtgatttcatcagttggtttggctcttttggccggagatagtgtagagcacactgggccactttcagtgatgattactactattgcggtaacgtggaactttatctacaacattctttatgaaaaatgggaggctcgccaagaaagtaagtcgcgtacggttaaacgaagaattgcgcatgcgatcggatttcaaattactttagtaatgttcttaattccgcttattgcgtggtggatgaatatttctcttgttgccgcattttggttagatgttgcatttattattatcattccaatttatacgttcatatttaattggacattcgataagttatttggattgcctgcctctgcacaaccaaacactgctcaacagtag

SEQ ID NO: 44555 - DNA, 900 bp, Acinetobacter baumannii
atgaattttaatagtgaaaatatcgaacttttcttaactgtattagatactggatctttctcggccgcggcacgaaagttaaatcgagtaccatcagcagtgagtatggcaattgccaatattgaagcagaacttggttatcacttatttgaacgtacacaccgcaaagttattcctaccgcggcggctttagcattggaacctcaagcccgtattattgctgaacaacttaggctattagctacgcatgcttatgaactttcactcggccttgaaagtaaattaaaaataggtgtggtttcagatgcgaatactgaattactttttaaagccataaagcaactagcagagaagtttcctcttcttaacctagaaattattacagctcctcaagatgatattctaaatttactttatacagaaaatattagcctttgccttgcaggttcaaatctcaatataaaaatgcgtgaaagcttacaattagtaatgacagaaacagttgttgctacgatctctgctcatcatccatttttaaaagaacagaacaagttaaacacgattgaagagttaattaatattcggcaaattgtagtcgcaagtagtgagctagatatggaagattcacgttcaatcattggagcaatgtactggaaaacgaatagcttacaaacagcaattaatatggtcgaagctggcttaggatggggaaattttcccttatcgttggtaaaagaaaaaattgaacaaggccacttagttcaattagattttaaaaatacgaaaaatcatttgcctttatctatttatctcatttggcttcaagataaaccgttatcgaaagcagccagagagcttgtccagattgttcaagcaaacttatctcaaaattgtcattaa

SEQ ID NO: 44556 - DNA, 1233 bp, Acinetobacter baumannii
atgagcacttcacgagtaaagctaactaagtcatttatcgatcaacttgaactcacaccggctatttatcgtgacagtgagattattggctttgctattcgtgtaaataactcttataaaacttacattgtggaaaagaaagtaaaagggaaatcaattcgttgtaaattaggggattacgaaaaaattactcttgaagacgcccgtatacttgcacagcagaagttaaaagagttaactgactcaaactctttaagcattaaaaataataaaatattaaaaaatagtttaaatgagaaaattgaccagccttatctcaaagaagctttccaagtatatataaatcaccacgagttaaaagaaaggacattagccgactataaagaagttatagaaaaatatttaatagacttaagtgaacttaaactgattgatattactgaacagaggattgaagaaaagtatattcagctatctcagtatagttatgcaaaagctaatttatctatgcgtgtacttagagcggtctatcatttttcaattaagtattatcaaaataaaaattgtgaagtaattataccaaggataaatccggttaatttgttaaagaagaaacagctctgggaagaaatcccacctcgaagaaactatatcgatgtggataatttaaccaagtgggtgcaagcaattattgaatataaaggtaggggacaggaaaatgaaacaaataaggattttttattaacacttatattaacagggctttttaggaatgagtgtgaatctttacattggaaaaatatagatttagaggaaggaactctgtcttttataaatccatacaataatgtgtactataaaatttatatgggaaactttctttggtatctgatgaaaaaacgaagaatacaaaataaaggagagtgggtttttccatctgtaaaatctgaatctggtcatattattaatatttcaaaatttagaaaaaaaattaatgaacaatgtaatctttcttttacttttcaagatctacgtagaacattttattttgtgttaaataatttaactaataaaccattagctagcaaaagaacagatcagtatgaagaaaagctggacgttaagaatattgctcatgctcaggatatgcgtaatagaatgaataagtttgagcaaattattcttggtccctatcgagatgaacttattaaatctatcaatattaacctataa

SEQ ID NO: 44557 - DNA, 864 bp, Acinetobacter baumannii
atgcctaaaaaatttgaggactttaataatcctaggaaaaaagcacttgcagggatgaaacaaagcatttcagctgaactttgggacaaaaatcttaattttttaaatcaattaagagccaagatcgcgaaacatccagtatctcatcatcctgcaatagaaactttaaataacggtgaaattaataaagaaaacttaaagcgtattcatttagagtatcgccatgcaatcgtacaaacttttacagatgctttattaatggctcaataccagacaaagcagttagaacctaggttgcatgcaggtgcaaagatgtttccgcgctgtcttttgagtcttaatatatttgatgagtttgggtttcggcctgggaccgacaaagacggttattatcaaggtaacccagaatatgcacattatcctttatttgaagatgtccttgatgattttgaagtaacggaggaagagcgccagagttatcaaccaacagaaattgcacatcaggtgagagagtttctagaaaattcctataaagactataaagccgtttctgctttattagctgtagctgaagaagaagttattttgtacagtccacctttacgaaaagcaaccagtgctgtaggtatagcggtcgagggtggtggctattaccatgtgcatggagtatctgaagatgaaactgctgaggcagcagatgacgatcatgaagaagatctatggtttattttaatgcaagcttgtacagaagaagattacacttatttagaaaacttatgcctcgaatattgtgatttatgggaaaagttttgggatgttcaaatggaaaactcgaaatcaatcctgaaacaaaatttagcttaa

SEQ ID NO: 44558 - DNA, 1989 bp, Acinetobacter baumannii
atgacgacccctttaaacgaacgtcgtattgcaaacgcaattcgtgtattggcaatggatgctgtgcaacaggcaaactcagggcatccgggtgctccaatggggatggcagatattgctgatgtcgtctggcgcgagtttttaaatcacaacccaaataatccacaatgggcaaaccgtgaccgttttgttttatcaaatggccatggttcaatgttgcaatatgctttgcttcatttaacaggttatgatctttcaattgaagatttaaaacaattccgtcaattgcactcaaaaactcctggtcaccctgaatatggttatgctccaggaattgaaacaacgacaggtcctttgggtcaaggtattgcaaacgctgttggttttgcattagcagaaaaaactttagctgctcagttcaataaagatgacttaaaagtagttgatcactttacctattgtttcttaggtgatggctgtttaatggaaggtatttctcatgaagtatgttctttagcaggtactttacagcttggtaaattgattgcttattatgatgacaacggcatttcgattgatggtgaagtagaaggctggttcagtgatgacactgaagagcgtttcaagtcttatggttggcaagttcttcgtgtagatggccacgatgctgatgcgattcgtcaagcaacagttgaagctaaagcagaaactcaaaaaccaacgattattatttgtaaaacaattattggcttaggttctccaaacaaacaaggtaaagaagactgtcacggtgcaccactgggtaaagatgaaattaccttaactcgtgaagctttaggttggactgaagaagcatttgttattcctgctgatgtatatgctgcatgggatgctaaagcaaaaggtaatgaagctgaagcagcttggaatgaagtatttgctcaataccaagcaaaatatccaacggaagcggctgagttacttcgtcgtattagcggtgacttaccagcagaattttcagctcaagcagatgcatttattcgtgaaacaaatgctaaagctgagactgtagcaactcgtaaagcgagccaaaacacattacaagcatttggtcctttattacctgaattattaggtggttctgcggacttggcaggttctaacttaacactttggaaaggttgccaaggcgttcaagaaaacccggctggtaactacgtatattatggtgtacgtgagttcggtatgactgcaatcgctaacggtgttgcattgcatggcggcttcattccttacgttgcaacgttcttaatgtttatggaatatgcacgtaatgcggtacgtatgtctgcattaatgaaacagcgcgtgattcatgtgtacacacatgactcaatcggtttaggtgaagatggtccaacacaccaaccaattgaacaaattgcttctttacgtggcacaccaaacttaaatacttggcgtcctgctgatactgtagaaacagcaattgcgtggaaatctgctttagagcgtaaagatggccctacagcacttattttctctcgtcaaaacttaccattccaaacgcgtactgaagagcaaatccaaaatgcggcaaaaggtggttatgttcttgctcaagagaaaggtgagttgaaagcaattattattgctactggttcagaagtttctttagcaatggaagcttatgctcaacttgaaggtgttcgtgttgtttctatgccatgtgcagaagagttcatgaaacaagatgctgcatatcgtgaagcagtattaccagctcacattcgtgcacgtgttgctgtagaagctgctcatgttgactactggtggaagtttgttggtcttgatggcaaagtaattggtatgacaacttatggtgagtcagcaccagcaaaagacttgttccaattcttcggtattacaactgaggctgtagttgctgcggtaaaagagttaactgcttaa

SEQ ID NO: 44559 - DNA, 1167 bp, Acinetobacter baumannii
atgcgcgagtacgctgtttttacctcggaatctgtaagcgaaggtcatcccgataaaatggccgaccaaattagcgacgctattttggatgcaatcttaaaagaagacccatacgcacgtgttgcttgtgaaacactggtaaaaacaggcgctgttgtacttgcaggtgaaatcacaacaactgcgaatattgatgtagaagctgttgttcgccaaactgttaacggtatcggctatcaccattcagatttaggctttgatggttcaacttgtgctgtaatcaacatgattggtaaacaatcaccagagattgcacaaggtgtagaccgccaaaaacctgaagaccaaggtgctggagaccaaggtttaatgtttggttatgcaagtcgtgaaaccgacgtgcttatgccagcccctatttcgtatgctcaccgtttaatggaacgccaagctgaacttcgtcgttcaggcgcattaccatggttacgtccagatgcaaaaagtcaggtaacttttgcttatgaaaatggcaaacctgtacgtttagacgcagtagtactttctacacagcatgatcctgaaattactcaaactcagcttaaagaagctgtaattgaagaaattattaaaccgatcattcctgctgaaatgttccatgcagcaactaaattccacattaacccgactggtatgtttgttatcggtgggcctgtgggtgactgtggtttaactggccgtaaaatcatcgttgatacttatggcggtatggctcgtcacggcggtggtgcattctctggtaaagatccatctaaagtagaccgttcagctgcgtatgctggtcgttatgtagctaaaaatattgttgctgctggtcttgcggacaaatgtgaaattcaggtgagttatgcaattggtgttgcagagccaacttctatttcaatcaatacttttggtactgcaaaagtttctgatgagttaattatccagttagtacgtgaacatttcgatttacgtccgtttggtattactcgcatgcttaacttaattcaacctatgtataaacaaacagctgcttacggccactttggtcgtgaaggttcagatactgcatttacatgggaaaaaactgataaagttgaagcacttaaagatgccgcaggcctttaa

SEQ ID NO: 44560 - DNA, 249 bp, Acinetobacter baumannii
atgctatatcaatatcattgtgcttgttgcgacaaagttgtggcatcaactgataaatcatgtccatattgcggttcacaccatattcgtagtccatatggcttatggatgttttgtgtgatggcttgtctagcagttgttgtcgtattcaaagttgttcatctttatatccagaatcatcaagacacacctgtgcaatcgactctgttagatgtattaaatgaaggtgataagagcacaaaacaataa

SEQ ID NO: 44561 - DNA, 186 bp, Acinetobacter baumannii
atgacacagctcattaataaaggtggctttcgtgaaagagccaatagaagccgaaaatatcaacaatctgaaaacaagcaagtaactctgccttcaaacaagtatcaacctcaaactaagctccaagataatcaaaacgagatgattcaagcaaaagcaggtacttctgaaacttcagatgattaa

SEQ ID NO: 44562 - DNA, 561 bp, Acinetobacter baumannii
atgaatttacttcttattgtggttctgggcgcgattgttgaaattgccgtatggattggcgtagcacagttcatcagtggatggtatgtgtttttctggttcattattgctttctttattggtctaacgcttattcgtaatagtacggctggtattatgccgcaattacaacaaatgcagatgactggacaattgggtaatgatccgactgtgactaaaaaattagcttatgcttttgctggttttttattaatgttgccaggtttggtatcggatgtattagcgctcttaattctaattccgggcgtacaaactgcgtttcgtaatattgcaatgagaacactggcaaaacgtcagcaagccatgatgaacaaaatgatgggcggtatgggtggtgcaggtgctggtcaaaacccatttgcagatttaatgcgtcaaatgcaggatatgcagaatcaacaaggtggtggtagccaatatcatgattctagtattattgatggcgaagcgagagaagttactccagaccacaagaaaattgagcataaaaataaagattaa

SEQ ID NO: 44563 - DNA, 825 bp, Acinetobacter baumannii
atgaacattaaagcactcttacttataacaagcgctatttttatttcagcctgttcaccttatatagtgactgctaatccaaatcacagcgcttcaaaatctgatgaaaaagcagagaaaattaaaaatttatttaacgaagcacacactacgggtgttttagttatccaacaaggccaaactcaacaaagctatggtaatgatcttgctcgtgcttcgaccgagtatgtacctgcttcgaccttcaaaatgcttaatgctttgatcggccttgagcaccataaggcaaccaccacagaagtatttaagtgggacgggcaaaaaaggctattcccagaatgggaaaaggacatgaccctaggcgatgctatgaaagcttccgctattccggtttatcaagatttagctcgtcgtattggacttgaactcatgtctaaggaagtgaagcgtgttggttatggcaatgcagatatcggtacccaagtcgataatttttggctggtgggtcctttaaaaattactcctcagcaagaggcacagtttgcttacaagctagctaataaaacgcttccatttagccaaaaagtccaagatgaagtgcaatccatgttattcatagaagaaaagaatggaaataaaatatacgcaaaaagtggttggggatgggatgtagacccacaagtaggctggttaactggatgggttgttcagcctcaaggaaatattgtagcattctcccttaacttagaaatgaaaaaaggaatacctagctctgttcgaaaagagattacttataaaagtttagaacaattaggtattttatag

SEQ ID NO: 44564 - DNA, 546 bp, Acinetobacter baumannii
atgaactattcccttgattctaatttccgtttaattgattgtaatgaagcagagcatgcggcagcgatattagaaattctaaatgatgcgattgttaactctaccgcattgtatgactatgttccccgttcacttgattcaatgaaaacatggttttcggtaaaaagagaaaatggtttccctgtcattggggtagtagatgagttaggtaagttattaggatttgctagttggggaacatttagagcgtttccagcttataaatatacggttgagcatagtatctatattcatcatgaacatcgtggctgtggtctaagtaaagttttaatgcaagcgttaattcaacgtgctcaacaggctcaacttcatgtgctcattggttgtattgatgcgacaaatcaagccagtataggccttcatgagaaaatgggctttacccacgctggtacttttaaacaagtgggctttaaatttgggcaatggcttgacgctgctttttaccaactagttttggatactccatttgaaccagtggatggatag

SEQ ID NO: 44565 - DNA, 594 bp, Acinetobacter baumannii
atggatgatatcaatataaggattgcacatcgaatacgagagctgcgtttagcacgtggatatactttagatgtattagctgcccgttgccaagttagccgttcagctatttctttaattgaaagaggagaaacgagtcctacggcagttgttcttgaaaaactagcaaatggtcttgaagtacctttaactcaaatttttacgaatgaagcagggaattcatcatctcaaccgcttattcgtcggaatgaacaagctgagtggcgagatccggaaactggctatatacgccgtacagtttcacctccgaacttaaaattaccctttcagattgttgaaattgaatttccgcctcattctcgaattacttatgaaactaatgaaagctctagagtggtacagcagcagctttgggtcgttgaagggaaaattgaaattcaattaggtgaaacttcttatgcattaggtcaaggggattgcttggcaatgcaattagatcaacctgtcatatacagtaatcattcagctcaagttgctcgttatattttagtcgtttctaatcaactggtgcccgctcttaaggaatctttatga

SEQ ID NO: 44566 - DNA, 546 bp, Acinetobacter baumannii
atgccattgattattggaattgatccaggttcacgcttaacaggttacggaatcattgaaaaagatggtagtaaactacgttttgttgatgccggtacaatccgaacggaaactcaagagatgccagagcgcttgaagcgtatttttgctggtgttgagcgaattgtgaaatttcatggtcctactgaagctgcggttgagcaagtctttatggcacagaaccccgactctgccttaaaacttggtcaagcccgtggagctgctatagccgctttagtgaatttagatttacaagttgcagaatatactgcacgccagattaaacaatctgtagtgggatatggtgctgccgataaagaacaagtccaaatgatggtaatgcgtttacttaacctgaccattaaacctcaagccgatgcagccgatgctcttgctgctgcaatttgtcatgcccatgcttcaggaagtatgagcaaactaactgttttgaatgccttaggtggtatggctcgtggacgaagtcgctctagtagccgtagacgctaa

SEQ ID NO: 44567 - DNA, 1089 bp, Acinetobacter baumannii
atgacatcttccaacacatcacgcattgcagtgcaacaaattgatccacatgaattaaaagcatggatcaaagctcaagcattagacttgggttttgctgattgtgtcattgccaaaccagatgctcaagagcaaatgccacgttttttagaataccttgaacgtggttatcatgcagatatgacctatttagaagaaaatctggaaaagcgagcagatccaactttattggtgcctggaacaaaaagtattatttgcgtacgtatgaattatttggtggaatcaccaaaaccacgatatgtacccttcgaaccaaactctgcgattattgcccgttatgctcgtggtcgtgattaccataaggtgatgcgtggcagattaaaaacgttagccacacgtatccgtgaaaaagtgggcgattttgaatcccgcccttttgcagactcggcacctatttttgagaaatcattagctgaaagtgctggaatgggctggacaggtaagcatactttactcattcataaaaagtcgggttcattctttgtcttaggtgaactatttacatcactcgacttaccttttgatgaacctgctacttctcactgcggttcttgtagtgcgtgtattgatatttgcccgacacaagcgattgtcgaaccttatatgttagatgttagacgctgtattgcttatctcaccatcgaatataaaggaatcattgcagaagaattacgtgcaggcattggtaaccggatatttggttgtgatgactgccaattaatttgcccgtggaatagttttgctaaaacagcgtctattcccgatttcaatcctagacatggtttagataatattagtctgcttgatatttggcagtgggacgaagctacttttttagccaatacagaaggcagcccaatacgacgtacaggttatcaatccttcaaacgtaatattgctatcggtttaggcaacgcaccgtactcaaaagaaattgtagatcagctaaacaaaggcaaaagtttacatgacgaaatcgtcaatgtgcatattgattgggcaattgaacagcaacttaatcaactttag

SEQ ID NO: 44568 - DNA, 291 bp, Acinetobacter baumannii
atgaaaaataatatatttaaaattttggttttggcgttattttctacttccccactattttgttatgcaaataacacaataatgatcaaaggaaatattgttgaagacacatgctcaacaaaaagtaatgagatagaatgtaacgaagtcaacaatttgaatattaaacttgatagtgaatatttaaataaagatagtctctataaattagctcaacatacagagaagatggacactagcattgaaagtctaggttctaatcgaaagattatacttatcaattatcattaa

SEQ ID NO: 44569 - DNA, 534 bp, Acinetobacter baumannii
atgaaaaaacttgctttgatcgctgctctttcggttgtagggattgcgaatgctcaagctgctgatggtacaattacaattaatggtttagttacagacaaaacttgtgacatcgttactccagctggtaaagacttcacagttactcttccaactgtttctaagcaaactttagctgttgctggggatgttgctggtcgtactcctttccaaattaaattagctaactgttctgaaggtaaagtagctacttacttcgaaccaggtgctaacgttgactttaatactggtcgtttacttaacaaagacgctactggtgctaaaaacgttaacgttcaacttttaggtagcaataacaacttcatcccagttcttgctgctggtgcgaacggtgctcaagctaactctcaatgggttgacgtagctgcagctggtagcgcagaccttaactactatgctgaatactatgcaactggcgcttctactgctggtaaagttaacacttctgttcaatacacaattatctatcaataa

SEQ ID NO: 44570 - DNA, 735 bp, Acinetobacter baumannii
atgaaattgaacagttataattttttgttaggtttggcatttgcttcagcagttgttgcacctgctactcaagcagaaattgtaattcatggcactcgtgtgatttatccttcggatgctagagaggttacactacaagttagtaataacggttcaaaaccagcacttgtccaagcatggcttgatgaaggcgactcaaaaagcactccggaccaatcaaaagtaccttttatgattgctccacctatttctcgtgttgaggctacaaaaagtcagacccttcgtattactgctttgccaacggcttctcagctaaatcaaaagcaagaaacagttttgtggttgaatgttttggatattcctccaagaccaacatcaaaaggcgaaaatgcgactcctgataattttctgcaattagcaattcgttcacgaattaaattcttctatcgcccagcttcaattaaagaagatgcgaatttagcagctgataagcttcaatgggttaaatctggtcaaaatttaaaggtaaaaaatccaacaccttttcatatcacaatgacttctgtttatcagaaggttggtgataaaaaagttgatttattacctcaaggtttaatgattaaacctttttctgaagagtctgttcagcttaagaatggcaatcttcaagatatgagttttatgaatgtcaatgactatggtggtcgagtcgaacaccaaataaaacttcagtaa

SEQ ID NO: 44571 - DNA, 2559 bp, Acinetobacter baumannii
atgccaaaaaaaaggcaagaatcttataaattattaaaacgccatatttgttactacttggcttctggtgtcgtcacaatgacaatgcctgtattcgtgcatgctgaagaaacaaccgcgaatgctcctgtagaggctgaatttgattctgcttttttaattggtgatgcacaaaaagttgatatttctcggtttaaatatggtaatcctgttttaccgggcgaatataacgttgacgtttatgtaaatggccaatggtttggcaaacgtcgaatgttttttaaagcattagatccaaataaaaatgctgtaacgtgttttactggaaataatcttcttgaatatggtgtaaaacaagaagttttatcgcagcacactaccctccaaaaagaaaatagtagttgttataaaattgaagagtgggttgaaaatgcattttatgagtttgatacctctcgtttacgtgtagatatttctattccgcaagttgctttgcaaaaaaatgcgcaaggctatgtcgatccaagtgtatgggatcgtggtattaatgctggatttttatcttataacggtagtgcatataagacttttaatcaatctggcaatatacgcgaaacttcaaatgcatttatgggagtgactgctgggctaaatttagctggatggcaattacgtcataatggtcagtggcaatggcaagacacccctgctgaaaaccaatctaaatcaagttatgaagaaacgagtacatatttacaaagagcatttccgaaataccgtggtgttttaacgctaggtgatagttttacaaacggtgaaatatttgattcatatggttatcgcggtattgatttttcaagtgatgatcgtatgttgccaaatagtatggtgggttatgctccacgtattcgtggtaatgctaaaaccaatgcaaaagttgaagttcgccaacaaggccaacttatttatcaaacaacagtagctccaggtaactttgaaattaatgacctttaccctactggttttggtggagaaattgaagtttctgttatcgaagcgaatggtgaaatacagaagtttgctgtgccttatgcatctgttgtgcagatgctacgccctggcatgaaccgttatgctttaactattggtcagttccgtgattcagacattgatattgatccttgggttgttcaaggtaaatatcaacaagggattaataattacctaacaggttatacaggtatacaagcaactgaaaattatgccgctatactgttgggtgccgcttttgctacaccaattggtgccgtggcgttagatattactcactctgaagctgactttgaaaaacagtcttcacagtcaggacaaagtttccgcttaagttatagtaagttaattactccaaccaacacaaacttaacactagctgcttatcgttactcaacagaaaacttctataaattacgtgatgctctacagattcgtgattttgaagaaaaaggtattaatacctactctgctggtcgtcaacgtagtgaattccaaattaccttaaaccaaggattgcctgaaggttggggtaacttctacgtagtaggttcatgggttgaatattggaaccgtagtgaaagtactaaacaatatcaggttggttacagtaataacttccatggtttaacttatggtttatctgcaattaaccgtaaagttgaatatggctcaaccaatcaaacacacgatactgaatatttaatgacattatcgttcccgattgattttaaaaagaattcagtcaacgttaacgttacagcttctgaagacagtcgtactgttggtgcaagtggcatggttggagatcgctttagttacggcgcttcaatgtcacatcaggactattcaaatccatcatttaacgtaaatggtcgttatcgtaccaactatacaactgttggtggatcttatagtgtggctgattcttaccaacaagcgatggtgagcttaactggtagtgtagttgcacattcagaaggtgttttatttggacctgaacaaggtcaaacaatggtacttgtgcatgcacctgaagccgccggagccaaagttaataatgctgttggtttaagcgtaaataaggcgggttatgctgtagtaccttatgttactccgtaccgtcttaatgacattactcttgacccacaagagatgtcgagccaagtagagcttgaagaaactagtcaacgtattgcgccttttgctggtgcaattgctaaagtagattttgcgaccaaaactggttatgcagtttatattactagtaaaactgctgatggcaacagtctaccgtttgctgcacaagtctttaaccaaaaagatgaagctgtaggtattgttgcacaaggtagtatgatttacttacgtaccccacttgctcaagatcgtctctatgtgaaatggggtgatgaaagcaatgaacgttgctcggttgagtacaacatcagtaatcagttgcaaaataagcaacaaagcatggtaatgactgaggctgtctgcaaatga

SEQ ID NO: 44572 - DNA, 1029 bp, Acinetobacter baumannii
atgaaaagaatattattaacgggtgctctatttaccgctggtcttggtgtgtatggtgaagctaacgcttactgtactttaggcaataaaaaaggaggctcatttagctcggttgacatttccatggctgtaggtcgcgttgtggtccgaccaagtgatcctgttggaatggttttaagaaaagcaacttttccaattagcgacaatggttcaacagcaatatgtacgtcatatagtgatactattacggctgcacttactcaaggctatccattaagctcactagggaataatatctattcaacgaatattccaggaataggtattcgtttataccgtgaagcagaaaatgcaactaacttttcagggtattatccgtatactcgtaatttaacaccgggcgtacaatattttcttgcttcgggatattttgttgtcgaaattgtgaaaactgctgcgcagactggttcgggtgcattagtgcctggtttatatagtcgatactatgtaagtggttatatgaaccgcccttttttaactagtacagttaacggtgatgcaattactatcgcctcttcttcatgtgaaattcaaggtaatatcaataaagttgtacaactgcctacagtaacaaaagcaggcttcaaaggtgttggctcaactcagggtgaacaaacctttgatatgaacatcttatgtaatggcggtattaacccaacaggttatgaagagaaaaacgtcattagtttaagttacgactttactcaagacggtacaaatagtcaggtattggcaaatacagctgcagcttctgaaaaagcaaacggcgtaggtgtacagttactctggaattatcaaaataaaaatcaagtcattaaaaaaggcgataaattagccttaggtactttgtcttctaaccagacacttcaatataacgtaccgatgactgctcgctactaccaaacagcaaccaatgtgactgctggtaaagttcgtgcaatggctactgtaacgattcaatatgattaa

SEQ ID NO: 44573 - DNA, 1110 bp, Acinetobacter baumannii
atgaaatctcgtgcagctgtcgcctttgccccaggaaaacctttagaaattgttgaagttgatgttgcactacccaaggctggtgaggttttaataaaaattacccatacaggggtatgccataccgatgcttttacattatctggcgatgacccagaaggtgttttcccagcgattttaggtcatgaaggtgcaggtgttgtagttgaagtaggcgagggcgtaacaagtgttcaacctggcgatcacgtgattccactttatacagctgaatgtaaagaatgcttattctgtaaatccggaaaaactaacttgtgtgttgcggtacgtgcgacgcaaggtaaaggtgtaatgccggatggaactacacgtttttcatataacggcgaaccgatttatcattacatgggttgttcaacctttagtgaatatacagtagttgcggaagtctctttagctaaaatcaatcctgaagcgaatcacgaacaagtatgtttactgggatgtggggtgactactggtattggcgccgtgcataacacagcaaaagtacaagaaggtgattctgttgctgtatttggtctaggcggtattggtttagctgttgtacaaggtgcacgtcaagcgaaagcagggcgcattattgtcgtagatactaatccagataaatttgaacttgctaagcagtttggtgctacagatttcttaaatccaaaagattatgatcaacctattcagcaagtgattgtagaaatgacaggctggggcgtagatcattcatttgaatgtattggtaacgtcaatgttatgcgctcggctctagaatgtgcacatcgtggttggggacaatccgttattattggtgttgctggtgcaggccaagaaatttcgacacgcccattccagttagtgacgggccgtaaatggttgggtactgcgtttggtggagtaaaaggccgttcacaacttcctaaaatggtcgaagatgctatgaaaggtgaaattcaacttgagccttttgtaacacataccatgcctctacaagacattaatactgcttttgatttaatgcacgaaggtaaatcaattcgtactgtcattcatttttaa

SEQ ID NO: 44574 - DNA, 1695 bp, Acinetobacter baumannii
atgacaaatgacttggtagggattagctgggattcttatgatacgaaagatcataaacttttagcatatgaaaccaaatatagttatgcaggggtagtttgggattttgatattgaattatcggcttctatgcccgtacttaataatccaagtttaacgccaactttaacggtgtactatcatgacaatggcgtagataaaattacatatatcgtcttatttaattatgcaaataatccttcgtcgcgaacggcgcacattcatattaactgggatacagttaaagccggtttttctgctacagatagctttccggtaaccaatattcaacgtatctcattttcaggctttactagccactataacggccagtcagctacgcctttaagccagccggaagatggttatattcgtattaccaattcagtcgtgactggaacaaatgcaaagttaaatctgagtcgtgttgttgtaccccagcacaattatgggatctgtaccagctatgatgaccattatgacttgaacccgcagcgcctagtcaacaatatggtcgctttgggatatcagggattggtaaaccactattgtggaatgtcgcattatcctgaaatgacatggaaaagcgatattaataaatggcaaataccagatacgttggtaacaggtgaggcagtcgtcaacgcatgtacccgaaaatggcatgagaaatatgcccaagctctacataatgcaaacatgcaacccatttttggggtaagttttgagatgtattcacttggagcaaatgagttttgggcacagcgtgactggaatagcaatttaggtaaaacaggttaccaaccaccgagttatttctttagcttaagtgatcaaaatgctttggcttatttgcacaaagtttttattgagttcgcagatacaatggttgctggcggctgtaatgttaacatgcaaattggtgaaccttggtggtggtataacacggacacgaatctaccttgtgtgtatgactatccaacaaaattagcctttaatgccgatacaggactatatgcgccagacctaggcacaatctatgaggctatgaataaaacaggtacgccgtatgatgagtttaaaacttggttaagaaataagttaggacagacctgtcaaaatattcgagcagccattaaagctaaatatgcaaatgctcaagtgtgtcctttaatatttttcccatccattcgttctccaatacaaaccctagcaacctatatcaactatccaagccagcactactcatatccaaattttgattacatcatgactgaagcttatgactggcttttagaagctaaattagatttagctcatcaagctgtttctcagataccaactcaagatttaggttatccggcaaataaagttgcttatttatctggatttgtgccagatgcatctattgcctatatctatggattcgataaaaacaaaccttatcggacgccaatttggcagaggatttttggcgatatgaaaaataacgtatctcttggcctaatgaagcagtttatctgggcctatccgcaagttatgttcgattcaattacaattgatacgacccaagccccaaatggcttctttgttgaaaatacactttactcaccaattagtgataacacaccgtatccaccagatatttacctctaa

SEQ ID NO: 44575 - DNA, 723 bp, Acinetobacter baumannii
atggaacaggaccaagcacgcatacctaaatatattcctatccgcgatgcaattgcccatgatattgaatctggcgtattagaagcccacgcaaaactcccttcggaaagagtactttcggaacaattccaaaccactcgcgtggctgcacgtgaagctttactggctttggaaactgatggtctgatttatcgtttagaccgccgtggttggtatgttcgttctcctcgtattatttatcacccacaatcgactaaaaactttaatcagtttgtgattgaacaaggctatgaaccttctacagaagtgatttcgagtgagctgactcaggctacttcttgggatgccaagcatttaaaagttgaaaaagggcatccgatttattcagtttggcgacgtcgttgtattaatggtcgacctgttttggttgaatatttacgtgtgaatgccgagctttttcccgagtttttaactcatgatctcaagcaatcgattactttgctgatggcaaatcaatataactgccatatcaccagagccgatattaatctgtatccaacagctttatcggaacagcaggccaaagcactacatgtgaatgttggcgcgctcggtttatatatttgccgtagcaacagaaatgaagaaggtgtgattaccgatgttgaccaagaatattggctacatgatgttttagatttacatttcgaagcgcgagcataa

SEQ ID NO: 44576 - DNA, 1038 bp, Acinetobacter baumannii
atgaaacagtacgttcaacagacaattaaacttggcactgcatcagttttaggtgtagtggtcgctattcaaatgggatgttcatcagcaacatcaaaacaatcagaagaaattacagtctatacggcagtggaagccgaccagcttaagcaataccaagaagaattgcacaaagcctatcctgaactcaaagtaaaatgggtacgtgattcaactggtgtaatcaccgctaaacttttggcagagcagaaaaacccacaagcggacgtggtttttggtgtggctttaaccagtttgctggtcatggaaaagaaagacatgcttgagccttttaaacctgaaggcgtgcaaaatctaaaatcggaatttgtaagtcaaaaatctgtaccaacttggacgggtatggatgcatgggaatctgcaatttgtgtcaataaagtcgaattagaaaaacgtaagttaccgattccaaaaacttggaaagatttaaccaaccccatttataaaaacttaattgtgatgccaaatccggcttcgagtggcacaggctatttggatgtcacggcttggatgcaaatttggggcgaaaagcaggcatgggactatatgcaggctttggataaaaacatttcacaatatcctcactcgggttcaaaaccttgcaaaatggccgcacagggcgaaattccaattggtgtttcttttggttatccggcatttaagttaaaagcagaagatgcacctttagaagtggtttatccaactgaaggtttaggctgggaaatggaagcctcagcaattgtgaaaggaaccaagaaattaagcagcgcacagaaatttataaattggtcggtaagcaaagcagcaaatgaagcttatgcacacaacttttcaatggtggcttataaaggcattgaaaataccaccatggacttcccaaaaaaccttcctcaaatgctcgtaaaaaatgatttttattgggcggccgagcagcgtgaacgtattttggctgaatggtcaaagcgttttgaaaagtga

SEQ ID NO: 44577 - DNA, 1203 bp, Acinetobacter baumannii
atgcaaataccttcatcattgcagtcatcgctgctaggtcaaaaccaaaaggccgagttagcagggcatttattgtcgaccttaacgacttataaatatcctgaacatggtccgtcgattttagaagtggtggatattcaaaaaaagttccaacactttcaggccctcacgcatattaatttagacctaaaagctggcgagttcgtgagctttttgggaccttctggatgcggtaaaaccacattgctacgcataattgcgggtttagaaaaacctgattatggaaaggttataaaaaagggcgcagacattacgttgctaagtgctgaaaagcgtcactgtggcattgtgtttcagaactatgcgttatttccaaacttaaacgttgaagaaaatattacttttggcttagataaaaagaaatgggataaggcacagcgtagccaaagggttcaacagttattggaactgattgaattacccgatattgctaaaaaatatccaaaccaattgtcgggtgggcagcagcaacgtgttgcgctggctcgggcaattgcaccgaatcctgatattttactgttagatgaaccattgtctgcactcgatgctcaggtacgtctaaacctaagacaaaagatccgttcgattcaaacgcagcttaatttgccaaccattatggttacgcacgatcaagaagaagcattaagcatttctgaccgtgttgtggtgatgaatcatggcgtcattgagcaaattgatacaccgcacaatatttactacaagccacaaacccaatttgttgccaagtttattggtaccatgaattttttaaaagccacttgcgctgtaccgaatcagctcgaggttttaggttttattcctctaaatttggaacagcaaaaacttaaagctgggcaaaactacagcattggttttagacccgaagctgtcgagttggttgatgatttcggtagtgataaagagtcgttgtatttgccggttaaagtattaagtactgaatttttaggtgccaagcgtcgtttattttgcgctattcatatcgatggaattgagcaggcaaaacaccttttgcaaattgaaattgaaaatatcaagttcaaaactttgcaagaactgatgtttataaaagtgcctaatcagctcatccatgtctttgacgaacatgggtacgcactatgttaa

SEQ ID NO: 44578 - DNA, 1710 bp, Acinetobacter baumannii
atgttaaatgaagctgcttcagcggttttaaaaacacagccgcgtcgaaaaactgaatattcattaagatcaaatattgctttggctatggtcgcaatcgctttgactttagcgattattgctccattaatcatgctgtttgaaactgcattttttgatgaaaatcaaaattttgttggtcttgaaaatttttataactattttgcaagtccagctttactcagttctgtatttaactcagtgtgggttgcttgtgctgctactgtcattacagtatttcttgccagtatttatgcttttgcactcaccaatgtaaatataaaaggcaaaggcttctttaaattggtggcttttttaccgattttagcgccatcacttttgccttctttggcattggtttatttgtttggtaaacaaggtgtgtttaaacctttactgggcgatatacaaatttatggtccaatcggtattttaatcagttattgcttttggctatttccagcaattttgatgttgatgatggtatcttttcgcagtgtcgatcagcgtttaattgaagcctctttgtcgctcggcaaaaatatctggaagacgcattaccacgtcacactacctgcaattcgctatggactcatcagtgcaagtctggtggcttttatttatgtgttgaccgattttggtattccaaaagtcattggcggttcatttaacatgatggcgcttgatgtctataaacagattattggtcagcaaaatatgagcatgggtgcggtaatttccatcttgttattgctaccagcagtgttcgtattcattttcgatcgaatacaaagtaagcgtcatgcacggtttcaagcttttcaggctaaaccttatgtttcagcatcgaataaaaaacttgaagtcgttctgggcttattttgtggtttagtttcaggtgcgattttactcattatctttactgcagtgctggcttcattcattcagtcttggccttatgatttgtctttaaccttagcacattacagttttgaatatgtcgatggcggcggttgggcagcgtactttaactcggttcgtatggcactctttagtacggtttttggaacagcactgatttttatggtggcactattaaccgaacgttttaaggcacacccactcattaaaaactatgtgcaagctttggttttactgccacttgctgtacctgggttggttctaggtattgcttatattttgttttttaaccagcaaagcaaccctttaaatgtgctgtatggaaccatgaccattttggtgatttcaaccatcgtgcattattacacagtgccacacctgactttaaccaatgccattaaacagattcctttacagctcgatcaggcagcagaaactttaggaacatcgaagtggaaaaccttttggaaagtgtatttgccaatgtgttttccagcgctatgcgatgtatcggtctatgtttttgtgaatgcaatgaccactgtatcggctgccattttcctctattcaccagacaccagtttagctgcggtggcggttttaaatatggatgatgcaggagacacggttgctgctgttgcgatgagcattctcattttgacaacctcatgtgttgtaaaactcattcactggttatttaccagaaaaattatggcaagaagtcagcaatggcgtgaaagttctcactaa

SEQ ID NO: 44579 - DNA, 1155 bp, Acinetobacter baumannii
atgaataatgcacagtttgatttaattgttgtcggagccggtattttaggtttgtccgctgcaatacaggcacaagaacaaggcttgaaagtttgcatcttcgagaaaaatgccaagcctgtgggcgcaactcgccgtaatttcggcatggtcggaacttcgaccttaacccatccagagcaacagtggcgaaagtacgcacttgaaacgcgttctttttatcagcgtattcaaactgaaaccgatatttcatttgagcaaagacaaggtgtgtatctggcaaatacggcacttgaatggcaggttttaaatgagtttgccgagcgtgcaaatagctaccaaattccagttcatttgtttagccatgatgagctggtcacccaattttcttatttaaatccttcgcagcagtttcaaggcggtttggtttttgaagaagactattcggtcgaaccgcatgtgattgggcagcgactgttggcatatgccgaaagaaacggcgtaaagatttataccaatgcctgtgttgttcaaacccaatatcagaaggaaagttgtcaggttcgtttggcaagtggcgaggcatatcgggcaaataaagttttgatctgtcacggtgaagtcatcgatgttttatatccagatcttttacaaagtttgaatctgaaacgttgtggcctacaaatggctctgactcaaccgtttcaccaaaatttaaatgcttctctttattcaggcttatctatttcacgttatccggcttttgaaatttgcccaagtcatgccgagctagttaaagcatcacagcagggtttcattaaagaattcggtattcatattctgattaaacaaaacgaatttggcgaactgatcgtaggcgatagtcacgaatatcattctattaatgaagcgcctcagttcgagcagcgtgaagagattaatgagtttattcaaacatactgccgccaaaaactagggctgactttacctccaattcaaaaacgttggaatggttattacctgacccatgaacatgagttggcctgtgtcgctgaagctgaaaaaaatatctttctggtgagcgcgattgctggcaaaggcatgactacaggggctggctttatgaaagaaatattagaacaaaatatttactag

SEQ ID NO: 44580 - DNA, 1149 bp, Acinetobacter baumannii
atgaacatgcaaccccaactcgatatggatttagagaacaagtatttgcttcttactccaggacccttatcaacatcggcaacagtacgctgtgccatgcaaaaagactggtgtacttgggaccaagaatacaactcgctggtacaagatattcgtaatcgactggtcaacttggcaaccagcgaacctgaaaaatatacggctgtgttaatgcaaggcagtggaagttttgctgtggagtctgtgcttgggtcagctattccacgtgatggcaaaatcttgatcattaataacggcgcatacggtgcacgtatggtgcaaatggcacgttgcttaaatattgaagttgtagagctgaactatttagaaacccaaacaccagatctactagagattgagcgtgttttacaagataaaaccattagccatgttgcttgtgtgcactgtgaaaccaccactggtattttaaatccgattcaagacattggccgtttagttaaagcagcaggaaaaatctggattgtggatgccatgagttcatttggtggagtacctatggatatggctgagcttgaaattgattttctaatttcaagtgcaaataaatgtattcaaggtgttccgggttttggttttattttggcaaagcgtgattgcctagaagcatgtaaaggtttagctcgttcggtaagtctcgatttgtatgaccagtggaacacgatggagcagcataatggtaaatggcgttttacctcgccaacccatgtggtgcgtgctttttatcaagccttgcttgagcttgagacagaaggcggtgttgctgcacgttatcaacgttatctacgaaaccaacaaaccttatctaaaggtatgcaacaacttggctttgagttggtacttggtgaagagagtccacaatcacccatcattaccacttttctgtacccgacagccgaaacatttagcttccagtcattttatgaaacgctgaaaaaatcaggctacgtaatttatccaggcaaagtcacagatctcaactgcttccgtattggcaatattggcgaagtttatgtacaggacattgaagggcttcttgctgcgattgccagctactgcgaaaaccatctaaatcaagctgtaacagtatag

SEQ ID NO: 44581 - DNA, 816 bp, Acinetobacter baumannii
atgacaaccaacaatacacaaattcaggctgtggtttttgactgggctggtacaactgtagattttggctcacgcgcaccaattttagcttttatggctttatttaaagataataaagttgaaattacggttgaagaagcccgtgtcccaatgggcttagaaaaacgtgaccatattgcagcagttttaaaaatgccacgtgtggcagctgcatggcaggaagtatatgggcaggcggcaactgaagcagatattgaccgtttatataaagactttattccgtaccagttaaattctattccgaaatgttctgctttaattccgggtgcattggaaacgtttgaaaatattaaaaagcgcggtgcaaaaattggcagtaacacgggctatgcatccatgatgattggtcgtttggttaaagatgctgccgatcagggctatcgaccagactgtatcgttactgccagcgacgtgaaatatggccgtccatatcctgaaatgctatggaagaacttaattcaactcgacgtatctgacatcaaaactgttgtaaaagtagatgataccgtggtgggtattgatgaaggtttaaatgcgggatgttggacagtaggacttgcaattagtggcaatgaagtcggtttaagctatgaagagtggagcgcattatcggccgatgaacagattgtgctaaaagataaggcataccaaaaaatgaatgcgtcgggcgctcactatgtgattgatagtgtcgctgacttaccaaacgtactagatgatattgaacgccgtttggggcagggtgaacgaccttaa

SEQ ID NO: 44582 - DNA, 627 bp, Acinetobacter baumannii
atgagttatagttttttatcttttgttctaacggcgctagtgattaacttagcacctggccctgctatgttttatgtaatgaatcaatcattaaaatatggaataaaagtaggactaaaagcagcagcaggagttgaatttggcgtatttttttatgtattgttatcagcatttggattaatgtttgtatttcaacaaattcctctgttatataaaattcttcaattcactggtgctttatatttactatatcttgcttatgtagcttggcccaaacgtaaatcaataaaaagctcgaatgttccttcacaaaattccacagaatcaactcgttattcatttagtaaaggtatgttaattaacttatctaatccaaagattggtctcttctttgttagcttgttaccacaatttatatcttcggattctcatccagcttggcaatatttcctattatatggcttattatttaactttggtgggatctgtgtaaatatgactataggtgtaatggctcgcaaattaaaatctattatacaaaaagcatcatggtttgattatgttccatcacttctattcttaacgattgcgattttaactatagtacgagatgccttgtctagctaa

SEQ ID NO: 44583 - DNA, 2685 bp, Acinetobacter baumannii
gtggttacaggtgtaactgaagcgaatgctgttgtaacaattaaaaatactgcaggaactataatcggtacaggtactgctgatgccacaggtaaatattcagttaccctagacaaagcttacttaaatggcgaaagcttaagtgctacagcatcagatcaatctggtaatgctaccgcaccaaaaacagttaatgcacccgacaccacggcaccatcaagtttaactgcaattatagatgctgcaggtaaagtggttacaggtacgactgaagtaggtgcaagagtgacagtagaacaaataactgctatttataaagaagtcactgttttagaaacccaatctgttttgagtgagacagtacagtcaaattctttatcgaaaacatattctttcgaagttacaggcacaaatgcacatgtttctttaaatttgagttcctcgactaattcactttctggtagttatagttcaattctttctggagcgagtttaaatacaagactaactggtaatgtttcccaagctggagacggcaattacagtattgatttagcacaaggttcggtattaccgcctggaacctatactttgacagtaaattattctagttcaatggtccccgttataaacgtaaatgtaacgcaagaagtgccaacaaccattttagaagtagactattacgaaacaaaagttgtaggtacagctaatgcagatgaggcaggaaattattctattactctagataaagcttacttaaatggcgaaaatttaatcgcaacagcaacagatcaatcgggtaataaaactgaggcaaaagaagttattgttccagatatcacaccaccaattttgcatcaaccaactattcaaggtggatgggctgaagggcaatcagtacaaggtacaactgaagcaaataccacaataattgttaaaaatactgcaggtgatgtaatcggttcggcaatagctgatgcatccgggtattacaatgtaattttgaatacagtttatgaagatggtgaattattaaaagtaattgctgcggatgctaaaggtaatgaaagttcaattaatataaatgcacctgatactacggcacctatattggctaatttgtttaattacgatgctagtacagataaaattatttttaatgcgccaagtgatagttatgctgttgagcaaaaaattgatggggcttgggttcacgtaaatattgaggaaaaattcgattggttaaatgtagaatatagggtaactgctacagatcaagctgggaatagttctcaaccactaaccactataattaatactgtatcaggaacttacaaaccaacagaccccacatttactcaaattattaaaggatctactggaaatgattatctatatggcgggaacggagatgatacgttaatttctaatacaggttcggactatctatatggtgagtctggtagtgatacgttgatttatggtggtaattcaaatggctatacggctttactaggtcaagcaggtaatgatacttatattgtagataaaacattacttggttcatcaagttatattcatatcttagataatacaaatgaacaaaatacactttatttaaaatcagtttcagctgatgaaattatcttaaaacaagctagtgcggatagaattattacatttaatgatttaactgccaccatacattttggtgagggacaattatcctcaattgtgtttgacgatggaacagtttggaataaagcacaaattgaagccaatattatcggtagattattaggtacagatggagatgatcatttactggcagatgctaattattccataatttatggtctagatggtaatgatacgatacaaggtggtgtacaggatgattatctgtatggtggtgatggagatgatacgttaatttctaatacaggttcggactatctatatggtggggctggtagtgatacgttggtttatggtggtaattcaaatgcgtatacggctttattgggtcaagcaggtaatgatatttatattgtagataaaacattacttggtacatcaagttatattcatattttagataatacaaatgaagaaaatattcttcatttaaaatcagtgctttctagtgatatttcacttaagcagtcggattcactaatcataatatcattcaatgattcagcatcaacaatacgttttggtaaggataatttatcttctattgtatttgatgatgaaactgtttgggataaagctcaaattgagcaacatattgccaaaactgtgcttggtacaactggtaatgatgtaattgagacaattatagcagatcaaacttactcttataatttagatgctggcgcagatacgttgattttcaatgttcttgataatatagataatttaggcggaaatgctaagagtgagtggacggattttaatcttgctgagcaagataaaattgatttatctcaattactcataaatgacagtggaaatcttcaaggctatgtatctgtacaagatactcagtctggattaattgtttctgttgatagggatggttcaagtcactctatgtataattctcaagaattgattttgcttgtagataatcatagttcattaaatgatttgatcgcatcaaatgtatttattcattaa

SEQ ID NO: 44584 - DNA, 225 bp, Acinetobacter baumannii
atggcaaacggatacgtcaagcaagatacggtactttcacagtcatttcagaagctctccattcgagtgaaggtacctctacggtactctgcgaaaaatattatttttcttcaagtttctggttacggtccatcaatggtataccttaaaaaatatggtctagtgatggtctatcatgctttatgcttgttatttttcttgtacttagccattatcattttgtag

SEQ ID NO: 44585 - DNA, 1089 bp, Acinetobacter baumannii
atgacagaaattctttcagaagacgagttaaatgctttaagaaaagatatcatttttgaaattaaagagttaaagcgaagaggagcactgtgtggcagtgtaaatgctcattttcagcaaatagggtttgataattcaaatacttataaaactttaatttcaaaaattgataaattagagtcaggtgatgtgcagaagcaattgcaatcggctttaacagtcgtgaaccaagagctattgaaacacgttgaatttagtaataaacgtgtttatttctatactctcaatactgcaaaattagagcaattatttaatttattgaaaaataataccgacttatatgaagaaggtgaaaaagaatatatagattatggtctatataagggtgataagccagaaaaaggtttaactattgaaaatgatgattttaaaataatttatttaaaatccctaagaaatcggcaagaaacccaaagaatagatgataaaattcctagaattatggatgatgaaaatgaagtaattattaggctgacaaaagttgttcaatatcctatgaatgcatttgattttgtggcttttgacttcaaaaatgagagcttaattttaggtgcagatttaacatctattttcccaaatgctgaaacagaaaaagctatgggaacaactttaaccactttgcgtaaattatgcggaatggctgaaatcccttcgaaggatctccgtaactgtattgaaaactttgaaaaagaaaaaattggggatgttctagatcatgcttttattactgctgatggcggttataaccatgcaggcaagagcctaactaaaggtcaagatgtgcggaaagatggttttcatcaagatggaatcaaagggaaagaggctgactattatggtattgtcaaagcttatgatcctataaatggtgaaaaagacgaaaaagtaattattactattcgtttaacatataaagagtacaagagtgaaaacgatttaccgattcgttttgctgtacttaatggcataagaactctgaatggacttaagtatgctattaataaagtactagagcataatcacaactaa

SEQ ID NO: 44586 - DNA, 1338 bp, Acinetobacter baumannii
atgagtgattactctattatagattatttaggagagggaggttttgctaaagtttatttagttcaattccaaaatggttttacagctgcgaaaaaaatttttcatcctaatcaagagcagcctctaagcgaagaatatattaatcatattaaaagccgctttagacgagaagttttgatccttagctctattagtcatcccaatgtagtaagcgtacttagatcagaagttgatttagaaccaccttcttatttaatgcctgtagcggatagtaccctagaaaaagatatggattatcttagaacacaaccattacctaatcgaattaaggtaatgatggatatcttagcaggtttagaaacaattcataatttgagtatttatcatagagatctaaagcctagcaatattctaaggtttggggaaaattatgccatcagtgactttggtttagtttctttagataaatctcaaatttcagttttgactcaaacaggtatgcgtatggggagcgataaatatacagctcctgaaattactaatgagcttaaatatgctagtagggcttctgatatctactccgcaggctgtatttttcatgatctaactactactctaagtgtgggatctcgtgttacgtgtaatgaaatacgagatccgacaaatccgtatgaacctatcttaaagatttgtactagatttgataaaaatagaagatttcaaagtgtagagagtttgagagaagctattatttctacaatagtcaatcaagctgctacactaccaacatcgaatagtgactctcaagtgttattgcagcagttacaggttggatctgcatatgactcaaatttgttgagtcaattagttgattttcttgaaagggcaactgagacagaggcttatccagttctcataaacttagatcaagatattattcataaaattatagcttcaaatgatagcaattttattagtagaataagtacagtttactccaattggctgatgaaatcgtcttttgatttctcattgtgtgacgtactagctagtagggtagatttattttgggcggtaaatgatcctgaagtgaagagtaatgttctattaggtcttttaatcatgggaacaaatcacaaccgttggtatgtagaagaaaaatttgtcaaccgtattaaaacatgtgatgagttcaccgctagacgctttgtcttggaaagtgccgtgcataaattgcaggtaattccagctattaatcacttacctcgttcgattaattttagtagatctagtctacctgctattattcagcaaggttttactacacatggcatctaa

SEQ ID NO: 44587 - DNA, 732 bp, Acinetobacter baumannii
atgaatccattatatttttcatctaaaggtcctagaattactaatgaggatagttaccttgttcatagggatgaaaaaggtggtttgatcttaataattgctgatggtttaggtggacacaaaagtgggaagtttgcctcccattacgcagttagtaaatttgttgataaactcaaaaaagtatctgaattttcttcggagctttttataaatcttttgactgaaattcattcagagcttttagttctaggggataatgatgaggctaaaagaggaatggcaacaactttttcttgtatctatgtcacctcagataatcgactatggggtgtccatataggagattctagagtttatttattaagagaaaacggtttacaacaattgacagaagatcatactgaagctcaaagattatttaatgatggtcttcttacaaaagaggaactaattaattacccgcgaaaaaatattttatcagcagcattgggtgctaggaagaatccaattgatatacaaacctttagctatgatttagagaataatgatagaattttacttgctacagacggtttttataataatttaacaaaaagacagataagagatttatctgttcaatttccagagttttcagagtttttctttgagattttatttctttgtaaacagacagagttgaaggataattgttctattattggtgtagaaatactaaagtccgatagttga

SEQ ID NO: 44588 - DNA, 510 bp, Acinetobacter baumannii
atgctcataggacctaatgaagaatatttaaatgaaatgtcagaaaaaattaaagctcaggaacctaatatagacttaagttataaatctactatgtttatgggtgtaaatagagttttagagttacaccctaaaaatggtgagaatcttaaaaaatttattgaaatatttaacgaaaaaaaattcttctatttaactaacatgaaagaaaaactggacatagccactaacccatctttctatacttctccattaaaacttgaagagcctgaagactatattgactttgataatgcgattcttaaaaaagatataaacattaaaaccttagatgagttaaaagctgaaaaccctaaaagccttgatcatgcagccctacatactattgatactcgaaaaaaaaccatgcaacaaaatattggaaaaagtctaaaagagaaaaaaactattgagaaaagaaaacgaaaggcaaaagaagtgaaaaaaacaaagaaacaaaaaaagaaataa

SEQ ID NO: 44589 - DNA, 375 bp, Acinetobacter baumannii
atggatattctagaaatagaagaaaaaataggaaaagtatttaataaaaccactcctactggcagactatcaaaagtaaagacaagaaatctaacaagttttttatgcgtacttgtcatgattggaatagaaaaaataaaaaaagatcatgatgaaaaaacatttaaaaaatatatgaatgaactaaaaaagtgtggaataacagagaaatatataagagaagaacatgagaaagaaagatttaaaagaaagagccagaaagtagaatatgtagaacttgtatttgatttaaataatcaagtaccagaaggatatattcctccagaaggccaatacaatatagaagaaataataggcaaaaaggtcaaaatatga

SEQ ID NO: 44590 - DNA, 375 bp, Acinetobacter baumannii
atgagaaataattgttataaaattgacgaaagtgaaaaaggtcatgaaatgaacagtataggcgaacgtatagaaaaaaaatgtaaggaactgaatatcagcattcctgaactagcaaatatcgctggagtaaattacaagaccctaaaaagaaacatgactgccgaagacccaaaccctacattgcagcacttaaagagattaagcatagctttaggtatgagtatcgataatcttgcatttggcgaagaaggaagcacagatgaagaaatcgctatcattcttaacgacctaaaaaatatagaaaaagaagataaaaaaagaatcttatatatggttcgaatgatgattgccgaaagcaaaaataggaaatga

SEQ ID NO: 44591 - DNA, 1227 bp, Acinetobacter baumannii
atgcttgattttctgcggttagcgattccgatcattcctacttatgtacgtagtcttgataatcatcattggtttaatggtgatattcgtgattatggtattcctgctgctactcgccatgtttctaagaccgatgatggtcaaacgataacaggggagctttaccatccgtatgagtcacttccatctgactatacagatatggctgttaaattttatacaaatacaatgaatacaccgccttatgttgagattaaggcatctccattgaagttgttacaaggtcacaatgtgtatggttttgagtctatcgaattaggctccgatcatatgcttggcatgttactcgaagcctttccccagttagccccaatcctagatttggcaaatactgaggttttacatctagataccacatatttatttagattgcctcatcagaatatggttcagccaactttggactatatggctaacttggcttcgggtcaccgtaaagcccgtgaagttaaatatgataattacattacttggggtaatgattcagcaagtgtacgtcctaaggcatatggcaaatttgaagaagttaaaagccaactaaataagattcagaagaaagcagataagggttgtatgcgctctaaatcgcttgttattgctatgaatggtgctttgcaatttgctaatgctgttttacgtctagaagctcgtatttgtaagacttatttaaccaagaatggttatccatcgaatttatttcagcttattaagctgcaacatgaacagccagaattattgctacgcctctggcacgtagcgtttgacccaatccttaagactatggagggtgaatatatgaatttcgcaagtgatgatgaattagaagctttacttaaatctaaattggttacctataccaagaaaggtaatcctagttataccaaggcttataacgcctttgatttctatcgatcattgcgtattgatggttataaaaaagtaaagtccagacatttggaatcacgtttctataaacgtgaaagagagcttattagctgcggtattagccgttctcatctacagaatttacataagaatccaaacggtaaagtcatcccatttgtccgtttattcgaactcaagatggcagatcaattgccaccagattacgttcaaccagtttcacaatacagcccaaagaatcagggtttacatctagttgcctaa

SEQ ID NO: 44592 - DNA, 303 bp, Acinetobacter baumannii
atgcaattatcatttaacaaacgcacaatttttccatctgtttaccgtggtgaaaataagaaaactggcgaaccaacttgttatttgtctacaactgtattttcaccagttaaatacaatttaaaaccagctgctggaatgatgcctattgaacagattcaagcgattcttgaagagtgtgcagacaatggccaagaagtagaaattgagtttacagagcaacaaactaagtttggtgcagagatgcaaattttcagtgttaagccattaccaaagaaaaacccaatggaatcaaaggcttaa

SEQ ID NO: 44593 - DNA, 2262 bp, Acinetobacter baumannii
atgactaaaagaacaataaatatttatggtgccagacaaaataaccttaaaaatatttcattgaagattcctaaacataaaatcgttgtctttactggagtctctggttcaggtaaatcttctttagttttcgagactattggcgcagaagctcaaagacaaattaatgaaactcaagatagttttgtacgtaatcgcttgcaacattttggtgttactgacgttgataaaattgaaaatttaaatgtacctgtgattattaatcaaaaacctttaacgggcaatattcgctcaactgttgcaacaattacagatatttatgccaatcttcgcttgttattttcacgtatgggtgagccgtttgttggatactccaatgtcttttcttttaatcacccaaatggcatgtgtccacaatgcgaaggtattggaatcgagcaaacaattgatatttacaaaatattagatttagataaatccttaaatgaagaaggtgctatagacttccctacttatcaacctacagcatggcgttggacgcgatatgcagattcaggttactttgatttagataaaaaattaaaagattatagtgaaaaagaatgggacttatttttgtatgctcctcagcacaaacctttaaacccgacaagtaaatggagaaaaaccgcactttatgaaggactaattcccagatttgagcgtaactttttaaaaggtgaagcacaggaaagaaatcgttatagaaataaacttgagcgaattattacaatcaaagaatgctccttatgtaagggacaacggctaaatcaaaaatccttatcttgtaagattaacggtaaaaatattgcggaatgtacggccctatccgtatcaaggcttttagagtttctcgaatcgataaaaagtgaaaaatttgaaaccgttttgcacgaaataaaaaataaactcaataacttaaatctcgttggactcagctatttaaaccttaaccgtgtcagcaatacattgtcgggaggagaatcacaacgaattaaaatggttaaacatttgggtaatagtctggttgacctactctatatttttgatgaaccaagtattggcctgcaccccaaagatttagataatattattaaaattattcaaaaaattagagataagggaaatagtgttttattggttgaacatgatcctgatcttattagaacagctgatcatgtcattgatatggggcctctttctggtattaacggcggtgaaattatttaccaaggaacttttgaagaattaaaaaattcatcaggtttagcaggagcgttttttagaaggccaaatacctataagaaagaaccacgtatgggcaatgaatggatttcaattaaaaatgctcatttattcaatttaaaaaatattgatgtcgacattcctaagaactgtctaaccgttattacaggagtcgctggttcaggaaaaagcacattaataagtaaagtattaccacaacaatatcctgaaacaaaagttgttgatcaatctgcaattactgcaagtattcgctcaaatttattgacctatcttgaccttcttgatccgattcgtcagctatttgcaaaaacaaataaagtaagtgccaagttctttagttttaatagtgaaggtgcttgccctcaatgtaaaggatctggtatcgaaagggttgaacttgcatttttagatgatattgaaatgacatgtgatgtttgtcatggttctggatatgcacctgaagttttaaaatatctttataaagataaaaatattgctgaaattttaaaaatgacggttgcagaagcaagcaacttttttgaagatcgaattttacagcaacaatttaattctttgatgagtttggggctagactacattgcaatcggccaacgcttaaatacattttcgggtggtgagcgtcaaaggttaaaactcacaaaacaaattaatgaaacagataatatttttgtattggatgaaccgagtacaggactacacccttctgatactgaaaaactaattagtttattaaataacttagttgagaaaggcaacacagtcattgtgattgaacataacttagacatcataagtcaagccgactggattgttgatattggccctttggcgggtgacaaaggtggtgaattggtattttcaggaactgttagcggtttgctttcagcagaaaaatctttaacaggttattatttgaaaaaatatttagagctgtaa

SEQ ID NO: 44594 - DNA, 615 bp, Acinetobacter baumannii
atgcgtgaaatggaacaactgattgcgaaattaccgaaaggtattggctacgagtggacaggtatttccttacaggaaaagcagtctgaatcacaaatggcctttttacttggtttatccatgttagtggttttccttgtcttggctgcactctatgaaagctgggcaattccactttctgtgatgctggttgtgccactcggtatttttggagcaatcattgccattatgtctagagggttaatgaatgatgtgttcttcaaaatcgggctaattaccattattggtctatcggcaaagaatgcaattttgattgttgaatttgcgaaaatgctgaaagaagaaggcatgagtttgattgaagccactgttgctgcagccaaacttcgcttacggccaatcctgatgacatcacttgcatttacctgtggtgtaattcctttggtgattgcctcaggtgcaagttcagaaactcaacatgctttaggcacaggggtttttggtggcatgatttcagccactattctggctattttctttgttcccgtgttttttatcttcattctgggtgcagtagaaaagctattttcctctaagaaaaaaatctcatcttaa

SEQ ID NO: 44595 - DNA, 921 bp, Acinetobacter baumannii
atgacgtatcgagaccccattggtaaatcgggagacgctttcgctttagccaaagattatgcacttgaagccaaaaattggggagctgatctatctttaaaagcatatgttgatgaacgtgtagctgccgaagatttgaaagttggaaaatgtgatggcgctattattagcggtttacgtggccgtcagtttaataaatacacaggatctttagatgctgttggtgcattaacaaatatgaaaacggcaattaatgcctataagctgttgtcctcaccaatggccgcaaaaaacatggtggtaggcccttatgaaattgcaggattaggcacaattggaccagcctatttatttgtaaatgatagaagtataaatactctcgcgaaggctgccggtaaaaaaattggggtatttaaatacgacgaagcccaaccaaagcttgttcaacatgtcggtggtcaggctgtatcggtagacgttaccaatgccggtgcaaaatttaataaccatgaaattgatattgtgcccgctcctattgttgcgtttaaaccttttgaactctacaaaggtttaggtgagaaaggagcaattgttcgttttcctttgactcaaatttcggcagatttcattattcgtaaagatcagtttccagcaggttttgggcaaaagtctcgaacttgggtagccagccaactcaatagaacatttggtattattgccaaatatgaaagtgatattccttcaaaatattggatggatattcctaaaaatgaacaattaaactatatgaaaatgatgcgcgaggctcgtatacagctaaccaaagcaggtatttatgaccctaaaatgatgaattttttgaaaaaagtaagatgtaaagaaaacccaagtaattttgaatgtgcattaaacgatgaatga

SEQ ID NO: 44596 - DNA, 438 bp, Acinetobacter baumannii
atgcgtttcgataaggaaatcttaagtctaccgcttaaaaactccgacgcggccttagttgccatactagaaaaacatgctgacaagttactggcaagcctgccacatattgatgaaattacagatcaagttcgtaaacagattgcttacttacttcatcaaggcgaacccactattgaacagcttgcagagcgattaaattattcacgtagaaccttgcaacgccgtttaaccgaggcaggtacgaattttcggaaagaattaaatactgtccgttacgaattggcaaaatcgtatttaaaagatctaaggctacaaattgtagaaatagctttactgttaggttatgccgagtacagtccatttacacgggcttataaagagtggtcgggtaaaacaccacaacaagctagagaagaaatgaatgagttaagctag

SEQ ID NO: 44597 - DNA, 324 bp, Acinetobacter baumannii
atgaaagacattgaaattttagagatcaatgaaattggtgatcatgaacaaggcctatcgctattgttagaagactctgtaaataacggagcttcaataggtttcttagctcctatagaaaagaacgaagtcttaaattactggcgtgaggtcaaccataaattagcacaaggtaatagccgtctatggattgccatacaagaaggaacggttgttggtagtgttcaattgtctttggtaagtaaaaagaacggcgttcatagagccgaggttgaaaaactcatcattgggaaagtcttctcattattgccaaagattatttaa

SEQ ID NO: 44598 - DNA, 201 bp, Acinetobacter baumannii
atgttttttgcagatgcaaaatcatataaagatattattttatttttatttttttatcacattgctatttatgtaatgctttatctcaactatcaaactgataaattaaatatagaaccaaaaattgttaaatttaatatttttttgaaacatcaacatataattttaaaaaatgttttttggttaaaaaaagcaccttga

SEQ ID NO: 44599 - DNA, 1941 bp, Acinetobacter baumannii
atggcaaaaattattggtattgacttaggtactaccaactcatgtgttgctgtacttgaaggcgataaagtaaaagtaatcgaaaatgcagaaggcgcacgtacaactccatcgatcattgcatataaagatggcgagatcttagtgggccaaagcgctaagcgtcaggcagtaacaaaccctaaaaatacattattcgcgatcaagcgtttaattggtcgtcgttatgaagatcaagcagtacaaaaagacatcggtcttgtaccttataaaatcatcaaagcagacaacggtgatgcttgggttgaagtaaacgataaaaaactagcacctcaacagatctctgctgaaatcttgaaaaagatgaaaaaaactgcagaagattatttaggtgaaacagtaactgaagcggtaattaccgttcctgcttactttaacgatgctcaacgtcaagcaactaaagatgcgggtaaaatcgctggtttagatgttaaacgtatcattaacgaaccaactgctgctgcacttgcgttcggtatggacaaaaaagaaggcgaccgtaaagttgcagtttacgacttaggtggtggtacattcgacgtatctatcattgaaatcgcggaccttgatggcgaccaacaaattgaagtgttatcaactaacggtgatactttccttggtggtgaagacttcgataacgcgttaattgaatacttggttgaagaattcaagaaagaacaaaacgtaaacttgaaaaacgatccacttgcgttacaacgtttgaaagaagctgctgaaaaagcaaaaatcgagctttcttcttcgaatgcaactgaaatcaaccttccatacatcactgctgatgcgactggtcctaaacacttagtgatcaacgtaactcgtgcaaaacttgaaggtttagttgctgatttagttgctcgtactatcgaaccttgtaagattgctcttaaagatgctggtctttcgacttctgacatctctgacgtcatcttagttggtggtcagtctcgtatgccacttgtacaacaaaaagtacaagaattcttcggtagagagccacgtaaagacgtgaaccctgacgaagcagttgcaatcggtgctgcaattcaaggtgctgtattgtctggtgacaagaacgacgtattgcttcttgacgtaacacctttaactttaggtattgaaacaatgggtggtgtattaacaccaatcattgagaaaaacacaacgattcctgcgaagaaatcacaagtgttctctactgctgctgataaccaaccagcggtagatatttcagtttaccaaggtgaacgtaagatggctcaacaaaacaaattgttgggtaacttccagttaggtgacatcccacctgctccacgtggtgtgccacaaattgaagtatctttcgatattaacgctgacggtatcttgaaagtgtctgcaaaagacaagagcactggtaaagagcaatcgatccagattaaggcaaactcaggtttatctgatgctgaaatcgaagcgatgattaaagatgcagaagcaaatgctgaagaagaccgtaagtttgaagaacttgcaaaagctcgtaacgaagctgatgcattaatttcaagctcaaacaaagctgttaaagatcttggtgacaaagtaactgaagatgaaaaaacagcggtaaatacagcagtttctgaacttgaagcagcaacaaaagaaaatgatgttgaagcaatcaaagcgaaaactgaagctttacaaaacatcttaatgccgattactcaacgtgcttatgagcaagcgcaacaagctggcggtgctgaaggtttcgatccaaatgcattccaaggtggtgatgctggtcaacaaaaagcagacgatggcgttgtagatgctgagttcactgaagtaaaagatgacaaaaaataa

SEQ ID NO: 44600 - DNA, 555 bp, Acinetobacter baumannii
atggctaatgagcaaaacgagcaagctcaagacattcaaaatgagcaagttgagcaatctaacgagcaaactcaggctgaaggtgtagagcaagcaaacgacgttaccgttgaatctttacaagcgcaaatcactaaactagaagaaaatcttaagcttgaaaaagctcgtactgccaatgcagtttacgaagcacaaaaaagtgtagagcgtattcagcgtgagtctgagaagcataaagagactgtgcttgagaaatttgcaaaagaattgttggactctgtcgacaatttagaacgcgcaattcaggcagctggcgatgaaaaaacgcctgtacttgaaggtgttaagttaaccttaaagtcacttttaacgactcttgagaaatttggcgttgtagaagctgatactcaaaatggtttcaacgcagatttacaccaagctgttggcattgatccaaatgcaaaagcaaatgaaatcggtaccgttttacaaaaaggctataccttaaatggccgcttattgcgccctgctatggttatggttggtcaataa

SEQ ID NO: 44601 - DNA, 894 bp, Acinetobacter baumannii
atggatactttaaaagccattcaggtctttgtttctattgcacaacacggtaatttaactaaagccgcagagcatcttaattattctcgtgcaatggtttcgcgttatcttgagcaccttgaacatacattctcaactcgactatttcagagaaatacccgaaaaatatctcttacacccgcaggtgaaaaagctctgctctactgcgaaaatattttacagcagcaacaacttttgcaagaactcgcagcgcctgaacaacacaacggtacaatccgttttacatgcggattatttctatttgaacttggggttgcggaatgtattcggcaatttaagagacagcatcctcatattcagtttgatgtttacctgactgaaagcacgatggatcttatagatgcacaagtggacttggcactacgcattactcaaaaagtcgcagatggtttaattgcacggccagtttgtcaaatcgaatccgttttctgtgctcatcctgattatttaaaacagcacagccccctactccatcctcgtcaactcattcaacacgaatgtattgcacatcatagccagcatcaattctggacactttttgataatgaacaacaacctcagaactatcctttaaatgtcacttttaaaagtaatgatgtgaatgcactttacgatatgtgcttacatgcacagggagttgcaatgttgcctacattattagttgagaaagatttaaaagaaaaacgcttaaaagctttatttaaaaattttacggctcctgagttaagcttgtcggtcgtgtatgcttctagacaacatttaccccgaattactcaagaatttatagcttttatgatcgaaaatttagatttttacttaaaaccgcaaaattaa

SEQ ID NO: 44602 - DNA, 876 bp, Acinetobacter baumannii
atgaaattatttaaattatccgcttctgtacttgctactgctacagtattaactatggctcagtcagcttttgctcaagatctgaaaattcagagttttctggctaaactagagcactttggtgtcacctcaaccttaatagaaggcgacaaagaagttttactggttaatgcacaattctcaaaatctgaagcattacgtattgctgcaaatattctcgatagcggtaaaacattaaaaactattttcgtaagctatggcgatccggactattatttcggcttagatgtatttaaacagtatttcccgaatgtacagatcattgctacgccggaaacagtaaagcatattcaggatactcaagcgcttaaagttaaatattgggggccacaaatgggtgcaaatgcacctagccaaattattgtgcctcaagcttacactgctaaaactttaaaacttgagaatgagtcaatcgagattaaaggtaaaaaagagcttacttatttatgggttccttctgcaaaagcagtcgtggggggtattccggtatcttcaggtattcatttatggatggcagatacacctaaaaccaaagatcgtatggaagtcattcaatctttagaaagcatcaaagcactacaacctaaaattgttgtacctgctcatatggttgagggagctccacaaggtttagatgctgttaacttttcaattaactatttaaatagttatgaaaaagcaactaaagcaactaaagcaactaaaaatgctactgagctgagcaagctcatgcagaagcaatacccaacgcttcaaagtgttgatagcttagagctcggcgctaaagtggtaaaaggtgaaatgcagtggccataa

SEQ ID NO: 44603 - DNA, 231 bp, Acinetobacter baumannii
atgaaaaaattaggtcttatctctgtagtacttgctggtgttgcatttacagctgttggttgtgcatcagaagctggtttaaacgcttctggttctgctcaaacaagtgctagcccatctggcgtacaagctggtgttggtgtagatgcaggtgtttctggtcaagctcaaccaggtcaagttgatgctggcgcttctggttcagtttcaggttctgcaactgctcagtaa

SEQ ID NO: 44604 - DNA, 327 bp, Acinetobacter baumannii
atgtcagcaaaactagttgttactttgttagcaaccagtcttttaactgtaggctgtgttgcttatacagatgatccttattatcgcggtggttatggttaccatgatcatgatgacgatcgttatgaccgtaacgatggacgtcgatatagtgagtgggaacgcaaacgttgggaagagcgtaaaagattatatgaacaacaacgcaaagatattcgtgaacagcaaaaggaccgtcgtgaatgggaaaaacgacaccgtgaatgggagaagaaacgcttagaagaccgagatcatgatcatagagattatcgtcatgatgactaa

SEQ ID NO: 44605 - DNA, 1071 bp, Acinetobacter baumannii
atgacagcatttaatcaaaaaattcaaacattgctagataaggggcaaggtcctgctgctcgagcacttgataggttacctagactagctcaagagtctctcgctaaaattttaggatactcttatcaatatccagatctcgattcatttacgaaatgcatgatggctgtgcaaattaaacaggggagagtgggatttattggttcagacccaattgaatcaagaagagcattcgatgcacaaatgcaggccatacgccaaaaaccaactgatattgagttagtagaagatattcgcttacccctacaaagcggaactatctttgctaggcattatcatcctgcccctaataaaaaactgcccttaatcgtgttttatcatggaggtggttttgttgtaggtggtttggatactcatgatgaggtttgtcgcttattagcaaaatatgcaaaagtacaagtgctcagtatcgactaccctttagcacctgaagtttcaccacaacatttaattcaatcgtgtgaagatgcattagcttgggtttatcaaaaccgcagacaattaaaaatattaaaaagtagaattgctgtcgcaggggatagcgctggcggaaatattagtactgttgtggcgcaaagatcagtaaataaagcttatgctccgcaggcacaattattgatttatcctacagtcgacttcaaaagtagacatccttcattttatgcttataacgaagggttagtcttaacaaatactgatattgactatgtcacacagtattatgcaactcatcataatgtagaacttgatgatccaataatttcacctacctatggcaatctaaagaaaaacccacccgcttttgtgattacagcggggcatgatgtcttacatgatgaagctaaaatatatagccataagttaagacaaaatggtgtgaaaatgcattatgaagaatttccggatcagactcatggctttattaacctgactccgatttctagaaaagcaaaacgttatacaatcgaaattagtaaaaactttagaaagttttgggataaaaatagttaa

SEQ ID NO: 44606 - DNA, 558 bp, Acinetobacter baumannii
atgaaaaaattactgatgttgttgtgtttaggagtaagtagtcactcagtgtgggcgaataccttagttgagatgcaaacaaatttaggcaacatcgaaatagagttatacgatgataaagcaccaatgagtgtgaataactttaaaggctacataaaatctggtttttataaagagaccatctttcaccgtgtcattccaggatttatggctcaaggtggcggaatgactgcgaacatgcaggaaaagacaacacgagcacctattaaaaacgaagcgggaaatggtattgccaatacacgaggtactttggcgatggcccgtacttcaaatcctgattcagcaactagccagttttttataaatgttgcagacaataactttcttaaccgttcaccaggaaatcccggatatgctgtttttggtaaagtggtcaaaggaatagatgtagttgaccgtatagttcaggctcctacatcaaactatggcatgcatcaaaacgtaccaaaacagcctataaagatagtagatataaaaatcaaaaattctcaaaaataa

SEQ ID NO: 44607 - DNA, 465 bp, Acinetobacter baumannii
atgaaactctcggacttttccctttattttaaaggtgaaaaactggtaggtatgtttggtttgtgggatcagcatagtattaagcagaccaagattctaaattataactcggccatagctgtgcttagacccgtctataacttattgacgccaattaccaaaggcatgcgtttgcctaagctgggtgattcaattcagtaccatgtgctacatacgcttatgtgccatccagaagatttggctttacaccataaaatgctcgaagatgcctataacaagtcaaaacagcagggcgttggtgtggtaagttttacgctttcacataaagacccgcgatatcagttaaatcagttttataaaggtgaacgtttaacgggcatgcatggttttattagctttgaaggtgaccctcggccaagttttgataaaaagctgattccatacttagaggttggacgtatttaa

SEQ ID NO: 44608 - DNA, 969 bp, Acinetobacter baumannii
atgaaaaaaagtttattgggcggccttattctgtctttgtgtacaactccagcttttgcgctaaatattttattggttaatgacgacggtctaaccagcaatgtcaaagcactctatgatgaattaaaagcaaatggtcataacgtgcttgtgtctgtaccgtgttcaccacaaagtggtcgcggtggcgcaattgtgatgtatagctcaacaacaattaatgcggataatgataagcaaattgcggctgaaaatggttgccacaatggcgcagcaccaattggggcacctgcggctggaacctttaccaaagcaggttataccaatggtgactggaactacacgcatggcacaccagtcatggcaacagtttatggactagatgtggttgcaccaaaacgctggggtaaagcaccagatttggttttatcaggcccgaatgaaggccaaaatgtcggcaaagtcgttgtacactctggcaccattggcaatgtacagttttcggcaggacgtggcattccgtctattgccttaagcgccgataccaacacggtagatgacaaaacgttaaacaaccctaactctgcaattgtggcaaagcaaactgtagtgttattaaaagaattacaagctaaggcaggcaagggccaattgttgccaaaaggcattaccctcaatgtgaattttcctaaaaatttaacaaccagcacgccgtttgcattttcaaaaattgggtcttatgacttatataagctgaaattccaagtgactaaagacaataaaggcaacaatcaatttggccttggaatagacgcggcaccatcggcaccgactgccgctcaaatgtcggatgaaagcgctgtaatgcaaagcaaaattgctgtgactgcaatgcaagtggcttatgaccaacgaccagcaggtcaagaatggcttaaaatccgtttaaaaagcttatttaacaagtaa

SEQ ID NO: 44609 - DNA, 645 bp, Acinetobacter baumannii
atgaaacgttgtttattggttttactccttgggcttggattggcggcttgtaatgacaatgatcatgatgaccaagtctcgactgaaaaacctgcattggctccgagcttagatgtcggtacttatattattagtaccgaaactgatcaagaattacctatggcgggtaaatactattctggtgcagatggttctaaattattggttttagatgatgatgaaaaccgtgccaagattgtgatgagctatgacgcaaaagccaaagcttggcgaagcaaccagtctaatcaagcgatgacagttgaattggcacactatgaaaaaattgctgatcaaaaacttttgcttaatcaattggtcggcacctacgatttatcgtttccagatggaacgacggtaaatgccgaggtgaatgcacaaggtaaaattgtctcgaaagacccaagttgtgtgtttacaggtgttattactgaaagtgcattagccaataccgcaaactatcaacttaccgataatcagtgtgatgcgctaaaaaataactcgaaaggttatgttgtggtagatgaagacttagatcctatgagttttaggcttgtatctgacacgattgcatcaaaagacatttgggcatttgcacaatcttaa

SEQ ID NO: 44610 - DNA, 441 bp, Acinetobacter baumannii
atgactcaaaataaagttgaattagcagagaaattgtcaaaagagtctcatcaaggccaaaagtatggttctcatgattactttgattaccatattaaaggtgtggtcaactcattaattgagcaccaattttcacaagtctatattattacagcccttctccacgatagcgttgaagatacacctcttaccctagccaaaatcgaaagcttattcggaaaagaagtccgtgatgccgttgatgcattaactaaacgagaaactgaaacacgcgaagaatatttaattcgttgtagtttgaatccgatcgctcgagtcgtaaaacttcatgacgcagcttttaatgcgcataactcacataaagaaagtaatcaatcacgtgtcgattattaccttcaaaccatgttaattgtttcaacggcgcaagataagttgagataa

SEQ ID NO: 44611 - DNA, 1332 bp, Acinetobacter baumannii
atgaaaaaattaacgatacaagctttactaaataaaaactggatagatatagcagagctaaaactgttagaacctaagttgggttcggctagcgccagtgaactagaatatgaattggattatgcaattcaatatttagacagacgagatgagcacgcctgtagtttatcacttcctgtacaaattcttatcaaacacgaatcggatacatggtttggctttttagatgatattgttccatctggcgctgcacgccgttattgggtgaattatctagatttacaacgcttaacctatgcggaacaagaaagtattctattagaaaaaggtgggatggcacctgttggtaatttacgaattaaagaagcattgcctccactaaacccagagtcaaccttgcacttacgttattttagtaaggaagatgtggctgagcgtaatattgattttctggaatatgctcaacaaatgggagctattagtggtggtgcaactggtgcaggcggtgaagctcccaagttgcttattcgtgtttcaccggaacaaaaagtctggattgacacctaccaagaacaatttgatcagccagatcagcattatttagttaaatttccgcgaaataatcgtagcgagattgattgcgatattctcagagctgaatattattactatcaaatactcaatgagttaggtttcaatacgatagagacgactcaaatgcagcttattgaaggtacaaaatatccgtcattgtggcttccaagattcgatacagaatggtgtgatcaatattggcaccgctatggtctagagtctgtgtattctgtactaaataagtcttctggtagtcatcttaatcatttcgaagtcattgaagatctatgtagattactcacaagcattgactcagattttgatgtaccacaatttatttgtgagtggttacaacgcgacttactcaatatcatttttggcaattcagataaccacggtcggaatacatcgtttataaaaaaatctggaaaaatttatctttcgcctatttatgactttgcacctatgaaagccgatccagaagttgtgaccagatcgacgacttggggaagtccgtatgaggaaggaggtgaataccggtgggcacaaattacacaaaaacttgctccttggtgcgatcccgatttatctctagcaacattaaggactttggcgaataacctgcttggcttaaagcaacgattagttgataaaggtgtaccaaaacaaattattgaaatgccagcgctgtcatttgattacatagaagctaaattgaaaagatgggaactgctatga

SEQ ID NO: 44612 - DNA, 309 bp, Acinetobacter baumannii
atgaatgtaaaaaatcaaccccaagaccgtcagcagattcttatagatttatataaacaatatttgttgagtgagattactttggggcaattgctatcgtatttacgcaaaaatgtgttgggtttatcgcaagaacaatatgctaatttggtgggtataagccgtcggactttaacggacattgagcaggataaaggtaaactcactcagtctgtgttagataaagtgtttaaaccacttggtttaaaagcagggcttgtacctacgcatgaacatattgttagcaaaattataaagccaaacgagtaa

SEQ ID NO: 44613 - DNA, 552 bp, Acinetobacter baumannii
atgccaaatttaactctcccaacacgtgcattaaaagtcgtaaatacatcaattgagttatttcaccgccgcggttttcatattgtgggcgtcgacagacttgtaaaagaatccgaaattaccaaagcaactttttataactactttcactctaaagaacggttaattgaaatttgcctgatggtgcaaaaagagcgactccaagaaaaagtggttgctatggtcgaatacgaccaccacacaaacgcaatcgacaaactcaagaaactctatgttctacataccgatgtagacgggctgtactacctgttatttaaagccatttttgaaatcaaaaatacctacccaaatgcatatacaaccactgtgagatatagaacatggttaatgaatgaaatctatagccaacttagagtacttaaacccgatgcttcatttaccgatgccaaattatttttatatatgatcgaaggcgccattattcagcgtttaggctcggatgaggttgatgaaagaatggttgaggtgtttttgagggggatggggaaataa

SEQ ID NO: 44614 - DNA, 621 bp, Acinetobacter baumannii
atgaaagaaatcaaattacatccaccttctgcatttgaacctttattaaccgataatgttctaatgtacttcgctatcccaatgcttgatatttatcacgacgtgcacatgctcttaaatagtataaatgataataattacacacgtggtaccgcaatttttggacgtacctatgagcaatttaaaaaattaatcgtttcggacgattgtcctgttgaggttcatcttaaagatggcacattcaaatttattttccaaattggatatgcacaaattggcttctgcaaaggtgattttactgatccaaagtctttaaagctacgtaaatatagaccttcgaattacgatctttttcagttcgatgataatcaacctgttatttggaaatttattcttaatgagccaaaaacagaagaagaagaagcttttattgagtttgttggttttaatttagccaatgaacctgtggcttattggagttctaatgacaatagagatagcaataagctacatttgttagacccaattactcctgaatctgttgagcttaatgctccatttattgaagatcctgatgaagatgatctcttagatgaagatttagatactaaattcaaatag

SEQ ID NO: 44615 - DNA, 1083 bp, Acinetobacter baumannii
atgaacacgccatttaatggattagaactaaaacttcttagacagtttaatcaactgtctttagaagaattaggtcagcaccttgagtgtacacggcaatatgttcacaaagttgaaactgggcaaaccatacctagttttcaatttattcaacaagttgccaattttttcaatgttcctgaggaactctttactaatgtaaagtcagtattacaagaggagcaaatccattttagaagtcttaggtcaacgaaaataacaactaaacaagttgttattgcacgtggcgaatacattaagcgcttaactgaatatttagattctaaacttcgtttgcctaaatatgatattcacgatcccaatcgttcgggttctatagaagcgattgctgaacagtgccgtgctgattgggggctaggtttaggcccaattagtagtatgatccgcttatgtgaatcacatggtgtagtcgtaactacttttcaatcattatcgacagaagtagatgcactttcattagcaacttcacgtccaatatttgttcggaatgaagcgaaggagagtgagtgtcgacaacgttttgatctagctcatgagcttggccatttggtacttcatgatggcatggttactggtgatcgtataactgaatcagaagctaatcagtttgcttcggctctactgattccacagacaatgatgcgtactcattttccaacttggtttcgaagtgggcgttatgattgggataaactcagtgagtttaaacaaacttggaaagtaagtaaggctgcaatcctttatagagctaaatctttaggattacttactcaagagcaatatacgagtggtgtagttactttgagaaaacgaagtgaggcaattaccgagaaagaagatcacttaattccaaaagaaagacctgaacttcttcaagcatgttttactatgcttgcaaaaaagaagatctttgctgaagatattgctactgaattaaatgtaaatgcagattttcttgaaaatttagtcggcttacaaattccaagaaaacctaagttaagaattatagaagaaagcgcctaa

SEQ ID NO: 44616 - DNA, 591 bp, Acinetobacter baumannii
atgcaacaacaagttttgcatgatattgctaaatggataaagttaggttttgagccgcttcctgtttctctaaatgccgcaccggttgagtttttaagagataactatgctgaacgtttattaaaaaagattaatcaacttgaaattcctacccatttaattgaaatagaagttactgaacatatgctgggtgaccgtggttctgaatatgttattcgcgcgctcaataaactaaaacagcatggggtacgcattgctttagatgacttcggaacaggtttctcttcattaacacatataagagactatccgattgattgcttaaaagttgattgtagctttatacaaaagatgcaacatgatccatccatttatgcaattgttcaggcaattggcttacttgctccaaatctctcactcggattaattgcagaaggtattgaaacaccagaacaagaagaattacttcttcaatttggatacaacatagggcaaggttttttatttgaatcagctattgacgctaatcaggtgatttctattcttaaacagggtcaggcttatctagaaagtcactattctatgaattaa

SEQ ID NO: 44617 - DNA, 444 bp, Acinetobacter baumannii
atgagttatcaccatattttagttccggtcgatggttctcctacttcacttattgcggttaatcatgctgcaagtcttgctaaagcctttagtagtaaagttactttggtatatgcgctcactattgatccatttatttcagttgaaattattgatagtacagaaattgcgcaagattattttaataaagcgagagcttcgattcagagcattttagatcaagctaaagaacaatttagccaacatggaatttctgttgaaaccaaaattgttgaaggtcaaacaattcatacagaaatcatcaaagcagcaactgagctaaaagctgatttattagtgattggttctcatgggcgaaaaggttttaaaaagttcttcttaggaagtgtaactcaagcactcttaggagaaattcatgtgccagtattggtcgtaactgaataa

SEQ ID NO: 44618 - DNA, 1443 bp, Acinetobacter baumannii
atgaataaacatttattagcaaaaatcactcttttaggtgctgcacaactatttacgtttcatacggcatttgcagatatacctctgacacctgctcagttcgcaaaagcgaaaacagaaaattttgataaaaaagtgattctgtccaatttaaataaaccacatgctttgttatgggggccagataatcaaatttggttaaccgaacgtgcaactggcaaaattttaagagtaaatcctgtatctggtagcgcgaaaacagtatttcaggttcccgaaattgtgagtgatgctgatgggcaaaatggtttgttaggttttgcttttcatcctgactttaaacataacccttatatctatatttcaggcacttttaaaaatccaaaatctacagataaagagttacctaatcagacaattattcgtagatatacctataataaaactacagatacatttgaaaagcctattgatttgattgcaggtttaccgtcatcaaaagatcatcagtctggtcgtctcgttattggtccagaccaaaaaatctactatacgattggtgaccaaggtcgtaatcagttagcttatctgttcttaccgaatcaggcacagcatactccgactcagcaagagctcaatagtaaagactaccatacatatatgggtaaagtattacgcttaaatctggacggcagtatacctaaagacaacccaagctttaacggcgtagtgagtcatatctacactttagggcaccgtaatccacaaggtttagcatttgccccaaatggaaagcttttacaatctgagcaaggaccaaattctgatgatgaaattaaccttgtattaaaaggtggtaactatggctggccaaatgtagctggttataaagatgacagtggttatgcctatgcaaactattcggcagcaaccaataaatcacaaattaaagatttagctcaaaacgggataaaagtagcaacaggtgttcctgtgactaaagagtctgaatggactggtaaaaactttgtgccacctttgaaaactttatatacggtacaagatacctataactataatgaccctacttgtggtgagatggcatatatttgctggccaacggttgcaccgtcatcggcatatgtatatacgggaggcaaaaaagcgattccagggtgggaaaatacattattggtcccatctttaaaacgtggggtgattttccgtattaaattggacccgacatatagcacgactttggatgatgctatcccaatgtttaaaagcaataaccgttatcgtgatgtcatcgctagtccagaaggtaataccttatatgtgctgactgatacagcgggaaatgtacaaaaagatgatggttcagtcactcatactttagagaatcccggttctctcattaaatttacctataacggtaagtaa

SEQ ID NO: 44619 - DNA, 630 bp, Acinetobacter baumannii
atgtgtgcaaattttaaaccccttaagaaagagcattcttatcaattagacttacttgaacccacctttgattacaaatcagatgtctatccaagtgatgattgcccaataatcttatctcatcaaaatgaatgggaatggcgaaaagttaaatttggaatgttgccaccatatgcgaaagaaatttcatttaaatatgcaacttataatgcaagaactgaaacggttgatcacaaacgttcatttaaacatgcctggtcaaatgatcaatttggcctagttcctgttgaagctatttatgaaccgaaatatatcaatggtaaagcacattggtatggcatctttcgtcaagatgggaagccatttacgcttgcagcaatttatgaagaaaccataattgatgagcagaaagttagaacaatgtcactattaacaatcaatgcagatcgacattcttttatgaaacagtttcataaacctgacgatgaaaaacgttcaattattgtaatacctgaccatcttagaaacgattggttaaactgcaaacacactgacgctcctgactttttcttagatatgccattaaatgaatttacgtctctgcctaaagcagaaatgaacaaatcataa

SEQ ID NO: 44620 - DNA, 1455 bp, Acinetobacter baumannii
atgttaacgaatcttcgagaacaatggttctctaatgtccgtgcagatattctttctgggcttgttgttggtttggctttaattccagaggcgattgccttttcaattattgcaggtgtagatcctcaaatcggtttatatgcgtctttttgtattgcggttattatttcttttgtaggtggccgtcctgccatgatttcggcagcaacgggcgctatggccttagtcatgacgaccctagtgaaagaacatggtcttcagtatttattcgcagctactattttgacgggcgtcatacaaattatagtaggatatcttaagcttgctaagctcatgcgctttgtctctaaatcggttgtgattggttttgtaaatgctctcgccatactcatttttatggcccagcttccagaactagtcaatgtaagttggtacgtctatctattagtcgctattggtttagcaattatttatctattcccttatgtaccaaagcttggaaaaatttttccatctccccttatatgtattgttatagtcacattacttgccttctttttaggccttgatgtgagaacagttggcgatatgggagcactcccaaatactctacctatttttttaattccggatattcctcttaatttagatacaattcttatcattcttccttattcattagcgttagctgcagttggcttacttgagtcgatgatgacagccacaattgttgatgaaatgacggacagcccgagtaataaatttaaggaatgtaaaggtcaaggtattgccaatattgcctcgggttttatgggtgggatggctggatgtgccatgattgggcaatcaatgattaatgttaaatcaggtggtcgcacacgcttatctacattatgcgcaggcatattcttgctgattttagtagtatttttaagtgattggttgaaagttattcctatggctgcgcttgttgctgtcatgattatggtatcaataagtacttttgagtggcgttcacttacccaatttaaaactaatcctaaaagtagcaataccgttatgattgcaacggttgttgtagttgtagctactcacaatctagcattaggcgtattgacaggtgtactactctccgcgcttttcttagccaataaacttgaaaatgatatacaggtaataagttcattagaaggcaacgctcgtttatatgatttaagaggacaaatcttttttagttcttcagatagattcatgcacggctttaactttaaagaagacgtaaaagaagtcattattgatttgactcattcacatatttgggatgtcacatcggttgcaatgcttgattcagcagtagaaaagttccaaaagaatggcatacaagttactgtacgtggtttaaatgaagccagttcaatcatgattgacaagtatggtacacatgcaaaaatttaa

SEQ ID NO: 44621 - DNA, 1179 bp, Acinetobacter baumannii
atgaatattcgccaagtgtctgctatttgtctttcaatagcagctactcattttgtgtatgccgcttcaaatgttgtaaatcctgtaaatgattcttcccaagcaaaaggaattattaaaaatcaatatattgttatattaaataaggatgcaggtccttctaaagatttcgcacaaaatattgctaaacaacatgctggtaaagttttacaaagctacgatactgttcttaaaggttttgcaatttatttacctgatacagcaggggcagcctttattgaagcgatgaaaaagaaccctcatgttctttcagtagaaagcgatacaatagtaaatattgatgcaactactcaaagtaatccagattggggactagatcgtatagaccagaaagctttaccattaaattcgacttattcttatttacagaccggttcaggtactacggcttatatcgtggatactggtatattatctagccaccaagagttttcaggacgtgtgttaagcggttataccgcaatatctgatggcaatggtacaaccgactgtaatggacatgggacccatgttgctggaacagtaggtggtacgacctatggtgttgccaaaagtgtcaatttagttcctatccggattttggggtgtgatgggtcaggagcctcaagtaatgttattgctggtttagactggatattaaaaaatggtaaaaaacctgcagttgtaaatatgtctttagggggggcgacaagttcttctttagatagtgcagtggaaaatttatataataatggttatgtcatggtcgtagccgctggcaattcaaatacagatgcatgtacatcttctccagcaagagtaagtaaggccattacagtggctgcgacagataataccgatactcgggcaagctattctaattatggaagctgtgttgatatttttgcacctggaagtcagattaactcttcttggattggaagtaatacagctaccaagatattaaacggtacttcaatggcaaccccgcatgttgctggtgtagttgctgaaatgcttcaaagtacacctacggcttcacctcaaacgatctctaccaatcttttaaatcaagcgagcagtaacgtagtaaaaaacccttcaggtagcccaaaccgcttgttatataaatctccttaa

SEQ ID NO: 44622 - DNA, 924 bp, Acinetobacter baumannii
atgaaaacagaactaatagttaaagataatgcattaattaatgccagttataaccttgatttagtcgagcaacggttaattcttctagctatcgttgaagcaagggaatcgggtaagggaataaatgctaatgatccattaacagttcatgctgaaagctacatcaatcaatttggtgtacatcgaaacacggcttatcaggcattaaaagatgcttgtgatgatctatttgcaagacaattcagttatcaaagtcttagtgaaaaaggcaacattattaatcacaagtcaagatgggtgagtgaagtcgcttatattgataatgaagcggttgttagacttatttttgctcccgctatcgtgcctttaattacaagactagaagaacaatttacaaagtatgaaatacaacaaataagcaatttaacaagtgcttatgccgttcggttatatgagatattgattgcatggcgtagtacaggaaaaacgcctcttataactttgtctgatttcagacaaaaaataggtgtactcgatactgaatacaaacgaatgtatgactttaaaaaatatgtcttagacattgcattaaagcaagtaaatgaacataccgacattactgttaaagttgaacagcataagactggtagatcaattacaggtttttcatttagctttaaacaaaaaaaatcagtaacgaagtcagctaaaagtataggtgtaagcgaagatataacgatcactttaacagatgcacaacgctattcatttgcgagtaaattgtcagagcttccagaaatgggaaaactttcacaaggcaccgaaagctatgaacaatttgctgtacggattgcagatatgctaaaacagccggagaaattaaaagaacttactccattacttcgaaaagttggctttcaataa

SEQ ID NO: 44623 - DNA, 546 bp, Acinetobacter baumannii
atgaaaaaactgtcagtttcagagttggctaagctttacggatattcacgacaagccatatatgcccatataaacaaaggaaatttatctaaaggatctgatggattaattgacttcgcagaagccataagagtttttggggaaccacaaaagaaagatactaatgtcaatcaaagtcaatcaattaacagtcaaaacttgacagaagttgacctattaaaacgtcaagttgacatactggaaaaacagttaaatcaagcactgtttagagaaaatcaatcactagaacgtgaatcgttttatcaagatcagatcgaggccatgcagcgcttactagaagcaccaaaagccaatatgactacgtttaccgatcaagaacagtcgcaagcgaatgtagctcaagtacagccagaacctaatattgatgatcctaaacatgacggattgactactccagagaataagcgcattcctgttccagagcatgttgaaccagagcctaaaaagcgtggcttctggagtcgtttttttcttccatatggttaa

SEQ ID NO: 44624 - DNA, 318 bp, Acinetobacter baumannii
atgctaggtaaaaatcatcattttttaaaaaaattttcgatcagtgatgctgctatagcgtataaaaaacctcgctcgactatacttaaatatataaaaagcggagatttcgaacttgactacaataaattgattgaatacagtcagttagttagaaaatttggtgaacttacttaccctatacaggacgaaagagagcaacaaatcaaaaaactaaaagatgaagttatgcatttaaaaaaacaacttaacttttttaaatatacttcaatctcaaacaaaaatagactattaatttctcataaacattccatttaa

SEQ ID NO: 44625 - DNA, 357 bp, Acinetobacter baumannii
atgtggacagtcattacaacggatctgtttaatgaatggcttgaacagcaagatgaagcaacacaagaaaaagtcttagctgcattggttgttctacaacagcaagggcctagtttaggtcgtcctttagtagataccgtctacgattctaaatttaccaatatgaaggaactacgtgttcagcatcgtggtaaaccgttaagggcattttttgcattcgatcccctaagacaagcgattgtgctgtgtattggtgataagagtaataaaaagcgtttttatacagagatgctagcaattgcagatgagcaatacgcacttcatctctcaactttaggagatcaatctaatggctaa

SEQ ID NO: 44626 - DNA, 303 bp, Acinetobacter baumannii
atggctaagagcttacaagaattattggctagtcgctctccagagagtcaagctcgtattcaaaaaatggctgatgaattacttttagaaagtcagcttcaccttatccgagaagagttagaaatttcccagaaagaactagctgcaacccttggaattaaacagccgtcattatcagcaatcgaaaatcgtggtcatgatcttaaaatttcaacgatgaaaaagtatgttgaagcaatgggtggaaaacttcgtattgatgtagagcttccaacaggaaaacacatagggttcaatgtctaa

SEQ ID NO: 44627 - DNA, 210 bp, Acinetobacter baumannii
atgtctaataataaacctttgaaaaatagtactaaattacttgttaacttagacaaatttatatttttagtcaatgctgccgatagcctagaagaaattgaaattattagagatttatgctgtgaatatttttcacattgtaagaggccaagctattacattgatatttttgacaatgcttattggttaaaatattacgaaatagcttaa

SEQ ID NO: 44628 - DNA, 519 bp, Acinetobacter baumannii
atggaaacatttgcagaacctgttttttctaatgatttattagcgaaagcagaaagtggagatacttctgcccagttagaattagctgagatttatctatatggtcatggtgttgattcagatgaaaatcaagctgaaatttgggctattaaatcagctgaaaatggaaatgtagcagcaatgttttggttagctgatggatatgttacctatgctagattaatagaggatgatgacaaaaacgattctttagaacatttccaaaaagcttttaagtggtttcagaaagcttcagaaaatggtcattctgaatcaatggttgagttagctgacctatatactcgcgcagatagcggaatagaagttaatattaagaaagctttagaacttcgtgaaaaggctgcaaagttaggtaataagaaagcaatgcgaagtctttccgctatgtatcgtgatggtataggcattcctaaaaatactgatttagctcaaagttggtgggataagtctgaaaattaa

SEQ ID NO: 44629 - DNA, 513 bp, Acinetobacter baumannii
atgaatagtgttcatgaaattatagaaaaaatacataatgaatgggagattgaacctaagaaagctattcagagaggtagggaatgtccctttcctttgcagtgttcattaaacctaaaaagcaaaatttacccacaaataccccaagtacttttaccaaaagtattagaggatttttatacagtatctaatggtgcagatctatttaaagatcaagaatacggacaatggggcttaaaattatattctattgaggaagtaatttttgcttcaaaaatttataaaagtaatcgtaataatgacgctcttcaaagtgacttaattattggagaattctatggagattcagacttattgttagttcgatgtgatcctaatagtgatgattacggctctatttttgttgtcttacctatagatcaaagacaagattggtacattgttgctaatacttttcaagaattcattagtaaattttatgaaactcagggtgataaattctgggaaccttaa

SEQ ID NO: 44630 - DNA, 159 bp, Acinetobacter baumannii
atgtattcaatttcatggacattcatagtcatttttttttcggcattgcttttgatcatttctaaacgagatttcagacataaaaagatgattcaatattttgctgtatttacgatcttttttatacctactttagcaattttaggttattttgattaa

SEQ ID NO: 44631 - DNA, 192 bp, Acinetobacter baumannii
atgtcaacagaattagtcaattcagccaatatcatctcttttcctaagccatgtgccttctgtgaatcaacggaacatgtacaactttttgctgggctgatgctttgcaggagttgtcaggaaaacatcaaaattaccaatcctgatctgtttgctaccaatgatcagattcaacaaaaagcccaggattaa

SEQ ID NO: 44632 - DNA, 555 bp, Acinetobacter baumannii
atgaataaagtttacaaggtcatttggaatgcttcgattggagcatgggttgcaacctctgaaattgcaaaaagtaaaacaaagactaaatcaaaaactttaaatctatcagcggcagttttatcgggtgtaatttgttttgctccaaatgcttttgctgggacaaataccgaagggggaataggccaaggaacatctatttctggtacaacttcatgtcgtgaaggaagcgctaatacggctaatcaaaaagatattgctattggctgcggggcacaaactcaagaccgaactggctctaacatcgcaaatcgtaataatccatataataattctaccggtgcttatgctggcgcaatgaaacaaggcggagcaatcagtgttggtacgggggctgtagttgagaaaggcctaggaacagcaatcggttcttatgcgacgactcaaatacaggcgaatagccagaccgacatatacaagcagtgtagtagtaacaatagttcacaacttattcaatgtttagcgccaaatagacgtgttaatataagttggtaa

SEQ ID NO: 44633 - DNA, 585 bp, Acinetobacter baumannii
atgaatgaattaagttttattagaaaaaatttaagatctagaagacgagctttaacccaatttgagcaaaaacaggctcagcttaatgttttacattgcctaaatcaccttcctatttttcattcatcaaaaaaaatcggtttatatctgcatgcttttggcgaaatccataccgatcttcttatcaaattatgttttaaaaagaacaaacaagtttatttacccatgatttgttcgatgaaccaacgtttagtatgggtaaaaataaataaaaaccaatatttaagtcgtcgtttttctcatcacccattgggaatgaaagaacctatggcaactcgcggaaaacatgtatcacaacttgatttgctacttatgccacttttagcttgcgatcactatgggacacgtattggtatgggtggtggttattatgatcgtacattagcaagtgctaagcataagccctaccgtttaggattagcacatcaatttcaatttattgaacacactttagaacgtcaaagttgggatcaaccattagatggtttactgactccacagcacttttattattttaaaagataa

SEQ ID NO: 44634 - DNA, 342 bp, Acinetobacter baumannii
atgaagttaaaaattttaacaatgatgttatgtgtggcattgctcagcggatgtacgaaacaggcagaatctgaggcacctcaaattgattataaagctcaatttgaagagtcggaccgaaaaattggtgaatttttagatcagttagataatccaaatacccctcaagaagttaaagttaaaattttatgtcatgactatcctgatgtgtataaaaaacaatacatgcctgcattaataaaagtttcaccaaaaccgtatactgaagaaaaattattgtcagatttgaaaagtgcaactgactactataaagggactttggggataaaatgtaatgaataa

SEQ ID NO: 44635 - DNA, 318 bp, Acinetobacter baumannii
atgaaatttaaaatattattattaagttttattgccaccggttgctatgctaatgaaagtacagctgacccagatatttgtaatatcgtaaaaaaggttgcttataacgtaatggaagcacgacagcaaaaagtaccagcacaagatttacaacaaattgccgatgggttagcagatgaaaaagccaagcagctttatcaagacttaattagctcagcttatgctgccaaagtatttaagacaagtttctttaaacgccaagcaattgaagattttcaagcagggtggtatgaggaatgtttacgtagaaatgaataa

SEQ ID NO: 44636 - DNA, 333 bp, Acinetobacter baumannii
atgaaagcatctaaattgattagagataaaggactgcaatacgcgaaggaaatcgtagattcagcacccgataacgcaactgaatggaacgagggttatgagttccaatgtggtcaaagtgtagaaatcagcccagcagatcgtgagaagtattttgtagatttggttgagcttaaacgtctggtggagtcggttgatttggttgaatcatggggtggcattgaggacttaaaactatatgacttgtctcatagcaaagataaacctgaatctgctggatacaagttgcttcatgcaattgctgattacgaatcaatatacggaggcgaatga

SEQ ID NO: 44637 - DNA, 222 bp, Acinetobacter baumannii
atgggattagttggtggatacgatgctcatttttattgcgactcttgtaatgcatttggtcaaggttatgggcaaacaaaagctgaagctatacgtgatatccgaaatcgtggatgggttttaaaacgagatggtcttgtactttgtgaagcctgcaagaacagaaaaaatatagcaatcattccagaagatgatcggaatggctgtgagtggaatatataa

SEQ ID NO: 44638 - DNA, 216 bp, Acinetobacter baumannii
atgagtgagtttgagggtaaatctggaaagtgggcttgggagattcaaaaagaacaacaagcgaatttagttgagctaagaagttcaattgaaaacctagttcaaaagtataagcacgatgcccatgcttcaagcctttttggtgatcaagataaagcacgagtttataactgctttgctaatcagttggaaaatttgctgaaaggtggtgcttga

SEQ ID NO: 44639 - DNA, 402 bp, Acinetobacter baumannii
atgtcatcagtcagcattgctgaataccgcaagttatttccgataaagaaaaataaaaagcggcgttcagcaaagcaagttgccagacaaccaagtgtgggtgaaatggttctggcaacgcatttaagagcatgcaagatcggttttgaacaggaatataagttccatccaaaacgcaaatggagagctgattttctggttactggtacaaaaattttgattgaggttgaaggcgggatctggagtggaggccgtcatacaaggggcaaaggctatataggggatatggagaaatacaactccgcagcaatgatgggttttacagttttacggttcagcacagagcaagtgaaagcaggcgtggcgattaaacaaattgagcaattggtaggtgaaaaatga

SEQ ID NO: 44640 - DNA, 477 bp, Acinetobacter baumannii
atgagtgcagttttaaaaacacaacaaatggattggtctaaatatactattgacggttggttagagcagtttggcgcatggtgtgaaacagttagaatgaaagggggtgatttgccagatgggcttcatatcaatcaaatttactggttgatgcgtgaagctggcaaagaagtacaaaaaagtaaatcttatattcgatgtgagatcagtgattatgaggcggatcaaattcaagcacttttacgaagtctattaaattctgataaaacagattttacaactaagtttgcattaatttgtttaattaaaaataaggttgaaaataaaggattgttgaaggttgctcaagaaacaaaccaatctaaagctcaggtcgcaattatggtgagttgcgctagattttatttattaggtcatgataaaagattaagacaaaatggaggttcaaatgaaaacatacactgtaaaactatatga

SEQ ID NO: 44641 - DNA, 345 bp, Acinetobacter baumannii
atgaataagaatgtagagctaataaattacattgatgtagctgagacagtttacgaacgggtatatgaaaataataaaatttcaaataatttgattgttaatctcaatcgcattatggctgagataaagaatcaagctgcagaaaaaagactcaaattgaagtacagctcaatagactttgaatattgtttaagtttgcctttagctgatcgcaaaataaaagtagatttaagccttatacctcattttgaagatcgtgaagaaagtattttgtggttaactaactttattggaaaaatttgtgagcccagaaagatgcaaagacagaaaaaaaaacttcattaa

SEQ ID NO: 44642 - DNA, 696 bp, Acinetobacter baumannii
atgattgagcaaattcaaaaaagatcactggtcgatgaagtgattcatgtcatacgtcagaatattaaaaatgacatttggaaagtagatgagaaaattccgactgaacctgagcttgttcaaggtttgggtgtgggccgaaacaccattcgtgaagcaattaaaattttagaatatttaggtgttttagaagtcaaacaggggctgggtacttttgtacgcacgaaaaatgacttttcaattgtgattaattcaattcatcattctgatttatatgaacacgtagaagtaagatgtttattagaaatcgaaattgctaaattagctgctagacatagcacgcctgaagatatgcgcgatgttatagcgtgtttagaacatagagcagcaacaaatcaacaagatgttgctaacttcatgttaagtgataagaaactacatttggcaattgccaaggcgactcataataaagctttacaggcaacttatgagtatttcttaaactcaagctatcaatacaccttagagctagtgactaataaaaatttacctgacccaaaccagcaaatacatagtgaacttgttcaagctattcaacacaagtctgagtcagaagccatgcgaattgcggagtctatgttggcgcccatattacgttcgctagattcaattaaagctgactttgtgagcctgtaa

SEQ ID NO: 44643 - DNA, 903 bp, Acinetobacter baumannii
atggaattaagtcagacaatttcaaatcttatttttgaaattcaaaagcttactcaagcagtcgaaaaaatttctaaaacccaagaaatttctgtagatgtcttagatgaggcaatcgcctttagatgggaaagagaaaataataaaggttcgctcgtcgcgatccgcaaacctcaactcatttcttttaatcatctttgcaatatcgacagccaactcaccaaagtaaaactaaatactgaagcctttgcaaaaggcttgttggcaaataatgtactcatgacaggctcacgtggtacaggcaagtcgtctattgtaaaagcctgtttaaatgaatatcaccacttaggccttcgggtgattgaacttgaaaaaaagtatttagaagatttgcctaagattattaacttactgcaagaccgtactgagcgttttatcatcttttgtgatgacttggcttttgaagcgggcgactcaagttacgcaactttaaaaactgtattagatggttcactagcctctagttcagacaatacactcatttatgcgacatcaaatcgaaagcatatggtggccgaatacaataaagataataccgagttaaatgtcggggaaaatggcgaattacgcccaggcgatagcattgaacaaaagatttctttagcagacagatttggtttacaaattaatttctatggctttagccaacaagagtatttaaaaacagttcaatactggctaaatgaatacaaatggcaacaacgtgaaacttgggaaacgattcagttaaaagctattcaatatgcaactcagcaaggcaaccgctcaggaagaattgccaatcaatttgccaaaatgattgtgggccaagaaatgctaagtgcagcagatttaacggtttaa

SEQ ID NO: 44644 - DNA, 1236 bp, Acinetobacter baumannii
atggaatttgtttttaatggtttttatacactaatttcggcggtcatcgttctattgttgggtcgctttcttgtcaatcggattgattttttaaaacgttataatatccctgaaccagtagcaggtggtttggtcgctgcggtagtttctttacttgtccacactttctggggatacagtattgtttttagcagtgaattacaaaccagctttatgctcgtgttctttgcttcaattggtttaagtgccaattttatgaagcttaaagagggtggtactgctttagtcatcttcttaatttgtgtagcctcatttattgttgttcaaaatgctgtcggtatgagccttgcaaccttattgggtctagacccgcttattggtttgattgcaggttcaattactttaaccggtggtcatggtacagccggtgcttggggtgaaattttagaaagccagcatggtattcagggtgctttagcgttaggtatggcaagtgctacgtttggcttgattattggtggtgtcattggtggtcctttagccaaattgcttattaatcgttatagccttgctcaagcaaaaaccaatgctgaaattcagcagcgtgacacgcatgttgaacaaaattcagatgatcttgcaccgtttgaaaacccgcatcaagttcgtttaattactgccgacaatgcaattaccacgcttggtatgtttgcagcatgtttagcatttgctgaatttatgactggtttcagtaagggaacttggtttgagttaccaactttcgtttgggcgcttggtggcggtgtaatcttaagaaatattttagaaagcgtgttgaaggttgatatctttgaccgcgcgattgacgtttttggtaatgcgtctttatctctttatttagcaatggcattgctttcattaaagctttggcaacttgctgacttagcaggtccacttgtggttattttaggtgctcaaacactgacgatggctttatacgcagcatttgtgactttccgtgtaatggggaaaaattacgatgcggcagtattggcagcaggtcactgtggtttcggtatgggggctacaccaaccgccgttgcaaatatgcaggcgattaccaatatgtatggcccatcgcataaagcattcttaattgttccgctttgtggtgcattctttgtcgacttgattaatgcaactgtgattcagcttatgttgaaatttattgcttaa

SEQ ID NO: 44645 - DNA, 1149 bp, Acinetobacter baumannii
atgagtttattgcttaaagttcgacagaatgttccacaggtacagtcgattaaaacatctcttaaaaagcgtgctggtcagaaaatacctcacatgctctccaatgcatcagatctgttttttagagggtcggaaattgccctgtcaggaaaaacaccttttgatgtaatttataagcatgaaattataagccttcgccattatagaattgagacagaagcatcagccaaacaccgtgtgccgttagtgattgttccacctttagctgtgaacatgctcatttacgatttgtttcctacccgcagcctaatacgctattttttagatcaaggtttcgaggtttatttaatagactggggtgtacctactcgcaatcaagccaaatacaattttggcacctatgtaaaagtctttatgcctgaaatgttaaagcaagtccgtatacatagtggacaacaacagctttcattacatggctggagtttaggtggcgccctttcactttgctataccgcattatttaaagataaagatattaagaatctgatgattcttgcttccccgatcgacacacataaagcaggttatatgggtaagctctatggaagtctgactaaacctgcacagtgggtccgtaagcatacgccttttcgtattcgccaacatgtaccaagtgaagtgtttcatattcatggatggcaaaacacactcggttttaaattaacggaccccattggcaatttaaaaacctattggcaacttcttaaaaatctggataaccgagaatttattgttgaccacgctacctctagttcatttatcgacaatatgctggcctatccgggtggcgttatgcgcgacattattttacgtttctggattgataatgaactctcaacagatgtaatcaaatttggcgaacttacagcttatttaaaagatattgattgttcagtgttggctgtaggtggagatacagacattattgtgaccgccgatgctgttaagcctcttatggatttaattagtagccaagataaaacgttcaaaactgtacccggaggccatatgggcgtagtgtccggtagccaagctccgacctctgtttggcctgaaatgagtaattggctggctacacgttcagattaa

SEQ ID NO: 44646 - DNA, 837 bp, Acinetobacter baumannii
atgagtagtaactgggtggatatttcaaaagataccaatacgggtatcgaaacaatccgtgctcattttactggccatgcttatgatccccattggcattcaagttatttaattggtgtaactgaatctggcattcaacaatttcattgccgtaaaaagcaaatcaatagtcatgctgggcaagtttttatgcttgagccagaagaaattcatgatggacatgcgcctgcatctgatggttttacctaccaaatgctttatctacatccagaatggttaaagcaacgccttcaaggtttgtttcacaacagccccgatcattacgaactagtgattgatgcgccattaaaatccgatgatcaactcgcaatcattacttcgcaagcatttcgacacttacactataaagaaatgaatattgtgaaagacaatagtctagatgtgcttattcaatatattgcccaaggtaaatggttaaaaaaagcttctcaatcttcttgtattcatgtaccccaaatcgcccatcaaatccgagatattctgcatgatcatttatttgaagatattgggttagaagatatatcacgtatggtgggactagaccgttaccatattcaccgtatttttaaatcaacttttcatttagctcctcatcaatatcttattcaacttagacttacacgagcacgtgatttactcgctagaagtatttctccagcacaagttgcttctgacttatgtttttcagaccaaagtcatttaagtcgttggtttaaacgctgttatggactaacaccagccgcttacagaaaaatctgcacaaatcttcaagattaa

SEQ ID NO: 44647 - DNA, 606 bp, Acinetobacter baumannii
atggaaaacctcactgcattttcattatttgcaattgttgcctcaattactccaggcccgaccaactttataattttaagtttaagtagtcattataaaatttctaaaacacttcccgttattttaggttcttgtattggagcagccttacttgtattattggttggtattggccttggctccactattcttgcttaccctgctattcaaaaaattatgacatggagtggtttaatctggcttaccgttctagcttggaaattatataactacaatcctgttatctctttagaaaaaaatgaacaataccctcctattggttttaaagctgcttttttaatgcaagcgattaatcctaaaacatggatgatggcttttgcagttattagcgtctatacaaaacagggacaagatatcttgataaatgtctcaattttatcctgcatttttttacttatagcatttccttgtctctacctatgggccttagtaggcagactaagtactcggcttctttcaaaaccaaaacatataaatatttttaataaaataatggctattatattactagcctcggtctggtggcccatgttccctagattttaa

SEQ ID NO: 44648 - DNA, 228 bp, Acinetobacter baumannii
atggctagagtagtttctcaaaaaatgaagatgtgtaaagaatgtggttatagaactttacatcaaaaaaattcaaaacagatgagttggttaatgcacttattcttaacaatttgcacattcactatttggttatggatttggctattaatgttactttggcatacttttgctaaacctatgacagctctaacaaataggtggatctgctcaaaatgtggacattaa

SEQ ID NO: 44649 - DNA, 399 bp, Acinetobacter baumannii
atgaaaatacttactaccctaattctaactactattccatttgcatcatatgcaatgtgtgaaaatcaacgaagcaatggaaccactatctcaatttatgaatgttataaaaaagaagttcaaaaatcagataaaaagataatgcaggtttatacaaactataaaaacactctcagcgctagtgaacaaaaaaatttattagaagtccaacgttcttggataaattataaaatgaaacaatgtaattttgaagttgcttcctacggaactatcgctggacaattacatgctcaatgtatgattaatatgaataacagacgaattaatgaactcaaatatatgcatgattgtggcttagaaagttcatctaatttctgcatgaactacagacctgcttaa

SEQ ID NO: 44650 - DNA, 471 bp, Acinetobacter baumannii
atgaatcgattattaacctcagctataaccttaactttaatttcaactacttctattgccgctacagataaacagcttcttgaacaaataaatttcgtgaaaaaagtatatatgatggccgtaagtgataaatatatgggagtagatattcttaagcagaatagttcttctgaacttaaacaactgctttctcgcagagatacaattgctcttcgtcataacggggagatgtgtgagtgggtccgtaatgtccttatacccggcaatgattatgatgtacgtgtaaatcagatgaaattcactgcacttagtaacggattaattcgagctcaagggaaaaactttggggaaagctttcaagtagattttaaagttcaatgcgatggacaaaattgtcaaattgatgatatttacattccagatagctataaaaaagaagtaatgtcgattgtcaaaaataatcagtgttaa

SEQ ID NO: 44651 - DNA, 1326 bp, Acinetobacter baumannii
atgtcgaatatcactatccgtgaatatgcatacttaagagtttctcaaaatcctcctcagcagaatcaaaaaatggattttgcagaaatttcacagagtggttttgattacctatttcaactgaatcaggaactgctcagaaatgggcagcgaattttaaagttaggtagaacggcatcggaaatacaagtacagaattttgttggagttattgaaaccccatgtggtacagaaattgagatcttaccaaaacatgctgattcagtagaggataatgatgatgctagggctatcttgattaaaatcttgaaacaggttttacagttgccacagcgtgatacaggtcttgcctcaatcgaaaaatttaaagtgcctctaacagactggttctacgcacaatttttagatgctttgcagaaactttatcgtacaggggtacgatttgattatcagcgaatagaggctgaagaaaacttcttacgagggcagttgcataccgcacaacagatgcgaaaacctttaacaaggcaacatcaattaagtataaaacatgatatttttacgtcaaatcgggcagagaatcggctgattcggtcatgtattgatgtggtctgtaaaagagctaagactgctgatttgtggcgaacatcacatgagtttcatttactgttctcagaagtgcctcagtctacaaattatagggaagattttaaaaaatggaaaaatgatcgactaatgtcacattattccaatataaggtattggtgtgaattgattttaggcgatgaaattccattcgctgtaaaaggtattaatcaggcaagaagtattctatttcctatggaaaagttatttgaaaaatatgtagaaatacaactatcaaagcaccttataaaaggagctaagcttgagactcagaaatctagcaaatacttagctcaatattgttcaaaagatatattcaatttaataccagatttagctatccaatattattgtgaacaaacaaagtctaaaaaatatttgatacttgatactaaatggaaacttattgatagcaataatattgaggaaaaatttgggataaaacaaagcgatatgtatcagatgtttgcctataatcatatgtatcagggccacacatcagatatcgtattaatctatccaaaacataaaaatttccagatagcactaaagccttttgagtttaaacttcatgacttattgaagactggactgcaaccaaaaatttgggtaattccatttgacttagaacgtagtgaacttattttagataatttgatgatcgctggattacattcttaa

SEQ ID NO: 44652 - DNA, 2043 bp, Acinetobacter baumannii
gtgaaagttgagttattaaaggaattatataaagagctgataaattttgatcaattgaaaggatggtatgagagttacaaatctcgagtttctgaagttgaagaaatgagagaaaagataactaaaggctataaattaaatcctcaaagtgatgataagttcttgttatatttattaaaaattcaaaaaaatggaatagcgtcaagaggacagtctaatattagtgatgtagcttatagcgaattaataaataatacggaatttcttgagattttagaaaatttaatcaaagaaccaacctatgaaaattatattaattttagaaaagttagtaaaagtatattaactttagtgggtagcaataattttcctttaatttttaatagagcggtcgcagcctgtaatctagatttgtccactgttgtagatgaaagtaaatttcatcaattatttaaatatcttgataaagagaaaattcttgatattcctcaagaggtaaaagataaaaattggtatgcccaaaatattttcttagtaagtaaatttcgtgaaatactaagtgatcttaaaggtatagttgagattgataagtattggataaatatatttatatgggaaatatatgtaaaaaaagtcgagctttcaaagcagaaaatttcaatactaaataaagtcgaagccgatgaggtagtaacagagatcaatagatatgatgagaaaaaaatgcaaaagatagttcagccattaaatcgtattttatttggtgcagcagggacagggaaaacatatcatacaattaatcatgcacttagtattctagatgatgaaacattagaagagttggaaaaactagaacgtatagaactgaaaaataggtttgatagatataaagagaatggcaacatcaagtttgttaccttccatcagagctttagctacgaagattttatagaaggtattcgtgcagaagtaagcaatggcggtcttagctattgtattaaaccaggtgtttttaaagagctgtgtgaaaaagcgactattaataaaaaagcgactgatgaaagtataaaaattgctatttcagaattaactgaaaaggcaaaaaatgaggaaattactttttatacaaaaaagggagctgaatttaaagttaaaagtaatccaagtggtaccttaattgcgactacctctaaagatacagaggtaatattggcaaaaagctatattactaactatctattaaaacagtctgatgaaataattgatcaacgaagttatgaatgggcaatcgctaaatctttacgtaccgaagttgattataaaactattgcaagtaaagaaagtaatgaacgttttgttcttatcattgatgaaattaataggggaaatatatctcgtatttttggggagttgattactttaattgaggattctaaacgtcaaggcaatgatgaagagttgagtacaattttaccttactcaaaagaagaatttagtattccaagcaatctttatattatcggaacaatgaatagttcagaccgttccttgactgggttggatgttgcgctgcgccgacgtttcgagtttattgaaatgccgccaaggcctgagctcttaaaagatgatgaaggagaagacttagagatcgatggtcttaatattgtgaaattattgactgtaatgaatcaacgtatcgaaatactattagatagagatcactgtatagggcatgccaactttataccattaaaggtggaacctaaaatcgaaaaattagctaaaattttccagcaaaaaattatcccccaattacaggaatatttcttcgacgattgggaaaagatcgatgcagttttaaatgaaaatgggatgcttcacaaaaagtatgacccaagttcaaaaaataaattatttaaagatcaaagcttgattaatcgcagtatttgggaaattaatgctgaagcatttggtgatgtgaagaaatatattgcaatttatgatgagacatctgacgttggaaatgagttaagtggatattga

SEQ ID NO: 44653 - DNA, 912 bp, Acinetobacter baumannii
atggtaaaaaagttaaaagctcatgaacgtttagcagaacggcttgcaaatattataacccgtttaaatagaggcgagcatttagatcctaatgaattgactttagattttggagtaactaaaaaaactatacaacgagatatagaaagactatcaatcgcaggtttacctttagttataaatgaaaaaacaaagaagttttatttaggaacaaactatgttggtaaaattagccctcaggatatccaaaattttgctcagctttctggaattacgggtttatatccgaatttggatctatcatttttaagagaattactcgatagtcgttcatctgaggtttatgcggcaaaaggttatttttttgaaaacacaactcatttttcagagctatttaaattaatccgcgaagcaatacaagatagaaaacagataacttttcaatacaacagtaagttacgtacggtacagccgtataagcttatacatcatcacggtagttggtacttagcagcagtaagaaatgatcagttgcaactacgagcatatcgtttgagtagaattggtaaagattgccaaatacaatatcatttaggtcagtttgaacctgatatagaaatactaaaacaactaaaaaatgaagagagtatttggtttggtaaggaaaaaaaagaaatagtattatccgttcaacatcaagcggcagagcatttcgaacaaagacagctttttcctgagcagcaaattatgaaaaaaaatgatgatggaagcctaattatttcaagtcgtatagtacatcaagatcaaattaaatcactaattagattctggatacctcatgttaaggtaatctcacctatagagctccaacagagtgtagagagcgatctaaagtcatatctagagatatag

SEQ ID NO: 44654 - DNA, 1041 bp, Acinetobacter baumannii
atgttccattcggcgaaatggaaccatgactatgaccttactggaaaacgtattgccgtgattggtactggtgcatctgccatccagtttgtgccccaaattcagcctaaagcaaaagaactgtttgtattccaacgtacagccccttgggtactgccaaaaccggatacagacttaggtgagttgagtaaatcaattattgccaaatacccaaaaatacaggccacttggcgccagactgtagcaggcaccttaaatgtcatcaattttggtttacgcaacccaaaagctttaaagcctgtcaattttgctgcaaaacaactattaaagttacaaattaaagatccggttttacgtaaaaacgtcacacctaactttgatattggctgtaaacgtattttatttgccaataattattatccagcattacaagcaccgaataccacgcttattccacatggtctagttaaagtggaaggcaacaccgtggttgcagctaacggtgaaccccacgaagtagatgtgattatttggggtacaggttttgaagtgtctcatccacccattggtaaacgggtacataatgaaaaaggggaatgtctggcagaactctggaaagactcctcaccggaagcttacctaggaaccaacattgaaaatgtgccgaacgcttttcttatgctagggccaaatgtcttggtttatgactcattcattggtcttgctgaagcccaactgcaatatattgtagatggtttattgcaaatgaaagcgaaaggtattgttaaactttctgtaaaatcagaaataattaaaaagcataatgagcttgtacaaaagcatttacaaactacagtattcaatagtggtggttgtaagagttattaccttgatgcaaatggtcgcaactttgcagcatggccatggtcattgaaaaagcttaaacagcgtttacatcatttaaatttagaagaatatgaggtcatctatgaagctgatcttgtaaaagtaaaacctaaagttgaagaagtcgcaggttaa

SEQ ID NO: 44655 - DNA, 228 bp, Acinetobacter baumannii
atgatcaataaagtattaatagtgttatgcgtgagtattgtatttgtattagggtattgggcatatttagagacccaaaataaaagacatcaagagctcatgaggatcattcaagaagctgaaaaaaatttgcagacaatcgaacgtaatcctaaccgtgttagtcatagcaatttagcttcatataatttgcaaaaatatatcagtgataaaaaagtttttttctaa

SEQ ID NO: 44656 - DNA, 1320 bp, Acinetobacter baumannii
atggcggcgcccaattcttcggcagggtggttagagcgtttatttaagttaagcgacaataaaaccacgtttcgaacagaagttcttgctggtgtaactacatttttaacaatgtgctacatcatcattgtcaatccactcattttatctgaaaccggcatggatcatggcgccgtattcgttgcgacctgtttggcagcagcaatcggttgcttagtgatgggtattattgctaattatccaatcgccttggcacccggtatggggcttaatgcttattttacctattcggtttgtatgggcatgggagtgccatggcagacagctttagcagctgtttttgtttcaggtgtggtattccttgcaattagtttctttaaaattcgtgaggcgattgtcaatgcaatcccgatgtcgcttaaatttgcgataggtggtggtattggtttattccttgcgcttattgcgttaaaaaatgctggaatcattgtcgcaaaccaagcaacgttggtcggtttgggcgatattaaacaacctactgtattattagctttatttggctttttacttattgtaattttgcatcagcttaaagttcgtggtgcgattattattagtattttagtcgttacagcaattgccacagctttaggtctaaatgaatttaagggtgtggttggtgaaattccttcaattgcgccaacattcatgcaaatggactttgaagggttgtttaccgcaagtatggttggtgtcatctttgtattctttattgttgacttgtttgacagtacgggtactttggttggcgtttcacaccgtgcgggccttttacaagatggtaaattgccacgtttgaaaaaagcgctatttgctgactctactgcaatcgttgctggtgctgcattaggtacatcatcaactacgccatatattgaatcggcttcaggtgtagcagcaggtggacgtacaggtttaaccgcggtagttgtcgctttcttatttatttgctgtttattcttggcacctcttgctcaatctgtgccgggttttgcaacagcacccgctttattgttcattggtgtattgatgatccaagggatcactcacatcgattgggatgatattacagaagctgtaccagcctttttaacgattgtatttatgccatttgcatactcaattgcagatggtattgcaatgggctttatcagctatgcattagttaaattatttacgggtaaggcaaaaactgttccatacatggtgtggattattgctgccctttgggtatttaaatttatcgcctttggcggttaa

SEQ ID NO: 44657 - DNA, 999 bp, Acinetobacter baumannii
atgaatcaagtcgagctgattcaggccttaccaaaagccgagttgcatgtgcatattgaagggacctttgaacctgaattaatgtttgccattgcacagcgtaatcagattcagattccttacaaatctgttgaagaagtaaagcaagcttataactttcataatcttcaatcatttttagatatttactatgctggtgcaaatgttcttgttcatgagcaagatttctacgacctagcatgggcatattttgaaaagtgtgcagaagatcgtgtcgttcatacagaaatgttcttcgatccgcaaactcatactgaccgtggtattgcttttgcaaccgtgatcaatgggcttaaacgtgcatgtgctgacgcaaaagacaaatttggtatcagttctcagctgatcatgtgtttcttacgtcatttaagcgaagaagctgcatttgaaacgcttgagcaagctttaccgtttaaagaagatattatcgctgtaggacttgattcaagcgaagtaggccatccaccagctaaatttgaacgtgtttttgctaaagcgcgtgaagaaggcttcttaatcgtggctcacgcaggtgaggaaggtccacctgaatatgtatgggaagctttagatctactcaaagtaaaccgtattgaccacggcgtgcgttctgaagaagacgaacaactaatggctcgtttaattaatgaaaaaatgccattaacggtttgtcctttaagtaacttaaagctatgtgttgttaaggatatgaaagatcacaatatccgccgtcttttacaaaaaggcgtacacgtgactgttaactcagatgatccttcatatttcggtggttatatgaatgataatttctttgccattcaacaggcattagatttaaccaatgatgagttgaagcaactcgcaattaactcttttgaagcctctttcatttcagatgaagagaaacaaaagtggatttcagaaatccagaaaatctaa

SEQ ID NO: 44658 - DNA, 267 bp, Acinetobacter baumannii; identical to SEQ ID NO: 43415

SEQ ID NO: 44659 - DNA, 594 bp, Acinetobacter baumannii
atgaatctggctttattcgattttgatggcacgatcacccataatgataccttcagtttattccttaaattttctttgagtaaaaaaactcaaatattaggtggcatccgtcttgcaccttatatagcgggttataagcttgggtgggtaacggataaaacgatccgtactaagctctgccaagtgggatatatcggctatgatgcagcttctttgatatacaaaggacaagagtttgctaaaaaagtaattcctaactgtattcgtaaaaatgctttagaacgcattctctggcataaacaacagggagatcaggttgttgttgtatctgcttcattaagtgtttacttggaaatttggtgtaaatctttagatctggatgttatctgtaatcaacttgaaatagataatggtattttgacaggttattttattgatggtgattgtggttatttagaaaaagtaaatagaataaaaaataaatatgacttaactcaatatcctataatctatgcttatggtgatacacctaatgattatgcaatgttggagttagctcatagaaaatattataaatggcaagagattaattaa

SEQ ID NO: 44660 - DNA, 2367 bp, Acinetobacter baumannii
atgttcttactgaaaaatctcgtctcttcaatatcaaaagttactcaggacctgggtaatattgtatcaataacccctgtagtaaacacaggttcctctgttaatgtaaatgtttctgatatcaacattgctaatgtttcaacaacaagcttactttctaatgtgatttcaactgtaaccgatacagtttcaaatacaaccacagacttagtttctaatgtagttggtaccgtaacaggtactgtagggtctacaaacccaattgatactgtaaccaatattattggcggcgtaacgggtggcgttacaggcaaccctcttgaagttgttactgatattatcggcggagtaacgggtggtgttgtcggcggaacttctccaatctctccagtaatcgatgttgttcaaggcggcattgatattcttcaaggcgttgaaagcttaaaaactgaaattattaatacaggcattgaaactgtagctgatgcagttattggtgtattacctcaagctgagcatccagtttctgaaattgcagaccttggcacattaacttttgaaacttctcgtgacacagtcaatggtgctcttgaagttgtttctgatttagtcggtggtgatattcaaggcgctactgaatcagcgaccggtattctcgatacgcttattacaaatggcacaactgctacaggtattgttactggtgtggctggaagtgttactgatgttattggtggcgtaactggcggtgttgatggcaacccacttgaagtgattacagatattattggcggtgtaactggtggtgttgggggtgataaccctcttggcgtagtaactgatattatcggcggcgtaaccggtggcattattggtggcggtacatctcctatttcgccagttattgatgttgttcaaggtggcatcgatattcttcaaggcgttgaaagcctaaaaactgaaattattaacacgggtattgatacagtagccgacactattattggtgtattacctcaagctgagcatccagtttctgaaattgcagaccttggcacattaactttcgaaacgtctcgtgacacggtcaacggcgctcttgaagttgtttctgatttagtcggtggcgatattcaaggtgctactgaaaatgcaaccggtattctaggaacacttattcagaatggttcaacagcgactggtattgtgactgatattcttggtggcgtaacaggtactatcggcggcgtaactggtggtatcggtggtgacaatccgcttggtgtagtaactgacatcatcggtggtattactggtggtatcggcggtgataaccctcttggcgtagtaactgacattatcggcggcgttactggtggtattggcggtgacaatcctcttggcgtagtaactgacatcatcggtggtgttactggcggtatcggcggtgataatccgcttggtgtagtgactgacattatcggtggtgttactggcggtattggcggtgacaatcctcttggtgtagtaactgacatcatcggtggcgttactggtggcattattggtggtggaacatctcctatttctccagtaatcgatgttgttcaaggcggcatcgatattcttcaaggcgttgaaagcctaaaaaccgaaattattaacactggtattgatacagttgcggatacaattatcggtatccttccacaagcagaacatccagtttctgaaattgcagaccttggcacattaactttcgaaacgtctcgtgacacagtcaacggcgctcttgaagttgtttctgatttagtcggcggtgatattcaaggcgctactgaatcggctaccggtattctcgatacgcttattacaaatggtacaactgcaactggtttagtaactgaaatcattggcggagtaacaggaactattggtggcgtaactggcggagatagcccactaggattagtaactgatttacttggtggtttaactggtagcgtaggcggcgacagtccgcttggcgtagtcactgaccttctcggcggtttaactggtagcgtaggcggcgacagtccgcttggcgtagtcactgatctactcggcggtttaactggtggtgttactggcggtacagacaaccctatcggtatcgtaacggatatcgttggaagcttaacaggtggtgttactggtgaaggcagtttagatgttatttctaatttgctaggcggattaactggtggtagcttactcggtggtgtaacttctacagtatctagcgtaacaaatacaacgcatacgatcgtaccgacatcattacttactgataacttcctagaaaactctttcaatactgtttaa

SEQ ID NO: 44661 - DNA, 879 bp, Acinetobacter baumannii
atgatgaaatttacagatgccgatattcttaaactagacgaaacttttgcaaaaaaaggtattccatttcatgcacgtccacttcaagcagctagagagattcttggtaaaaacttttctataaatctattagaaaattctctagtagtagaaattaaagaagcatatgaacgtcttattcctgaagtaaaatatacttggcccggtatgggaacaggtttagttgcatctgttgatcaagttaaaaaagtaaatattgccgtcatatttggctcaataaatatttctatcgataaaggattaggtttttctaaccatcaagaatggagtaaatggtgtcgtggaagcctagaaattgctaaccgatctgctttcgcttttgctgatatgtatgatcttttctatggtatagatgaaagtgacaacccctctaaaacatattgggggctcgcatctgagcagttaaagttagtagcagaaagcctttgtcagacaggggcaattagcagtccaatactccaacctatctgtttaactgtcgaattagctattaaaggcactctcttatatcttgggattcctgagaaagacttaagaaactcaaaattatttggacataatcttgttaaacttgcacaacgaatgatccaagagaaaagtcatagagatgatcagttaatactaacgatgttaagtaaatttccggattatgtaagtgaccgctatcgtgaaacaaatttgactagattagaagttatttctttagctttgtcagctcaattcatagctgcctctgctgtacgacgaatttcaggaagggacattgccgagctagtagaaacctccataatagtcccacgtagtaattattttacttaa

SEQ ID NO: 44662 - DNA, 1071 bp, Acinetobacter baumannii
atgatcgatttaccaactaatcaaaaatcattagaagaagctttaaatttaagtgaagaaatacttgatggaatagagttgggaaaggcttctttagtaagttgcactttaaaagccagtcgattggctagactacttaatgactttgatcatcagagaatttttgcttttgaaagtagtggttaccctaatactcctaatggggtaagtcctgacatttggaaactttgtcaaaaagctaaaagagtatatatagtaaaagaaactaaggatggtgttgaaaaagaggaggaatatacaaggcttgactctcttggagctgtagagacagaaattgaagcattaaaagaaaatttacgagtagcctatgatcccaatatatcactgagttcagccaatccctcccagtttgtaggtttagggaaaacaggaaatgcagatgaaaggcagaaattgagaactcgtattttacaactttcgaaattattaaatgaaagacgagcctttctttatgattatgtcgctaataaaaattatgaattaaaatattcaaaaattacatcagatattttctctcgaattagaggaattgttgactcaaagataggagaccttatacctctttcagttcaaaagttttcatctgtttatgaaaatttaaattcggaaaatactgaagattggtcgaatgcagtacatagttgtcgtaggattttacaggatacagctgatgtaatttatccatctagagaagataaggttatagatttaggaaatggtaaatctaaaactattaagctaggaccagataattatatcaatagactaattgcattcgttgaggaaaatactgattctaaaagatttgaagagattgttggttctcatatgaaatatttaggggaaagattagacgcaattttccaagcagctcaaaaaggatcacatgatataatttcctctagagaagaagcagataggtatgtgatttatacttatttggttattggagatattctatctttagatgatggaattcagaacttaaaacatgaatcaatggtttcataa

SEQ ID NO: 44663 - DNA, 534 bp, Acinetobacter baumannii
atgattctttcagaaaagttagataatctgaaagatgtacaagaaagccttgtagcaaatagcacaaatcaagttattaagatagctcatgaatatgaaaataaccctatagtcctcagcgtcatccaacacttacgaaaagcttttgatcgaaaagattttagaaataaaactcacgactattatgatattacgcagcttatgaatgcggcacttcataaaattactaacacaaagcctcttcttgaaacactaagaaagtatccatctcagtacattgaagtatttgatgatgattcgatccttttccaagacgggaaatcaatcaactttcttaagaagtattgtcacgtaaagatttttaatgacaagaaacattacaagcataagaaaattaaattcttaaacctaacagcgtttgggtatagcttttatgatgtttcagttagacagaaaaaattcatcacgattaacaatataaggtataacgctcgtacaggttatgaagatgaattattagatgatatcaactga

SEQ ID NO: 44664 - DNA, 624 bp, Acinetobacter baumannii
atgtctacgcgaaaaccccgtcaggcacgagccaaagttactgtcgataccattattgaagcaggttttattgctgtagcattgcatggaccaagtggtaccaccacacgtcatattgcagaaattgcaggggtgagtgtggggtcactctatgagtattttaaaaacaaagaagaaatctacgatgcgatgaatcactactttgtgagtgaaattttagacatgattaaagaactaacccccacaattttagagttggagttagagcctgtcattgaaatgattttttatacgttcagtgatttattaaagaaaaataatgaccgttatttaaccgttttacgttatgcaggtgagttgcaatacgataaatatattccaaaaattgaacaggctttaatggaagtcatcatgaagtatatgatgcataatcctaaatatttaaaaattaataacttacctgtaattacctatatttgtattaatagcggtatttttaatgttgcaagacatcttattttacccaacccatttattagttttgatgaaatggtgcagggactaaccactatgattatgagttatatcaatactgaaatggcacgctcagaagatcaatcataa

SEQ ID NO: 44665 - DNA, 723 bp, Acinetobacter baumannii
atgtttgatatgcgtttatctcatgagcgtggtgcagcacatcatggctggttacagtcaaaacacacgttttcatttgcaaattattgggacccgaaacaagttggcttttcagatttacttgtaattaatgacgatacagttgctccatcaaaaggctttggtactcaccctcaccgtaacatggaaattatttcttatgtgcttgaaggtgcgttagaacataaagactcaatgggtacaggttcggttattgtgcctggtgatattcagttaatgagcgcaggccgtggggttgcacatagtgaatttaatcactctgctcaagaaaacgtgcacttcttgcaaatttgggtagttccaaatgaagtgaacacaacaccgggctatcaacaattgcatatttccgaggaagacaaacgcggcaaattgcacttgacgatttcaccaaaaggtggcgaaaaaactttatcgatcaaacaagacattaatatttattcaggtctttttgatggtgaagaaacagcagagtttgcaattcctgaaggtcgttatgtttacctacatgtggcaaaaggccgtattgatgtaaacggtaaaacctttaatacaggtgatgctgcgcgtattcgcgatggaggcaagttatcatttaccaatggtgacaatgctgaaattctgatttttgatatgcgtccggaagaaattccaaccatgccataa

SEQ ID NO: 44666 - DNA, 222 bp, Acinetobacter baumannii
gtgaatacagttttggcaaatatgccaaaagccattcaaattgatggctcacaaggtgaaggtggtggacagattttaagaaccgcccttaccctttcaatgattacaggtcaggcatttgaattaattaatatacgtgcaggacgtaaaaaaccagggttaatgcgtcaacatttgggagcctgtaaattattttgtgtaagttccattttttataaatga

SEQ ID NO: 44667 - DNA, 459 bp, Acinetobacter baumannii
atgaaactcgcagaagcacttttacttcgaagcaatcaacaaaaaaagctcgctttgttaaaacaacgaatcaatgcgaatgtattggtacaagacggtgatgaacctagtgaagatccaaatgagctgatcaaacaggtatttgctttaactcaggaaagtaatcaattgatttgtcgtattcattcgaccaatgcgcaagcaaaactggaagatggcaaaatattattatcactattaagtttacgcgatagttatgctgaacagcataagattttgatcgatgcgattgccaatacacatcgagaacctgatcgttatagctcacgtgaaattaagtggaagaaagtcattcctgtttctagcttacaaaagcaggcggatgatatcagtgcgaaactacgtgacttaaacgtaaaaattcaggctgctaactggcaaattgatctaatcaattaa

SEQ ID NO: 44668 - DNA, 384 bp, Acinetobacter baumannii
atggaaaaagattgttcagatattcaaagttatagaatcagggcaaatgaagaaaagcatctgattctacctgagcagccttattacatcatcttagtagtggaaagtactcaaattctgcctgaatggcgtaattggatttgtgagcagattgtctattccaaacattgtattcaagcgatggttacaggatatgagggttctatttgggatgatgtcctagatgaaaactatctagttctttataactatcaaccaccagtcgatcattgctttatgacaacttggcatgaagatgaaacattagaagacattactgaatgtgcaaaaattactatgcaattaaaagatatttcgaacttagtaattgtacatattgaataa

SEQ ID NO: 44669 - DNA, 1131 bp, Acinetobacter baumannii
atgtctgtcattgaagaaattaaccaacaagctcagtttgaacaaaagcagcaacaacgttcttatgaagttctgcaaaatgaaaaaagtatgccagtcaaaatgtggactaaaggggcaattattcctgctgccgtgggtgtagatattggttgtggaatgatggcaacccgtacaagcttaactgcttcagatttaccagataacttacatgctctacgtagtgaacttgaacgattaattccccatggaatgactaagcgcggacgtgatcgtgggtcatgggaaactccaccagaaatggtagatcaagcttggaccgatctggttgcagattttgaatacatttgcgcaaaacacccacgtttgaaaaatactaacaaccgtaagcatttgggaactttaggtactggaaaccattttgtcgaaatctgtttagatgagcatgatcatgtttggattatgttgcactcaggttctcgtggtgtaggaaatgctatcggtaatcattttattgaacttgcacgtaaagacatgcagaaacatttcattaatttgccaaataaagatttagcatacctagtagaaggaactgaacactttgatgattactggtttgcggtaggttgggctcaacgctttgcgatgaagaaccgagaaatcatgatgcaatctgcgattaaagccttggctactattgtaccaaagccttttcaagcacgtttggaagcagtgaactgtcaccataactatgtggaaaaggaagaacactacggtgaagaagtgatggtcacccgtaaaggtgcagtccgtgcgcgtctaggtgaatacggaattattccaggttcaatgggtgcgaaatcgtttattgtccgcgggcttggaaatcaggaggctttctgctcatgttcgcatggtgcaggccgtgttatgagccgtactgaagcaaaacgacgctttactgttgaagatcaaattgcccaaactgaaggtgtggaatgccgtaaagatgctgctgttattgatgaaattccatcagcatataaaccaattgaggatgtaatgaaagctcaaagagatttggttgaagtggtatataccttacgacaagtggtgtgtgttaagggttaa

SEQ ID NO: 44670 - DNA, 765 bp, Acinetobacter baumannii
atgtctgatgtagcgaacgtacaggtttatgtttgcccagtttcacgggtaccagacaaccatctcatattgagtcattatctcagctttctcaatgcggcagaaaagctgagatatgatcaatatcattctcatgctgcacgacttttcttaatttctcgtgtgttaatgaagtctgttttatcagataagttgggtatcttgcctcatgaggtcatcattcaattacaacctaacggcaaaccatttgtacgaggcaataaggctatttattttaatcttagtcactccgcggaccttattgtctttgctgtgacagaaaaaggagaaataggagtcgatgttgaaagaatgaaccatgagttcgaatggaggcgtgtagatagcgtgttagcgccaagtgaaattgaatggattcagcaaaatgaatggactaatccaactagtgtatatcaacgtttttttcaaatatggaccttaaaagaatcctatattaaatgtactggtgaaggaatgagccgtcatttaaagaagctcaactttcatgtatcacctgaacatatacaattttgcgatttaaccaataatgatgttcaaagaatcgagcagtatcattttaaaagttatatctataattatagttttatcttctccctatgtttacaacagagccattgcctagaaggctttaatatagattgttttcaattattaccttatatatctacacatcgaataactctagaaccttgcgaacataactaa

SEQ ID NO: 44671 - DNA, 222 bp, Acinetobacter baumannii
atggcatcagctgtagctgtaccgactacggttcccgccgtattttttattgttactgctgcattagcttcagttacacctataaccaccttacctgcagcatcaatagttgcagttaagcttgaaggtgccgtggtatccggcgcatcaactgtttttgctattgtggtattacccgatttgtctgccgccgttgcacttaaagtttcgccatttagataa

SEQ ID NO: 44672 - DNA, 222 bp, Acinetobacter baumannii
gtggcatcagctgtagctgtaccgactacggttcctgcagcattcttaactgttacaacagcattcgcttcagttatacctgtaaccactttacctgttgtgtcgatagttatagtcagacttgaaggtgcagtggtgtcgggtgcaactattgtttttggtactgtagcattacccgctttatctgatgctgttgcacttaagctttctccattcaagtaa

SEQ ID NO: 44673 - DNA, 159 bp, Acinetobacter baumannii
gtggcatcagctgtagctgtaccgactacggttcccgccgtattttttattgttactgctgcattagcttcagttacacctgtaaccgctttacccgcagaatcaataatcgctgttaaacctattggcgcagttttatcgtcagccaaaattgtttga

SEQ ID NO: 44674 - DNA, 204 bp, Acinetobacter baumannii
atgactgtatattttccatcactatcagactttgaagttccaataatttttccagatgaatctttgacggtgacagttgaattagcctctgtcaaacctgtaatagttttaccgttagaagaaatagcatgtgttaaagtaggagctgtaatatcagaagcgataagttcttgtttaacagtactattaccagcagtatcttga

SEQ ID NO: 44675 - DNA, 639 bp, Acinetobacter baumannii
atgtggcagttgtatgggcatgagtttttaatgctagctcttattcactttatggcggtgattttaccgggaccagattttgtgattacggtaagacaaagtgtacgttatggttatttgattggatgtctgactgcaattggtattggtgtcggaatttcagtacatgtgttttatacacttgttggtattggttttttgattcagcaaagcgaatggctcatgtcactgatcagaacagcgggggcagcttacttagtgtatttaggatggcagtgtttacgtagccagccgaataccactattgatattaatggccaaactgatagtgatgctccaagtttgtttaaagcttttacaatgggttttctcactaatgcattgaaccccaaagccactatcttttttctggcaatttttacgacgattgtaagtacgatcacgccaatgaaagttcaggttttttatggggtttggatgtgtatggttaacgctatttggtttatggtggtgagtgtactgtttgcacagcctatcgtacgtaaaagatttttggagtttggggtttattttgagcgggtgatgggattgttgttgattgggattgcattgagattgatttggggattgtttaattaa

SEQ ID NO: 44676 - DNA, 936 bp, Acinetobacter baumannii
atgagcacaaatcaaagtccggttctgttaaatgaaatggcgaccttcgttaaggttgtcgagtcggaaagcttttctgaaactgcacgccagcttggtacaacaccttctgctgtgagccgcgcgattgctcgattagaacgtgctttaggcacccgcttactctatcggaccacacggaaacttcgtttaagtgaaagtggacaacaggtctatcaacgctgtttagacatggtgaatgctgcgcaagcagtcatggaaagttcaggccaatttcatgtcgaaccagaaggcgttattcgtatgagtgttccgaaagcggtgggacattttatgattcatccgcatttacccgaatttttagaacgctacccgaaaattgatattcaaatgcttttagaagatcgctatgtagatctcattgatgatggagtcgatttagcacttcgaattacagagcaaccaccgggcggccttatgggtcgaaagctgattgatattgatcacttggtttgtgctacacctgaatatttgtccaagcacggtacaccgaaccatcctcatgatttaaagcagcatgaatgtatttacttgggcgaacaagccagtgactcaaagtggaaatttcaacaaggaaataaatcgataagtgtggctgtgcgtggccgctatgctgcaaatcatacgggtgtgcgtttgagtgctgcattacagcatttaggtattgcgagcttgccgtacttcgttgcacgccatgctctacaacaaggcaccttagtgcaggttttaccagattggtattttaaaacctattacagtggtgggctgtggttactctacccaccgacacggcatgtccagcctaaattgagtgtgttgattcaatatttggcagataaattagcagcagagccgactttatttaaattaaagtaa

SEQ ID NO: 44677 - DNA, 336 bp, Acinetobacter baumannii
atgacaaaattaaaatatacccctgaaatcagagaaagagcggttcaattattgattgaatctgaaaaagattatccatcgaattgggctgcgatcaccgctattgctcccaagataggttgtactcctgaaacactacgtgtttggtatcaaaaatatttagataaactaaatccagttaaagtacagcagctttcagatcaagaacgtattaaacaactcgaatgtgaaaataaagaactgcaacgcgccaatgagattctacgtaaagcagccgctttttcgcccaggcggagctcgaccgcccacacaaataatggtggattttatccataa

SEQ ID NO: 44678 - DNA, 903 bp, Acinetobacter baumannii
atggtggattttatccataataataaagagctgtacggagtcgaggcgatttgtagaattttaccgatcgcaccctcaacctattaccggactctagatctctgcgaaaatccagaacatcgagcaaagcgagatttacatgacttgcatcatgctgaggagattaaacgaatttggaaggaaagttcaggtcggtatggtgtacgtaaagtctggcaaaaactgaaacgtgaaggctatattattgcacgctgtactgttgctcgattaatgaaaaagctaggtatacaaggtgtttggcgaggtaagaacaaacaaaccacccgtagccgagatgaccaaaaacgagcagatgatttagtgaaacgtaattttactgctgatcatcctgaccaactgtgggtcagtgactttacgtatattcaaactcattcaggctgggtctataccgcctttattattgatgtgttctcacgagcaattgttggctggaaagtatctacacgaatgaatacagatatggtgctcgatgcattagagcaagcattgcatgatcgaggcatgccaaagaatgtgattcatcattccgacagaggtgtgcaatatctttccattcgttatacccatcgtttagaagcagcaaatttacgagcatcagtcggtacgactggtgattcatacgataatgctttggctgaaacggtgaatggcttatacaaaacagaggtgattgaatatctaaaagcagattggcaaggtttagcagatgtacaacttgcgacactaaactgggtagattggttcaataaaaagcgtgtacacagtgcactgggttatgtatcgccttttgagtttgaagcaatgtactatgataagattaacccgttaggtcaggtggcctaa

SEQ ID NO: 44679 - DNA, 147 bp, Acinetobacter baumannii
atgactattattctatattttttaaattcttttattaaacctacttacattcaacctcttttactcaagcagtcatttcttagagttctttctcatcctctgtttaaaagaactagctactatagagttcgaaaaatttttacttaa

SEQ ID NO: 44680 - DNA, 144 bp, Acinetobacter baumannii
atggtaagaatcttttgtgcagtaagtatggtgttggcaattgctatgggtatgagtgcttgccaagatcgtaattcaagaaatgacggcatgcatgaagcaagtgatccagctacatctcatgacatgaataaaaactcgtaa

SEQ ID NO: 44681 - DNA, 216 bp, Acinetobacter baumannii
atggctaaaagaaaatataagagtgataagtttcaagtacgtcgtattaaccgtcaatggtgggtacttgaaaaagatttagaaactaactgttacagcaagcatgaacaggtagctactaagacattagctaacaattatgctgacgattatatagagcagtattatatgaacctctacattcaacaacagttgaaaaaaccggaaaccgtataa

SEQ ID NO: 44682 - DNA, 465 bp, Acinetobacter baumannii
atgacaaagaagtatgcgcgttttttacctacaacagaatctttcactcttgaagattttccatattattggattactcaggtccatgctcaatatgttcaaaatattgataatgccctcaaaaaatatggcctagataattcacgtagacgtattatgcttgcactaagtagtaagcctcacgctagcgtatcagagctatctgatatgattatttcaaaaatgtcgactaccactaaaattgtttatcgcttaaaagatgaaggcttagttgaaacctattcttgtcaatcagatggtcgtattacacgtgtatatcttaccgaacgtggtacagaaatgattaataaaattaatgatctaacgagtgtagtacttgaacaatcattcgaaggtatcacccctcttcaactagaaaaaatgatggaaagcttaaaattgcttttaaaaaatctttctcgataa

SEQ ID NO: 44683 - DNA, 855 bp, Acinetobacter baumannii
atgaaacaaaaaagatattcttttccaattaccttaatggctcgattacttcatgtttcagtttcatgtttttatgattggctcaagagaggcgtgagcaaaagaacgattcaacgaaatcaacagacgatattggtgaaaatagcccatgaggagacaaagcagagctatggttatattcgattaaccaaatacttacaagctcagggcataaaaatgagtatgtacgctgtacgtcagataaaagcgctgaaccacctgtattgtaagcgacacaagcgttttaaaaggactacgaatagtgaccataatcgagcgatctatgaaaacctgctggagcaacaattctcaatgactagaccaaatcaagcatggtcaagtgatattacgtacatatggactgttgaaggatggctgtacttagcagcggtaaaagacctttacacgaagcaagtggttggctatagcttaaatgagcgcatgacaacacagcttgtttgtaatgcgctaaatatggctattcacaatcaaaaaccaaccaaagaactgattgtgcattcagacagaggaagtcaatattgcagccatgaatatcgaaatatacttgagcaatatggttttcaaggttcaatgagcaagcgcggagactgttacgataatgcaccgattgaaagcttttggggaatactgaaaaatgagttagtgcatcattacaactatcaaaccagagaagaagccaaagcagatattataaaatacattgaattattttataatcatcgaagaattcaaaagggtttgggttttaagacaccaaatcaaatggccgaagacttttataagttggctgcctag

SEQ ID NO: 44684 - DNA, 300 bp, Acinetobacter baumannii
atgagcaagaaacacaagacttacaccacagaatttaaagctgaagccatcaaattaattgaagccaatcaaggcaatgtctcggaaacagccagacaacttagcatttcaatgcaaactctttcaaattggaataccaaagcaaaggctggaactttagcaggtacaaaacagtattcacctgatctaaacgctctactcgaagaaaataaaaaactcaaacaacagctcaaaatagctgaaatggaacgtgaatttttaaaaaaggcagcagcgtactttgccaaagaaagtcagtaa

SEQ ID NO: 44685 - DNA, 606 bp, Acinetobacter baumannii
atgactttaggtatgcttaatcaatcacaagcagaacgcctaaaagatgctggtttagactattacaaccataaccttgatacatctcgcgagtattattcccacatcatcagcacacgtacttttgatgaccgtttgaatactttagattatgtacgtcaagctggtatgaaagtatgtagtggcggtattgttggtttaggtgaaagccgtgaagatcgcattggtttgttacatgagttagcaaccttacctattcatccagaatctgtgccaatcaacatgcttgttccaattgaaggtacaccattagctgatgttgaaaaactagatgttattgaatggattcgtactattgcggtagcacgtatcattatgccgcatagttatattcgtttatctgctggtcgtgaatctttaagtgactcagatcaagctttagcatttatggcgggtgcaaattctctgttctctggtgataaattacttacgacgccaaatgcaggtgaaggtaaagaccaagcattatttaataaattagggttaacagctgaaaagccaaaaccaactgtttctgatttatcagtagatgcgatgagtgcttaa

SEQ ID NO: 44686 - DNA, 213 bp, Acinetobacter baumannii
atgagtaaagactttaaagccttaacttatattgcagatgataatatagcagatacagtgacttggctcttacaccatcaagatgtttttgaatcttttcactttgatgtattgagccaagagttatcggttacccatgcggcaggtagggatattattcgagttggaacctttctgaatgctacttatggcatattagtcacttctgtataa

SEQ ID NO: 44687 - DNA, 1191 bp, Acinetobacter baumannii
atggctaaagccaagtttgaacgtaataaaccacacgtaaacgtgggtacaatcggtcacgttgaccatggtaaaacaactttaactgctgcgattgcaacaatttgtgcaaaaacttacggcggtgaagcgaaagattactcacaaatcgactcagcacctgaagaaaaagcacgtggtattacaattaatacatcacacgtagaatacgattctccaactcgtcactacgcacacgttgactgcccaggccacgccgactacgttaaaaacatgatcactggtgctgctcagatggacggcgcgatccttgtatgtgctgcaactgacggtccaatgccacaaactcgtgagcacatccttctttcacgtcaggtaggtgtaccttacatcatcgtattcttaaacaaatgcgaccttgttgatgacgaagaattacttgaattagtagaaatggaagtacgtgaacttctttctacttatgacttcccaggtgatgacactccagtaatccgtggttcagctcttgcagcgcttaacggtgaagctggtccttacggtgaagaatcagttcttgctcttgtagcagcacttgactcttacatcccagagccagagcgtgcaatcgacaaagcattcttgatgccaatcgaagacgtattctcaatttctggtcgtggtacagtagtaacaggccgtgttgaagctggtatcatcaaagttggtgaagaagtagagatcgttggtattaaagatacagttaaaacaactgtaactggcgtagaaatgttccgtaaacttcttgacgaaggccgtgcaggtgagaactgtggtatcttacttcgtggtactaagcgtgaagaagtacaacgtggtcaagtacttgctaaaccaggtacaatcaagccgcacactaaattcgacgcagaagtatacgtactttctaaagaagaaggtggtcgtcacactccattcttaaatggttaccgtccacagttctacttccgtacaactgacgtaactggtgcgatccagttgaaagaaggcgttgaaatggtaatgccaggtgacaacgttgaaatgtcagtagaattaatccacccaatcgcaatggacccaggtctacgttttgcgatccgtgaaggtggtcgtactgtaggtgctggtgttgttgctaaagtaactgcataa

SEQ ID NO: 44688 - DNA, 366 bp, Acinetobacter baumannii
atgctttttcgtggtcgtaaatttttttggggaatggcttgccttcaagcattaattgctactacagggcatgccgaaatagtgcttcatggtacacgtgtaatctatccatcagatgctcgagaagtaaacttacaactcagcaataacggtacagcgccttccttggttcaagcttggattgatgatggaaacgctaaatcaactcccgatgaagcgaatgtcccttttatcattacaccacctatttcaagagttgaaccttctaaagggcaaactttacgaattactgcactacctaatgcttctcaattaaaccaaaataagtcgcgactttaccaactgaagcacaattcgttaaattga

SEQ ID NO: 44689 - DNA, 537 bp, Acinetobacter baumannii
atgaaaaaatttatttttattgcggctagctctctttttaatattgcagcagcacaagcagctgatggtacgatcactattaatggtttagtaactgataatacgtgtacgattgatactggtgataaaaatctcactgtaaatttaccaacagtatcatctcaatctttgaaaaatgcgggcgatgttgctggtcgtacaccttttcaaatcaatttaacgaattgtgcttcagttggtaaagtcgcgacttattttgaaccaggcgcaacagttgattttaatactggtcgactattgaaccaagctacctctggtgcagctaccaatgtcaacatccaattattgggtagcaacaatgcagtaattcctgtaattgcgaaaggtgcttctggtgcacaagataactcacaatgggtaaatgtttctgctggggggaatgccgatcttaattattatgctgaatattatgcaactggagcatctacagcaggtactgtaacgtcacaagtgaaatacacgattatttatcaataa

SEQ ID NO: 44690 - DNA, 450 bp, Acinetobacter baumannii
atgtgcttccatttcagcagcaaacttaggaccttgggtcttttgcacagaagtgaagttttcaatgtccatggtgtccatgacctgaccaccaaagcgttcagccacgatacctgtgttaatgcctttacgtgccgcatagattgcagctgttgcacctgcaggtccaccaccaatcaccaatacatcaaacgcatctttggcattgagtgctgctgcgtctttttcagccgagttggtatcaagttttgccacaatctcttcaagggtcatacgaccttgaccaatgtgctcattgtcctggaataccatcggtacagccatgattttgcgttgttccacttcgtcttggaagaatgcaccatcaatcatggttgccgtggtgttcgggttataaatggcaatcaggttaagcgcctgtaccacgtccggacagttatgacagcttaa

SEQ ID NO: 44691 - DNA, 678 bp, Acinetobacter baumannii
ttgattggacaagaggcgattcattctaagttacacaatgaatataacgatgcacttaaagatgttgaataccctgtcgatttataccgtttcttgggcgaaaacttctttaaatatgtgtttttgaaattcccgcaaccgcttaaattatcgatgatggctggtattgagcattttacagcggtacttgccgaatacatgatgaaacacgaaaagaatttctactattcagatgatgcaaaaagtcgtgccttatggatgtggcatatgcttgaagaatctgagcataaagatattgcttatgacgtctatcaggttttaaacggtaattatccgttacgggcaacgggctttttaatggctttcattaccattttagggcttattccaacagcaacgttatttgtacctctactgcgtaagccaaaagaactgttgaccagaaaattctggaaagatgcacgtcgtggcgtcaacttaatttttagtccaaaagatggcgtatttggtagcaccattggtcagatttttgattacttacgtccagacttccatccaaatgaccatgacacgaccgaatatctggagtactacaaaaagaaattacttaacgagggcggtgcaattgcgccttactttgtgaaggaatttacaccaccagttcgtgcagtttcataa

SEQ ID NO: 44692 - DNA, 222 bp, Acinetobacter baumannii
gtggcatctgcggtagccgtaccaactacggttcctgcagcattcttaacggttacaacagcacccacctcagtcgtacctgtaaccactttacctgcagcatcaatcgttgcagttaagcttgaaggtgctgtggtatctggcgcaacaatagtttttggtgcggtagcattacctaatttatctgctgcagtagcacttaagctttcaccatttagataa

SEQ ID NO: 44693 - DNA, 237 bp, Acinetobacter baumannii
atgaaagctttgaaagagtggctcctacatgggtggtttattatttgtgaagatgaatctgatttatctgaaccgcttgccaatctgacctttagtctgagcgataagcttcacttaggtgaagtggaatatgtcgaaaagaaagagaattggtatgaggtttatgtattgcttaatgataatgaaggcatattgatgtgtgctgaaaaaacaggaggttttaacttggtaaactaa

SEQ ID NO: 44694 - DNA, 159 bp, Acinetobacter baumannii
atgaagaaatactttcctgagcttgatacagtttccgatcttcttgcatcaattcctcatccacaaatccagtccattgcacatgctattcgtatctgcaatgaccaagatacgcatgttctcactaaactacatgctgtagttggagttatgatctaa

SEQ ID NO: 44695 - DNA, 390 bp, Acinetobacter baumannii
gtggcttctgccgcgtcgtataccgcagcaccagaaatgagtgtctacaatgtaacgaaagcgggtgttttagcattatccgaaaccctttcagccgagcttcgcaaattcaatattaaagtcaatgtactttgcccgactttggtgcctaccaatatcattaaaaatggtcgtattccgggccgttattcaaaacttgcagaccatgcgctcatgaactacgcactcaccacaagtgatgatgtagccaaactgacacttaaccgtcttgatcaggatgagctttataccattcctcaaatcgatgcgaagttgttctggctgatgaaacgtgcatcaccaagtttgtataccaagtttcttggcacatcgtacaaattatttaaataa

SEQ ID NO: 44696 - DNA, 162 bp, Acinetobacter baumannii
atgtctgctgaaactgtgcctgtacctggcaatgaagtgttgcctgcagggtcagttgctgttgcagtcactgtatcgccatccaccaggttacccgggtttggtactgaccagctaccatctgttccagctaccacggttgcagttgtgccatcaggataa

SEQ ID NO: 44697 - DNA, 243 bp, Acinetobacter baumannii
gtgactactaaaaatgcagtagagttcatgactcaaaaatgcattactcctttcgatttacttcatcgacatcaacatggcgactggggtaatttaaatgaacctgaccttgaagcaaatgaacaggctttgattgaggatctccggattctctcaagctacaattttgacaaggagaaaatttgggttatcactgaagcagataggacattaacaacgattctattacctagtgattactaa

SEQ ID NO: 44698 - DNA, 222 bp, Acinetobacter baumannii
gtggcatctgcggtagccgtaccaactacggttcctgcagtatttttaatcgttacaacagcattggcttcagttacacctgtaaccactttacctgatgaatcaatcgttgtagttaaacttgaaggtgcagtagtgtcgggtgcaacaatggtttttggtgctgtggtattactcgatttgtccgcagccgttgcacttaaagtttcaccatttagataa

SEQ ID NO: 44699 - DNA, 903 bp, Acinetobacter baumannii
atgaaatcaacaattgaagagctggtcgcgtttatcgcaatcgttgatacaggctcttttgtcgcggcggcagaacatttaaaacaaacaccttcgggggtgagccgttctttaacacgcttggaatctaagttagatgtgaccttattagaacgaacgacacgaaaattaaaactcacacaagaagggcagcagtttctggtaaaggcccgtaaaatcttaaatgagctaaatgctgccgaagaagaactacaaagatctgatcaagatacttcaggtcttattcgtatcgactcggccacaccttttgttttacatgttgttgctccgctgatgcatgcttttcgcaagcaatatccccatattgaaattgagttaaatagtaatgatcaaattattgatctactacaacataaaaccgatgtcgcatttcgatttggtgaacttaatgattccagtatgcatgccaaattagtgtgcaaaagtcgcctgtatatggtcgctagccctgaatatttaaaccagactaattatcctcagcagccacaagaattaaacgaacatgaactgataggctttaccaagccagctcacttaaacacttggccgcttaagataggcaatgaatattttgtagctcaaccccatattaaagcttcaaatggtgaaactgtccgacagcttgcactacgtggacacggcattacatgcttatcagaatttatggtttggaaagatattgaagaagggcgattgattgcattatttgaagacaaaattgagcatcaatatcaaagcatccatgctgtgtattatcaacaagagcatctaccaaaacgaatccgtttattcattgaatttttggcagaacagttaaaagatggttttaaaaacgctctctaa

SEQ ID NO: 44700 - DNA, 3321 bp, Acinetobacter baumannii
atgctttttaatatatttagtgtcttggaaaaaatagggctaaatgctcagaaacgtgctatccacgtacaattttctaatgaactactcaatcatcaagtattcttacaacgtatagaaggccaacatcagctaaatggtggcctaatggcagaattgatctgcctttcaaccaatgcccaaattgcattgaagcaatttattggtgttcaagtcgctgttgatcaggtcactgattcggggcaattgttccgaactacaggtattgtgactgaggccagttatggacaaagtgatggcgctttaacgctttataagctgactatagaagatgcgacaaatttatggcacaaacgccgtaatagtcgtgtttttatgaataaaagtatcgtagaaattaccgaagttctatttaaagaatggcaagaaaaaagtccactgtttgctgcgagtttaagtcttgatttgggtgggttaagtcaaaactatgatattcgtccgttcactatgcagcacaatgagtctgactatgactttctcacacgtttgtggcgaagtgagggggttagttggctcattgatgaatcagagcttttcgtccctcattttactgcaccaatacaagctcaaaaactaaaattaattgatgacaataaccaataccaagctttagcgcgtcgtagtattcgctatcacagaagtagcgcaaccgaatatcaagatagtattacaggctttgttgcagtgcgaagtctgcaaccgactgccgtacatgtacagcgttggcagcccgatgcgttagcgcaagaagagggtaatggttcagttgttactacccatacacactcagataactttgattcggctactttaagtcttgagcaagcatggcacgtaagccccgcctggatgcaagatttaaaaggggaagatcaggcaaccgcttcaagcagtagccaattagaaaaattaaatcagcacttcactgacatgcatgcgagtcgggccaaatactttaaagcctacagtagtgtgcgcgatacccaagtcggctattggtttaatctacgcgaacaccctgaaattgatcagcatgaaggagcagatcaagagttcctaatcattgccaaaaatttctataaccaaaataacttacctaaagatttacatcagcaagttagccagttattaacccaaagtcgttgggatcaacatggttacgatgatatcgaacgtcaaagtaatgagctgacgttaatacgccgtcaaatcaaaacggcgcctgaatacaatccggaacagcatcgaccaattgcttacccacaaagagcgaaagtcgtgggacctgagggagaaactattcatgtcgatgaatggggacgcattaaagtacgttttctatttactcgtagtgatgatcatggccatgatggtggcgcaggtagtaatgacaatgataccgactcggcttgggtggatgtactgactccttgggcaggagaaggttatggtgcacgtttcttaccacgtattggtgaagtggtggtcattgacttctttgatggcaatatcgaccgtccatttgtgacgggtcgaatccatgaagcacagcgttcgccaactaaattcgatgtaaaagggcagcttcctgatactaaaaagctaagtggcatacgcagtcaggaggttaatggcagcgggtttaatcaattacgctttgatgacacaactgggcaaattagtacccaactacaaagtagtcatgcggcaacacagttgaatttaggtaatttaagccatcctaaagaacaagcgacaagccaaggccgtggtgaaggctttgagcttagaacagacgcttggggagctgtgcgggcgggtaaaggcatgctcattagtacctatgcacaagagcaagcgattgcagaccatttagaggccgcacaagcacaatccttactttcacaaggctatgaaagcatgaaaatgctcagtgaagttgcagccaagcaacaaactgatgctttgaatgtaattaatcgcttacccaaattcatccagtcgcttgagttaaaaaccacagggcaggcattaaatagtacggtaaacctattcaaagaaggtattaataacgatcctatccatgccctaaaagactgtggtggctttattcaagacattggtgcactaggaggaaacgcaaaaggcgttgtagatgaattcaattctttctttagcgatgccaaagatgcggtagaaaatttaaaagcattcatcgaaaacgttgaagaacatggccctgatattgttaaaggaaaactcgcaagtattaaagaccgaattcataaaaatccatttgaaagtattcaagaggtcgggaaagtcttagcaaatgtcgagactaaagactttgatttgatgagtacgtgtggaacttttagtaaaggcagtaaattggaagtgtcaccttctaaagcattgagttctttacaaggctttatggagggttatacccaaggtttagaaagcagttccgatactaaacagcaagaacaaggcaaaatctttagacaagccttgatgttattagcttcaccaaatggcattgccttgacgacacctgaaaatattattttacaagcgtcgcaagatattgccgaaagtgccagcggttctattaatttaagtgcgcaaaaaaatattattgggcacgcacaagacaaaatcagtttgttcgctgctcaaaaaggtttgcgtgcttatgcagcaaaaggaaagctcgaactacaagcacaagatgatgctattgaagcaattgcgaagaaggtcattaagctcatttctaccgaagaaaaaatcgagcttacgagtccaaaagaaattgtattaacggcaggtggttcacagctcaaaattaatgccaatggcgtattttcgacaacaggtggtaagtttgaaagtaaagctgggcagcatttgtttatgagtggagcaacagtaaatgctgagttaccaaaaatgccagaaacaggaatgtacagtatgagatttgatttaagtcaaatatttgatactaaaatattaaaaaatatggaatataaattaattaatcattctaagaaaattgaagctgtatatgagtttgagcaagaaagtagcgcaagagtttatagtgattctgttgataatgtagaactcgctttagtgccaggagtttatttaacagaaattaaagagttaatttctgaacaggaagctgagtcattagatgatgaagatattgatagctgtggttgtggagaagagcatgaacatgattga

SEQ ID NO: 44701 - DNA, 627 bp, Acinetobacter baumannii
atgaacatgattgaaattttacaaagtaagagatcacaattttatttacttgatattaatagcttaatcattttagctcttgctttttgtggagttattattagttcgactgtctatgcaaaagatatatttaatgttgaattaaaatgcaaagggaatgatcaagaatattgtgatattgtaaaaaattctgataataaaactactttcattttaagaaatatgagatatcctgaagttgataaagtaaatgaaaatatttttcatgcttatggtagttgtggttcaccatgtcaatatcatttttttataagtaaaatacaggaagatcaaactaaagaatttattgctttagataaaaaaaataattgtttaattgaaagtgattccaagaaaaatattatctatgctagaaagctatttaataaaaataaaaaaataatagctaatttgaaaaataaagaatttaataatgttccaatagatagcgctatatataattcatttcaagaaaaatcatattttgatgataaaggacaattacatttagtagcaatgttagcggatgtagataaaaatggtaatagtttgtattttaataaaataattaagaaaacttgtgagtaa

SEQ ID NO: 44702 - DNA, 2364 bp, Acinetobacter baumannii
atgagctatagcgaagattttaaaatatttgttgcaactattaatggtgaagctgaaagttgtagtgaaacttcatggaaagttattgcgcatacaatgagaaacagagttggtttcgcaaactggaaatcctggagcactattatccaaatcgttacaaaaacaggatatgatgcatacacccagaaaaattcgccttataaaagagcaaaaaaagctttagattcaggtgatatttcacctaaattaatgagtttgattaaagcagtagaacctatatttaatggaacagaacccgattttacaggcggtgttgtgtattattatagccctaaggcacaggcacaattacataaatctgatccttctaattacccttctttagttcctgattttgtagtaagtaaatcgaatcctactcaacaagttcaaataccagggactgaaaaggatgatatgcgttggtataaagtcttaacttcaatatttgatgtttcatttgttgataatgctggaaatccattagttggtgtgacagttgatgtagtatataacgataaaaaaccagtccctttattcaaggatttaattacagaccaaaaagggaagataaaaaaagttagggtttgtaactatatgggtgctaggtttaaggttaatggtgttttagtaaaagataagaataataaagagatctctttattaggtgatggtaaaaattatgcatcagttattgtagtaaataatgggaaaggaggtattaagtcgaaaacagatatacataaccaagagtctatccctggtcaaaagcaagaatctgtaaaaatagattctaaggctgaagtaaataatgaaaaaaaagcggaagtcagtgataataatactaaacaaaaaaatgttaattttagtattaaggtcatagatagtgaaaataaagcgattccaaatttttcttattttctcaaatataaaaatgcagaaaagaagcatagtgtaggggctaatggtattgaaaataacttagtagcattaagtggggaggagattacggttttaattagtgggctagactcaaaacaagaaattattcgttttacagcacaagaaggtatgggcgaaaagacgataaagcttaatttacatacttttaatattctttttagacataaagatacgaaaaaacctataacaaatttgaatttaattcaaaaatatagaaatcagataaagcaaaaaaagactgatggtaatggaaagataactgttagtgcaatgccaggattcgagctgaattataaattaagagatgaacggaacttattgactatcaaagttgataaaaataaatcgcttcgtgttatcgatgttgactcgtcagcaatagagcaagcatcaaaaaatataaagatagggactaaagttgtagaaatagctcaatctaaacaacccgttccttcctcaaaacagaagcacccagtggaaactcatgactctactcccaagagagatgaaaaagtaaaaattagtacagacgggcatccaaaaacattagttaatgataatggtgaaactgaatttatagtgtatacatatgatcagaaaactaatcaattatttagtggtggtaattattcgattgaatataaaggtaacaaaaaaagacattcaagcggtatacacggaatagggaaaaaaatacataagggagaaattggtcaaaagataaaaattacagcttcgagtggtggaaaggaatttattgctttcgatggtaatttaagcagagggatgaaagcttttgagttaaagatagatagatctgtcattcctagtgtgtcagatgtaataataagttttaaaggtgttaatgaacaatctagacaagctatcgtaagccagaaaacaaaaaatgtactagcttatttagctaaagaagcaaatatggataaactttatattacaagtacaataaggactccaagagctcaggcagaagcaatgtatattaaggcaacaaaatatgctaaaccaggagaggacgtaaaaaaagttaaagcagaatgtattgctaaagggcttggaaaagaggcaactattcaaaaaatggttgaaaaaattgttgagtttcaaaataaaggggtaagagtttcgaaacactgcgtttcagaagagcaatatagaaaaaataatattattgatttaggtacgaatagtaatggttttggaacaggaaatactttgaatagtgtaggaaaaagatttaaagctgtttgtgagaaagctttaaaagatggaattatttcgggttttatttcagcagatgtagcaggtgaaggtgctatgcacatagagattatacaatga

SEQ ID NO: 44703 - DNA, 618 bp, Acinetobacter baumannii
atgatgagcagattatttcttttatttgtaattagtttaatgtatgcatgtacaactgaggcggatcagcctaaatcaagtaacacaaaactttatttttcatatcgaatctgtgaaaaggcaggaaagtgtaagaattttacacctacaaaaaagatggataattatctctttaaaagacttgatcctgcatatgatgaattttatataaaagataataatggtaattttaccttatattataaaaatgtttatagtgaagatgttcaagttggatgggcagaagctaaagctgataaaaataatagtagtgagttgagtttaaatattgataaagttaacctagccttgggtgggattgattttataaaaaatggatatgcaactaaacaggctgaatcaaagaattttaaatcgggaatctattatttagctgataattatacgggtgctccatattatcaaaagcaaaaaatattttttaagaaaaatgctggagatttagtattggactgtaatagttatttgaataatccctctgtaaagaatgaatcttatggagttttttatggagtatgttctgaaggggaaaaagtatattttaagcaggtaaactga

SEQ ID NO: 44704 - DNA, 735 bp, Acinetobacter baumannii
gtgagaactagttttattaaattttataattttttattggtttccagcatatgtatttcctcaaatgctgcagattataaaccacaacagttagacgagaaaacaatatatagtaatagtgagcatgatctgaatagtatatattcagatataaaaagctatatcagtgataataaaaatgaagttaagtatctggtagatactcaacgttcttggttgaaagatagaaatttaaaatgtaagtttaaagggaaagaagcaggtagtgaaaactataaatgtttaagcgattttaataattctaaaataaaagatttgaaaaattcatatttggattttgatagtttagaaggaaacctaataaaaccatttaaatataaaaatggtattgtgaaaaaattggaaacaggtggatgttattgtagtgaaagtacagttaagattttaaaagacaaaatttatatatatcaagcttgtaatcaaggattaaaagagccacaaatatataatattgttggtaagaaaaaagatgagttttctgtagagtatcaaattgatactactaataataaagttccagaatttaatttggtatttgttactaacggtaaaaatgtttggaatatagttcctaaaatctttataaaagaagatttaataaatttaaattttggaattaattatacaacagataataatcttaaagagacaaaactagtatgttcagctgactga

SEQ ID NO: 44705 - DNA, 231 bp, Acinetobacter baumannii
atgtttaaattttttttaattggtattttagcttgggctaatgctgctaatgctgctaatgctgctaatgctgagtttaatatagaaaataatcaagatcagccagtaaatgtcaaattagggtatcagaatgttttaaattcttcctttatatatactgatgtcagcaaaaatgtagatttgaaaaaaatatcgttactgttccatatggcgaagttacactattactaa

SEQ ID NO: 44706 - DNA, 267 bp, Acinetobacter baumannii
atgaaatttacaaaattatcatctataaagtataataaaaatgataagtcctatcaaatagtatatgactttcaagaattaactgaagattttacttcaactggaaaagttaattatgagaagtttccaattcaatattctttttccttgattcttgataaaaataaaccttttttaattaaagatattgttgaaaagagaaagggtgagagaaatattttttcaaaaattgaaaataatgatatgtattcatattttttgaaatag

SEQ ID NO: 44707 - DNA, 672 bp, Acinetobacter baumannii
gtgatttataaaaaaatagtttttgtatttttagtaggttttagcttatctactattcaatatgtaattgaaggagcttatgcaaattcttttgaaatacagaaagtaaataatagccaatttattgaatctactgaaaaaattagaaaaataaaaaagggtttagataataaaatttatttattattagattctgatgagggctgtatagttagtgaaaaacttcttaataaagatatcgaaattatatataaagaggacgaaaaatttaaatatgatattgtgaatccaatattgaataaggatagtagtgattgtgtttcagaattagcttttgttacagatgagcctaattatttttataatattaataaaagaagtaaggagttagttcgtggttatggttttgaattaaataaggatcagattctatataaaaataataaaattagaggagttgatttgatagggaatggaattcctaatattgtaactgaatgtttttcaaatgaaggggcacattttaatattttgggagggcataataatgaagaaaaattgttacatcgttacacttacctagatatgaacttacaagcatcgtgtactgaaaatgaaaaaatatatagtaaaggtttgttagatttaagaaataagtatagagaaaattaa

SEQ ID NO: 44708 - DNA, 657 bp, Acinetobacter baumannii
atgaaggaaattgttgtttttgatttggatgggacattactctcgggtgactctacaaggacatggttaacagataaattgaaatctaatatttttagatttatcggagcacttattgttacacctatcgctttacctcttatgaaatttaagaaatataaatctaaaggtgcgtcattgtatttatggattgcaacgtatagcttgaacgaacaagaattagaatacagctttaaaaatttctctaagaatatcaatgaaactactttcagttcattatattggtttgagcaaggtatagccgaagttaaagatcatttagccaatggaagaattgtgtttattgccacggctgcaccagaaaagttagcaaaagttttactagattctattaatctaaatgtacaaatcattggtactcctttacaaaataaactaggaggatgggtaagtggaatacattgtagggctgaagaaaaagtaaaaagattgaataagcttgatatcaaacaaccttggtttgcaacatacagtgatgatattgaagatgacttacccattttgattggcgctaaattaccgtatttaattaacggggataacaacaaaattaaaaatattaaaatcaaaaatttaaaaatattaaattggttttaa

SEQ ID NO: 44709 - DNA, 357 bp, Acinetobacter baumannii
atgaaaaatttttgttttttattattcctagttctttctactaacacatttgcaaatacagataagtggtatggtacttatcattattatagttctgaagaactatcaggtggaaatgttgcgacgatagaatctgttttagcattaacacccaaaaagtgtgagtattctgttgctggctttcaagttgataaatcttatatatgcaaagtgaaagagaaaaataacgaactatatttctttaaagttcaaagtggtgaaaagttaggaaaagtagtctttaaggaaggaaaatattatctttattccgatgacgttttagatatcaaagataacctattttataaagataaataa

SEQ ID NO: 44710 - DNA, 651 bp, Acinetobacter baumannii
atgacaacgcctgtgtcatttcacccgcaagcatttatcgaactcgcattatcacgcggtgtgcttaaatttggtgagtttactttaaaatctggacgcgtgagtccttatttttttaatgcaggcctactcaacgatggtgaagctttatctcttttagcacaaggctatgccgataaattaacacaatgtgaaaatgttgatgtgatttttggaccagcttacaaaggtattccatttgtagctgcgactgctgttgctttatcgcaaacacataacaagagcgtgccatggggctttaaccgtaaagaagcaaaagatcacggtgaaggtggtgttttagttggtgctgcggttgaaggtaaaaaagtctggattattgatgacgtgattaccgcaggtactgctattcgcgaagtggtaacgattttgaaaaatgccggtgcaactattgcgggtgtgttggttgcactagatcgtcaagaacgtggtcaaggtgaactttctgcaattcaagaagttcaaaaagaattagaaattcctgtgcacgcactgattaccatgaaggacttaatggattatttagaagcgaaaggcgaaaaagaagcgctagcaaatatgcaggcttaccgcgaaaaatacgggatttga

SEQ ID NO: 44711 - DNA, 468 bp, Acinetobacter baumannii
atgaataaacaatttattgtaacttttttattattttttttatcgctatcaacagaggcaaaaatcattactctttcaattgatacatatcaagaattatcaaaacaacagcaaaatagtattaaagacaacctcaacaaaggatggatcagttatgctagagatgatacaaaaattcattatttgagttatcaactaattaaatctatttcagattccatcgtaatagccccagttaaaactacatcagtcaatctaggagatttaaactctatagggttatggcaatttgactgcaaaaataaaaaaatgatgttgttgtctacagcaacttattcaattacgaattctaaaatattttcaatagaagaagtagaatttccaaaagaagtaccagctattcctaattctatggcaaatagaattttagaaatggcatgtgttctgaactacataaaaaataattag

SEQ ID NO: 44712 - DNA, 1338 bp, Acinetobacter baumannii
gtgataatcaaaaaaattctcgaaaaatgggacatcattttggatatcgcaattattggcagtggaatggcaggacttgcagcagcaagaattctgaaagatgcaggacatacaatcacgatatttgaagcacttcctggccggggaatggacagtcatagcattgagttcgatggtgggattattgatgcaccattgcgtgttatgaacccgcatctatggaaaaatacactcagccttgctgcacatttaggcattaaaacctttccggttcgtacctatatgtcttgtagctggttatttgaagatcgtactgaaacatggttaaccacatctcgtagccgtattggtaatttcccaattatcaataaccgtaaaggtatccagcaatatggctggcgtctggtaaaagggatgctgcaattaaaaactgcgattcaccagttctttaaatctaaaaatcaagatattactctcgctgaatttattaatcagaacgatattgaagaagtattctggcatggtgtagttatgccggtgctttatacgatttgtacatgtaacccaaaaacaattggtgattggcctgcgaaaaaccttcttgagtttttgcgtcatttaactgatggtgacatgttgttgcgtatgaaaggcggtacacctgcatttgtagatagcttaattaaaggcattgatatccatagcggttcggcaattaaaaaagttgagctacaaggtgaaaaagtactggtcgaaaatgaaaaaggtgaccaaggtacatttgaccgcgttattgtggcgacaccgacatctaaacttgaagagttcttaaaccctgaacagtttgcagaagatatgaatctgcttaaacagttccgctttgaacaaggcgacttggttattcatacagatgcaacagtaatgccaccacgccgtaaagactggtcagtgctgagctatatgatggaccgtaagtttactcgtcagcagtttacagtttggatgaatgccgttgagccatcactagtaggtaaaaatcctgtattccaaacttggcgtccagtagttgatattgaccctaaaaaagtcatttcaaaagtgaccttaacgcgtgcagttgtagactcgcaaactattgctttaaacaaagagctacaacaacgtcacttagaaccaaaccgtaaagtattctactgtggttcatggtcatgtgatggtttgccaattttagagtcagcagtgacttctgcgatgcatattgctgaaattttgggtgcacctttaccattcgtgggattaaagcctaaggtcgaagttgcccctgaactcggttactaa

SEQ ID NO: 44713 - DNA, 888 bp, Acinetobacter baumannii
gtgaataatttaattattggaaccctatttgcactgtgcgcagcggctttaaatgcatctattggtgtaattagtaaattactcatgcacagtggtttaaacccgcaagacattgcctttttaaaaaccattatcgcctttttctttttaagtgtgtttttatttaaagtgccagttagccaaaagattgcatttattagcagcacgccaagtaaactcagcgtttttgctcaaattgctatctgtgcttttttaggtattttctcgctattcttctttgagaccattgcttataaccacggtgctgcggccaatgtcgtggtggtactcatggcttcggctgccatctctgccctattttttgggaggttcattttaaaagaaagcatctacattcattcgcttattggaacattattggcggttgctgggattagcattatttcgtggaaaggtgaaaatagtcttttaatgctgattaatgcttctattgccggtacgggttatggcctattttcggttttagtgaaaaagttcaaattaaacggcggcctgtttttgactaaatacttactgctgtttggtagtgtttatcttgcagttccgtttttagtaaacttgcatagcattaattttaatagtgacatcattttaggtttgattggtttagctgttctaccgaccatactcggctttttctgtaccactaaagcgttgtcttatatgagtgccgcaaaggtacaagtgaccgagctttcagaacctatttttgcagcgcttatggcttgggttttcattcatgaacaaccgactttatcgtttttatatggtgcaatcttcattatttcaggcatctttttaatgaacaaagcgccgaaatcaaactag

SEQ ID NO: 44714 - DNA, 690 bp, Acinetobacter baumannii
atgagagagtttttctttagtacacgcttttcaaaaaggcttggatctactgcaaatgaaattacagctcaattaaaaactttagagttgatggttaaagaaatttcggtaattgacccaatttttgcgaactggtatgtaaacaattctgatgagaatactactaaagcacctttagactaccctttcccttctgaaacggcacataagtatctttttaatcttagagattcagatcattttgaaagttttccattatggaatgggttagaagaaagtagtcaatttgcgagtctaagatatgattcgtttggcttgatgatgatatttaaaaaggttctaaatactgatcaaattattcagctatttcaggttttactaaaatatgctcattatgattacgtatacctaaatacctatttctttggtgatataaacatatttccacatagacttgagacgactgctgtttgctatgtgcctgttaagattgcagaagattacttaccccatctttataaaaaggttgaagtagagaaccaatataacagtggtactattcttgtgtttgatgaaaaatgggcagatgaaacagaagaattgaagaaaatagttcaagagaattcgattgcactcgttgagttgggtgttattcctgaaacagaattgccagaaggattttttgattaa

SEQ ID NO: 44715 - DNA, 639 bp, Acinetobacter baumannii
atgtggccgttaatattacgaggcgttgctgcggctggagctcgaactgctgcccctgctgcgggtgaagtaattgctgtacaaggtggtcgaacaattgcgaccgaagccgctaagggtatggctacaattgttttggcaaaagaagttagtaaagacataacaaaacaacagcgttgtaataaatgcgaaccctaccaactaggagttaaacaccagttaaaacgcccgatgggcaatgagattaatactgaatatcaactcaaaatcgcaaatctttcaagttaccctttaactttcaaagcttcagtaccttatcttgtaccaggtaataaaaaagaaaccacagatattcaagagtggcttgtaaacggagtatcttttgacggtttatggccaatggaatgtattttggtcgaagcaaaaggccgatatgctcaattccttgaccctaaaatgaaggaatttattaaaattggggtttttggcaagttagtgaaagaagcccgtagtcaaaaattagtacagagcagccttaaaacttcaaagttgacttggtacttctatgaacaagaagctaaaagacatttcgatacgattagcaatagaattgtgaccacaatatttatgcctttataa

SEQ ID NO: 44716 - DNA, 345 bp, Acinetobacter baumannii
atgattaagctagataaaaatcaaattgatagccttgaaaaagtacaagatagagaagaactttgtgaaaaaatttatctttacctcgttgataagaaagaatcattcaaagcatattctgttaattatgaacagctgaagtctaagatttacaagagctttgatttattggtttcgcttttaataactgacaatgaagtcatttctcaactcattgtatggaataccataatgaaaaaagatgttcttcagaacactggtattcaaaattttatatacggttctaatttacggggaaaagaccttttatcgaccttagaattttatgaattgagggataattaa

SEQ ID NO: 44717 - DNA, 498 bp, Acinetobacter baumannii
atgacttttaagaatcaaagtttagaaaattttattattaatcatcgtaaagatgggcaattatttctactggttgatggagcacaactcgaacacaaccaactatcccatattgaatatacatacggtgattgtatctatttatttaaaggtacttatgaggaagaagcttatcaatatggccctttattattcgatttaagtcagttaaaccttaaacaagtggaaagccaaattaagctcatgaaatcgaaagattcaatgattttgattaaaagcaaactagatattaagcaattaaaaaataagcttttggaaaaactttatattgaacttgatgacggtggtataggcattcttagatattatgatcctcgcgtattaaaccgactttcacttattttcaacagtgaacaacaaaagcaactactagaaggccttgattccctttcgtatatactcaatgacataagctatgagttgaaatacaatgattaa

SEQ ID NO: 44718 - DNA, 201 bp, Acinetobacter baumannii
atggctggcggttcccagattattatcaataaaaacggtattacacttattactccatcaaagtttgaagctaaagctggtcagcatctttttaagcctggtgctcaaataaatatgcctcagattgcccttccccaacctatttgtattgaatgtcttataaaagcagctaaagaaggtgctgggattgtaagaagatga

SEQ ID NO: 44719 - DNA, 645 bp, Acinetobacter baumannii
atgacttttattgttgcaattcaattaaacgatagtgttgtcgttgcgtcagataataagaaaattactattaaagaagatgggactatccagttttctaatgtaaagctatcgaaaatatttccttgggctcaaggagttattactggaacgggggaatatttagtcataagtcgatcagtgaatatatttaataatatcgaagggttattgcctcaatatttgcctgaatgtttagaaatatctaggagattaagagaatatgaaattggtaaggattactatcaagttgcgaacagtaaactcatgtattcaatgtataccaagactggtgcacaactttatcgtattgagacctttgatccaaaggataagtatcatgttaaggcagcagaacctagagatataactatttggttgttcaaaccctgtattgaaacaatttcttttgagttacgtgagctttatgttgatttaaaagaccgagcatattttaaaaatgataatgaatgggtgagctattatacgaaaagactagctccaatttttaaaaaacaaagccagcaggactatttaatgagccctagcttcgatatattttttcaaacaaaagacagctatataattgatcatattactaattga

SEQ ID NO: 44720 - DNA, 981 bp, Acinetobacter baumannii
atgaataacacttctcctattaatgaagaaccacaagaaattgttagtaaaaagctaacatggggtaaatatacttcaaatttaggctactttttaaaagatattcaagatataaatttatacatagaagacacagctactgaagcagagaacttctataaagcattattaaagaatattttaccagatctaaaagtaaataagattattggactaggtggtcgagataatgttttaatggcatgtgcaaaaaagaaaaaaaatgtaaaagaattatatattatagatggtgatctttactgttattatgcaaagcctatatctttagaaaacttatttattcataatgcttattgtgttgagaattatttaattgatgcctatgcaactttaacttttattgaagattctttagctataagctttgaagaagtattagagaaatgtgattgggattattttcattcacaaatgataaatacttttgagaatctttttgttctttatgcgatttgtcatcaattaaagcttcctataaagactattaaaagatttaatactaaagaatgggtagatcattctataaagaaaggttacaaacctccaaatttaacaactatttcaaatacttcaaaagagatagaagattatattattttacagataggtgaggctgaatttaaaaaaatatataatgaaataaatcaaagattaagtgttctagatgtacaaaaacgtttagattttatctctggaaaaaattatctaatccattttttaaggaacttcgttgcttccataaagtgtccaatgaacagtattactgatcaatcctttaaatatagattaattaagctctctaagcatcccgagttaaatgttttaaagtctgctatattaaaggtggtacacgagggcaaatattgtgccccccatactaatgatgatctaaatatgaatacgtttgtagcttcggcttaa

SEQ ID NO: 44721 - DNA, 1071 bp, Acinetobacter baumannii
atgaaattaatctctttcaaagctaaaaaagtttttggtatctttgattttaatatagactttaatcaagatattaaccttattattggtaaaaatggtactggtaaaactaccctcctaaaaataataattgcaatattttccaaagattatatatatttatctcaaataaattttgaatcaattgaattaaatttccaaaatgaaaataatgataatatatctatattacttgatgaatatataaaaaattccattgattatgatatagaactaataagttatagggtatcagcaaaagaactagattgtgaatatatagtttctattagagataagaaactctttgagttaattagacttccagaaaaattaagtgaagaagccttattaaatattgaaactcctatgttcttaggattagatagaagatttgttaacacacaaaaacaatttaaagattctgctaaaaactttttatttaattttgagggagagataaatacatttaaagatgagccattagaagcaattaaagagctaatttcaaccacagtttcaaaaaatagagctaaattatttagccaaaatacaaaactgagaaataacttattaaagatatttttagaagaaatccctaacgatttcaagattacggctgaacatctgcaaaatatttttagtgctcatgagaaatttataaaaattcaaggatcaataaaaaacttaatgttaaatgatcaggttattgaattaattaatcaaagattgcttgattattcattattaagttccgaattaagaaaaaagttcgaaaatatttcagcaattaatagtgatatatataaatataatccatctatatataccaatattatagaagaaatttctgaacaaattagagatggtctcaatgattatgttcgattaagtaaagtactggatgaattagaaaaatttcaagaaaaatataaagaaatttacaaaagaattaatctattcaataaattggttaatggtttttttgaaaatacaaataaaaaatttacatcagaggtaatggatctttaa

SEQ ID NO: 44722 - DNA, 234 bp, Acinetobacter baumannii
atgaaaaaagtagcagtaattttatcgggttgtggttatttagatggttctgaaattagagagtctgttttaaccctatttgctttagatacagtcaatattgaatatcaaatttttgcacctgatgagcctttgtttcatgtcattgaccatgtgagtggcgaaataaacatgactgagcggagaaatattttgcaagaagcaggacgaattgccccttcgagaaggctgtga

SEQ ID NO: 44723 - DNA, 813 bp, Acinetobacter baumannii
atgaagaatcttatttctttagctaaaaaaagcctagtcgtgcatagcaacttaaacctgtcttttgccgtctattcagcttaccaagagcaaaaaatcacaaacgttccgatttctaaacccttactcataattgtattaagtggatttaaagaacttggaaaaactgaaaatattaagtgtgttgctggttcttttatttttttagccaacagctccagcattgatatgcgtaatattccagatcaagaagaatatttcgctcttcttatcgagtttgattttgaagattttaatgatctacctcaaaatgctggcacttctcaaaactatgttcaaggccagctgaatcctcttttagaaagtgccctgcatcaatttatagatttctctttagttgcccctccttctgcatttaaatttagaaaaagagagcttttagaacttatttattattcgggctataccgccatcgctaaactcaacatgaataaaagcttgagtgaaaaagttcagactttgatttccgatcatttgtctacagaactcaccgctgaatttatcgcggctcaactttttatgagttcatcgacgctaagaagaaaactaaaaagcgaaggaaatagcattcaggacattcgtaatagagtaaggctgggacacggattacacttacttcaaaccaccaatagcagcattggaaacattgcttttgaatgtggctatcaatcccaatctcgatttactgaacaatttaaaaatttgtttggaattaccccacgtgaactacgtaaaaccaaaatgctcacttag

SEQ ID NO: 44724 - DNA, 1692 bp, Acinetobacter baumannii
atgaagtttttattaagttcgcaagatattcagaactataaatttatatggaatatttctaaagaaaactatgtgaaacaaaagagtagtatgcttctcatgtttttattagtgttgttttcagcattttttacaacattattaccttacttgctgaaaattattatcgattattctgcacatgaatataactttctgctcgatattcagtttccatttaatttcttatacctcatcgtatttgcctacgctatagcatggttagcgaatgagttgtgtaactggaccaaaaatatttttagcgcttatttgatggtcgatttcaaaggagcattaatttttgcgggcttaaaaaattatttaaatcttaaaaaagaagaacaagatcaaattgaggcaggagcagtaattagtgatcttacaagagggagttctgcttttggtgaggttaacctcacattgcttcttcatgtagggccaattatttttcaattggttatgattttcgcagttttattcacgaccattagtttactttttagtattagctttttagtggtagctattattatttttctagtttcatttcatataaataaaaaaagtagttcactatttgatgctatgtatcaaaaaaataatcaggtaaatagccatttgatacatcagatctcgaattcctatgaaattaaagtaaaaaatgcagtaccgtttcaattatcaaagtttaatgaaacattaaatttgtatatcaccacagccaaagataggaataagaaaataggactattgatgatttctcaattattcatgatcttcttattcttactcatgtttatgttgtttacagtatttctttccactgaaaagcaattgacccctggttcttttgtattgataagtacctatattattcaactcaccaatccgtttctggcggtttcccaaagtttgatgcgcttaaatggaaattttgttgctctagcaaaatatcggcagtactttaatttgaataaagagcaatatacatactccactgttaaagatacggaaattctctaccaatttataaatgctaaattttcattaggaaaaagaaacgtagatcattttaatttaacaatatcaaccaataaaacgtatgtcgtgattggtcaaacagggctaggtaaaacttctctgatgaattatttaatgggggtatatcagattcagtcaggccagcttttgtataaaaatattgatattagtcataatttttctaaacatatttttaatgaagtggtctatgttgcccagcaacctataattttcccttattctttaagagagaatctagtctataactctcaacatatatacgaagactcttatttactactgatgcttgagcagtttaacttatcgcatattttgaaaaagcatcagttaacactcgatgatgatctaactgaaatttataagaatttttcaggaggagaaaaacaaagaatttgtattcttcgaggtcttttagctcgtccacaactcatcatattagatgaaccgacagcagctttagatgtagatactgccaaaaatatacttgaatatattcagcaagttgttccatccataattatgattacacattcaccttatgcaatggagcttgcagatgaggtgattgatttagaaaaattattaaactaa

SEQ ID NO: 44725 - DNA, 564 bp, Acinetobacter baumannii
atgccatattcagatctctcatttcgcgcgttaagcgtactccataagtctcgatatctttttaataaacatggttttcataacgtaggagtagaccgcattgtgcgagaagcagaggtgccaaaagcttcgttttataactatttccactctaaagagcggcttattgaaatgtgcctacactttcaaaaagacgtcttaaaagaacaagtgcgctcaatcatttacatacaaaaagatttaatcttgcgtgaaaaactcaaaaagattttctttttacatactaatctggatggttattaccacttgctatttagggctatttttgaaattgaaaaactctaccccgcagcctatcaagtggttgtacaatatcggcattggttaactactgaagtttataaattgcttttaactgtgaagaaagatgttacgaaaagcgatagcgatatgtttttatttacattagatggtgccattattcagctgctagatgaaactaggggtgatacgagagaactgttatttacttatattttaaagggtatttttcttaaagattaa

SEQ ID NO: 44726 - DNA, 2289 bp, Acinetobacter baumannii
atgtcattgattagaacacgtaaaaaaattgtttcctctgcaatcgcctcatcgctctcgatgatagcaacaactgcgatggcgcaagaagcagtttcccaattaccaacaattcatactaaagcgactcaagaagaatctttaaaggttgatcaatcagcaaactctaaattcgtagctcctctcaaagacacaccaaaatcagtctctattctttctcaaaaattaattaaagatacaaactctaataccctactcgaagcgttacgttatgaacctggtattacattaggtgctggtgaaggcggtaccccgtttacagatatgccttacattcgtggttatagcggtcaatcttctatttatgtagatggtgttcgtaatacaacttctcagaatcgagatatgtttgctattgagcaagttgaagtgattaaaggatcttcttctgctcttggtggtggtggtagcgttgggggcagtattaacctcatccctaaagttgctcatgaaggtgatgtatatcaaggtagtgttcaaagcggtaccgacaactatcgtcatattcagttagatgcgaacaaagattttggtaacggtattgctggccgtgtagtaattatgggccacgaaaatgagaaagccggccaaagtaatggtgctgaatataaacgtgtaggtattgctccaagtattacttttggcttagatacagcaacacgcggaacactaagctactattatttacgtagcaatgatgaacctgatgcaggcattccttttaacaatgcaaacccagcaaaacctcctgttggggttacagtaacacctggtgatggtaagcctgttgatgtaaaagctggaacttattatggttggaaagcacgtgattttgacaaacgtgaaaaccatatcggtacctttaaattagaacatgactttaatgaaaacctgacattatcgaatatagcgacttacaacaaatctaaatcagattatgtttataccaacgcagatgactcaaaaggtaacatttatagaggtactgttgctcgtcgtgctttaagtcgtattctcaataccgatgcatatagtgatcaactttccctaagaggcaaatttaatactggttcattaaagcattcttttaatgtcggtactgaatggagtttccaagaaacagatcaaggtgtacatacttttactaatgctgctggtgaaaccacatcgaccattttagacagcaatattcaaaactgtacttcagctgctgctgtggcaaatggctggtgtacgagtttaaataatccaggcaatggtgccttcacagataagcgtggatctatcacagcacaatcgaccactcgtagtcacaatgtaggcatttatgctttagacagtattgaatttaatccacaatggttacttaacttaggtgtgcgttgggataaatttgaaactgagaaaaaatataataaggatgtagatggacgtactcctcataaagctggtgataaattagaaagcgatacagactacttctcttatcaagctggtttagtttttaaaccaacagaagatggcagtatttatttaagctatgctacgtcagcaaacccagtaggtgtgcttgctgagggtgatacaggttcagattctattagcgactcaggtactgcaagtgcgagtgcaaatgctctcaagccagaagaagcacgtactttcgagttaggtacaaaatgggacttatttaataaccgtgcgaacttaacagcagcagttttccgtactgaaaagcaaaatacacgtatccaaatcgaccctactacaactgccaatgcaggtaaaagtaaagttgatggatttgaaattagtctgaatgggaaaattaccgataagtgggatgtttctacaggctatagctatctagatagtgaaatcaccgaagcagcctataatgcagttgctcaagaaggtaaaccattaccatttgtagcgaaaaacagtgctaccctatggtctacttaccgagtaatgcctcaattgactctaggtgctggtgttgaatatcgcgatcaagtttttgtgaacacaactgctccgaaatatctgccaacctataccatttacaatgctatggctaaatatgatgttaataagaatgtgaatttgcagcttaacatcaacaatatctctgataagcgctatttcacaagtgcgcatgcagctcactacgcatttgaaggtaatggccgtaatgctgtcttagcgattaactttaaatactaa

SEQ ID NO: 44727 - DNA, 684 bp, Acinetobacter baumannii
gtgattcatcatatccccaatgttttaagcaaagagcaaattgccgattttcgtaagctcatggaagaagccaattgggtaggtggaaaagtgactgctggcaccttgtctgcttcggtgaaaagaaatcagcaactctcagaacaagacccccttacccatcatttaagtgatatcgtcatcaaagcaatttggcaaaatcctttgtttcaggccgcggccctgcctcacaaaattattccaccactttttaatcgttatgatgaacatgaaagttttggttttcatgtagacaactcaattcgccttattcgtggtacagcggaacaaattcgtacagatttatcatgtacattatttttaagtgagccagatgaatatgaaggtggtgatctggttattgaagatacctatggttatcacgaagttaaattacctgctggtgacgtagttctctacccatctaccagtctacatgaagtgagtagtattacagcaggtactcgttttgcttcctttttctgggttcaaagtttagtacgtgacgatagtaaacggcatcttttatttagtttagatgaaagtattcgtgaactccgtaaatcacatggtgatagctattctgaagtcatgaaattaactaatatttatcacaacctaatccgtatgtggtcagaactgtaa

SEQ ID NO: 44728 - DNA, 435 bp, Acinetobacter baumannii
atgttaaatttcacgattcaaattacttcttataaaaatggctatacacaaaaggatttcatgaaagagttagaacaaataaattcagcagcttatgggatgtatgagtctgattactttttcccgtttatcacaacccatctacaacgtgaaacgatcttgatgctaccaacactcagaaagaatacagataccgaaatcagtcatatacaaataaagtcaaacaataaatttcattttcaactccctctttattcccaagagcatttttaccctatctcttatattgacttcaatctcccttcaatttttggaggtgtaacttttgattgcaaaagtaagctcccacaacaaacatctttgatcgagacagaaaactatacagcccgaatcatttttaataggaaaaaatgttctattcaatcatattcataa

SEQ ID NO: 44729 - DNA, 291 bp, Acinetobacter baumannii
ttgaagttcgttcatgggtccctgcacagctgcctcttaaaagatctattcattgttgagaaccaaaattttttaaaaaatgatggtgatgaagaagagggggttgccgtcgctttggttgatgttgattctattcatgtttggcgaaacgatgagattaaacctgcctgtgcctctggttggagtgaaggatattttgcttgggttctaagtaatgtgcgtcctatgaagcgacagttgaaagttccggctaaacgtaaaatttatcaagtctctctggatttaccataa

SEQ ID NO: 44730 - DNA, 237 bp, Acinetobacter baumannii
atgactaaaaataagcgcattaaaagtaaaggtagcaatggtttctttcaagaatttatagatcagctcattaccgctatttttggtgagttacttatttatatcattgctttactgtttatgagtgcacttggcggaattattttcgctgctatatgtttcagttggggcgttctatttttactactacctttcgcggctttgatttatatcctggttaaaaaatatagccattaa

SEQ ID NO: 44731 - DNA, 597 bp, Acinetobacter baumannii
atgagcgtgaagaatcaatattcaaagataattaaaatcggtttatatatatttataactttagctatcttagttctagttacatttatttggtttaaaccgatacgtgttattttcgcccatcacctttcattgttacattgtgatggtcaagtctgtgtagatgatccaaagacacagcctcttgcaaagacactttataatcaggcattaaaagagacccaaaataaagtaggtgcttttcatcaacaacccactatggttttttgctcaactccacaatgtgcaaatacctttggtatggaaaaagcagccgctaaagcggttggtaatttggggttattggttgcaccgcgaggctggaaagatttctatatcactcatgagcttattcatcatcgacaagcagaagaatggggaaatatagcaatgctaactaaacctaaatggctggtagaaggcatggcttatagcttaagtgatgacccacgacctactttatcggttccttttcaacaatggcgagctcaattcaagctttggcatcaacaaaatcctgattcaaatatttggcatgccacagagaaagttaaataa

SEQ ID NO: 44732 - DNA, 2295 bp, Acinetobacter baumannii
atgtcaaacatgcaactcgacactctaagacgcattgtccaagagattaatgcgtccgtgagtttgcatgaatcgttagacattatggtcaatcaggttgctgaggccatgaaagtggatgtttgctctatttatttactcgatgaacgcaatcaacgttatgtattgatggcctcaaaaggcttaaatccagaatctgttgggcatgtttcattgcagttaggtgaaggcttggtgggtctggttgggcaacgtgaagaaattgttaaccttgacaatgcgccaaagcacgaacgctttttgtatttacctgaaacgggcgaagaaatttataactcattccttggcgtacccgtcatgtatcgccgtaaggttatgggtgttttagttgtccaaaatcgacttcctcaagattttagtgaagcagccgaatcatttttagtcaccttatgtgcacagctctcaggtgttattgcacatgcgcatgcggttggaaatattgatgtatttcgtaagccaagcaatgggcctgcctataagacctttcaaggcgtttccggtgcaggtggggtggctttaggtcgcgctattattttatatccgcctgccgacttaggttcagtacctgaccgcgaagcagaagatatcagcgatgaactccgcattttagatcaagctatttcatcggtacgttcagaaattcgttctttagatgaaaaaatgcatgactcgctcatggcagaagaacgtgctttgtttagcgtattcttaagaatgctagatgaaaatgccttaccggcagaaattaaagaactgatccgcgatgggcattgggcacaaggtgcggtgcgccgtgtaattgaaaaacacactgccctatttgcacaaatggaggacgattatcttcgtgaacgcgtttctgaccttaaagacttagggcggcgtattctagcgtacttacaagaagaagattcgagccaccgtgaacttagcccagacagtattttaattggtgaagaaattagtaccgctgcgctagtagaattaccagtagataatatcgcagctattgtgacgtcagaaggcgcagccaattcgcatatggtgattgttgcccgtgcattagggattccaacggtggtcggcgtaaccgaactgcctgtaaatacgcttgatgatgcagaaatgattgtggatgcctatcagggccgtgtttttgtaaaccctccacgtcgtttacgtcaacgttataaagaaattcaaaaagaagacgagcaaatcgcaaaagatctcaaacaatatgagaccaaagaagcgattacaccagacggtgtctctgttcaactgtttgtgaacacgggccttatgattgatgtagtccgcggtgtacaacgtggcgctcaaggtgtgggtttgtaccgtagtgaaattccattcatgttacgggaacgtttcccaggtgaagaagaacaacgtgccatctatcgccaacagttgagccactttgccaataagccggtagtcatgcgtaccctcgatattggcgccgataaagacttaccttacttcagtattgaagaagagaactcggcattagggtggcgcggtattcgtttcacgctcgatcatccggagattttctcagcacaaatccgggcaatgctcaaagccagtattggtttaaataatttgcatatcctattgccaatggtaacgacagtaagtgaagtcgaagaagtactttatttacttgagcgtgactggattgcagtgcaagaagaagaacaagttaaaattaccaaaccaaaaatcgggattatggttgaggtaccgagtgtactgctacaaattgatgagttcgccgaacttgtcgatttcttctcggttggttcaaatgacttaactcaatacttacttgctgtggaccgtaataatccgcatgtcgcaaacgtctattcacacttccatccgtctattttgcgggctttaactcgactcgtgaaggaatgccataaataccaaaaaccggtaagtatttgtggtgagatggcgggtgatccgttatcggcaatcttactgatggccatgggcttcaataccctttcgatgagttcaagtaacatcttgcgcgtccgaaaagcaatttgccatgtcccaatgtcagatgcccaaaagctgcttgatgatgtcatgaaaatgaataatccgcttattgtaaaaagctggcttgagtactactttaaaactcacggtctagccgatatggttaaatctaaccgccttgtaagcgtataa

SEQ ID NO: 44733 - DNA, 2157 bp, Acinetobacter baumannii
atgtcaaacgaatcaaaatgtcctttttcaggtcataactcaaaaccgcaagtaacagtcggtggtggcacggctaatttacactggtggccaaatcaattacgtgttgacttacttaatcaacattcagaacgctctaatccactcggtaaagattttaattaccgtcaagaatttaaaaaactcgactactacgcacttaaagccgatatcaaaaatgtattaaccgattcccaagactggtggccagccgactggggaaattatacgggcttatttatccgtttagcgtggcatgctgccggtacatatcgtatgggcgatggccgtggtggtgccggtcgtggtcaacaacgttttgctccattaaatagttggcctgacaatgcaagtttagataaagcacgccgtttactatggccagttaaacaaaaatacggtcaaaaaatatcttgggccgatttatttattcttgccgggaacatcgcacttgagtcttctggtttccgtacctttggttttggtgccggtcgtgaagatgtttgggaaccagacaacgatgtaaactggggcgatgaaaaagaatggttagctcatcgtaactctgaagcattggcgggcagtaatcttgctgcaaccgaaatgggcctaatttatgtgaaccctgaaggaccacaagcgagtggagacccacgatcagcagcaccgtttattcgtgccactttcggcaacatggcaatggatgatgaagaaattgttgccttgattgctggcggtcatactttaggtaaaactcacggcgctgcctctgctgaccatgtccaagcagacccagaaggtgcaccaattgaacaaatgggctttggttgggcaaacagctatggcacaggtgtcggtaaagatgcgatcacttcaggtttagaagttatttggtcacaaacgccaacacaatggagcaattacttctttgaaaaccttttcaaatacgaatgggtacaagaacgttcacctgctggcgcaattcaatgggtagcggcagatgctgaagccatcattccagatcctttcgacccatcaattaaacgtaagccaaccatgcttactacagatttgaccttacgttttgaccctgagtttgaaaagatctctcgtcgtttccttaacgatccacaagcctttgccaatgcttttgctcgtgcttggtttaaattaactcaccgtgatatgggaccaaaagcacgttatttaggtccagaagttcctgctgaagatttaatttggcaagatccattacctgctgctagcgctacaccatcttctgcaagcattgctgatgcaaaagcaaaaatcgttgctctagggttatctgcaggtgagttggtttctcttgcatgggcaacagcatcaacattccgtggtggagacaaacgtggtggtgcaaacggtgcacgtattgctttatcaccacaacgtgagtgggaagtaaacaaaaaagctgttgagactttaactcaaattgaagaactcaaggcatcaacccaattgtcattggcggatttaatcgtgttagctggtaatgttggtgtagagcaagctgctcaagcagcaggtttcaatattaccgttccgtttgcccctggtcgtgttgacgcattacaaagtcaaaccgatgttgaatcattccaattactgctcggtcttgctgacggtttcagaaattggaaaaaacagggagtcaacacaccagctgaagtcttattaattgataaagcacaacaactgactttgactgcaccagagttaactgcattgattggtggtttacgtgtactgggcactaactgggatggttctcaacatggtgtcttcactcagcaagttggtgtactcagcacagacttcttcacaaacttactcgacatgtcgaatgtatgggcacctgttgattcaacaagtgaagtatttgaaggtaaagaccgtaaatcaggcacagtgaaatttaccgcaacacgtaatgatttagtctttggttcgaattctatcttacgtgcattagcagaggtttatgctcaggcagatggtaaagaaaaatttgttcaagactttgttgctgcatggactaaagtcatgaatcttgaccgttttgacttagcttaa

SEQ ID NO: 44734 - DNA, 510 bp, Acinetobacter baumannii
atggctgcacttaaagaacaggtaaaaatatttattgttcaagcgcttgcctgcatggatacccctcaacaggtagctaatgctgtcaagcaagaatttaacattgagattgatcgaaaacaggtacaactttatgacccgacaaaagcggcaggaaagaatttaagtaagaaatataaagacctttttcataaaacccgagaggactttaaaaagaatgtttatgacatccctttagctaataaagcctatcggcttaaagaacttcagaagatttatgaagactggaagaacaacaggcttatgaagcaaggggttattaaacaggttcgggaagaaatgcagggttatgacctgatgttattaaatcttgagttaaagcaacttgagattgaaaagttaagagagggtgaaggtgatgaagatccaacaccagtcaaggtaactattcaagttgtggatgcgagtaaaaaagatgccgaacatcaatccgacactgggtggttctga

SEQ ID NO: 44735 - DNA, 642 bp, Acinetobacter baumannii
atggagcagatcagaccatttccaccgactgattttattgatcaagcagatgaagaagaagcaataagactaacaccagctccaggcctaaagaaatgggttgtggccaactacttaacgataggtgggcctctttataaccccgatcacgatcacatagctgagctgcttcacgataatgaagaatttttagcatttgcttgggcctcttctgcatataaaagcaagcaagctatggtgttgggccagtgcgaaaaagtcatgttcaatgttggtggctggcgtaaagctagacaagagcaacagatgcgcgactggtttggagcggttccaacttacttaattacggtcgatgcttcattttgtgagcgggccaatgatacagaattctgctatttgattgagcacgagttgtatcacattggcgttatgaaagacgaagatggtgagatcctttatagcgataatacggggctacctaaacattatttagctggtcatgatgttgaagagtttattggcgtagttaaacgttatggaccaagcaaaaatgttaagcgacttattgaagtcgcaaaaaatccgccgtttgtttcgaatcttgatatttcaaaatgctgcggaaactgcgtaatcaactga

SEQ ID NO: 44736 - DNA, 435 bp, Acinetobacter baumannii
atggattctacagaatacttttggcttactcggaaaaaagaacctaaaactaaacctaaaagccggccattgcctaaggcgaagcaaaaatatctcgaggctgaggcaacacttaaggaagaacttgaggatttggcgattggttttgaaagtaagtttcaaccgatccataccaaacactggcgctttgattttcatattgtgaaattgcgtttgctcattgaaattgagggtggtccctggtctggtgggcgtggtggaaagctgtcaaataaagcatggagtcttgatcgttatgatcaagctgaagagatgggttataaaatagagcgctttcatccagattctattttgtcgggatatgtcatcaactggataaaaagtgaattagcgagaattgaagatggagcagatcagaccatttccaccgactga

SEQ ID NO: 44737 - DNA, 456 bp, Acinetobacter baumannii
atgccacagtatctcatgtttgcggaaaatatttataacaaaattaaagatgaggaattgttttcacatgactgtattgaaaatatgaacttacttatgacatgtatacgcagagaaattgagggaacagaatttaaattaaaatataattttattgattttgttgaattgtttagtagaccattagatgaatgtaaagtaaaaatagatgtgagtttgattcctcctcataattcagaaggtgagtatattttatggttagctggattaatcgaaaaaattacagaaggtggacctaaaccacctccgcctataaagaagtttattccagagtatatgagcttgaaatttgaattagattttttacccttaaatgaggaaaaaattcaaaacgaaggtaaagaaattacggattactttaattcaaagctttataaggcaacttttaagaagtaa

SEQ ID NO: 44738 - DNA, 237 bp, Acinetobacter baumannii
atgacaattatcacattgctcgatgttaagacgaagaagaaggtgatagttcggtccgtaatagacccaatagcaagaatagacaaaaaagggaatatacaaattattcaaattcataaatggctatatgatgaatctggagatttcgttgatgaagacttatatgaggcactcaacaatggagaagttggaatatacataactttgcagtatatgatcattaatattgaaaattaa

SEQ ID NO: 44739 - DNA, 345 bp, Acinetobacter baumannii
atgaataagaatgtagagctaataaattacattgatgtagctgagacagtttacgaacgggtatatgaaaataataaaatttcaaataatttgattgttaatctcaatcgcattatggctgagataaagaatcaagctgcagaaaaaagactcaaattgaagtacagctcaatagactttgaacattgtttaagtttgcctttagctgatcgcaaaataaaagtagatttaagccttatacctcattttgaagatcgtgaagaaagtattttgtggttaactaactttattggaaaaatttgtgagcccagaaagatgcaaagacagaaaaaaaaacttcattaa

SEQ ID NO: 44740 - DNA, 255 bp, Acinetobacter baumannii
atgaaaacatacactgtaaaactatatgaaggcgttagtcgggagaaagttaatgaaactttgaaatactaccctgattattttggtaaaatatcaataattacaaatgtaattaataataaattgcaattaacactaaaagcatttgaaggaatcgacgttataactgccaatgatctaatgattaaaatcgttgaacgtttaaaagcttctcaattagtagaaaagcataatttagacttgttgactgtctag

SEQ ID NO: 44741 - DNA, 402 bp, Acinetobacter baumannii
atgtcatcagtcagcattgctgaataccgcaagttatttccgataaagaaaaataaaaagcggcgttcagcaaagcaagttgccagacaaccaagtgtgggtgaaatggttctggcaacgcatttaagagcatgcaagatcggttttgaacaggaatataagttccatccaaaacgcaaatggagagctgattttctggttactggtacaaaaattttgattgaggttgaaggcgggatctggagtggaggcagtcatacaaggggcaaaggctatataggggatatggagaaatacaactccgcagcaatgatgggttttacagttttacggttcagcacagagcaagtgaaagcaggcgtggcgattaaacaaattgagcaattggtaggtgaaaaatga

SEQ ID NO: 44742 - DNA, 354 bp, Acinetobacter baumannii
atgaaagcatctaaattgattagagataaaggactgcaatacgcgaaggaaatcgtagattcagcaccttctaacgcaactgaatggaatgaaggtttcgagttccaatgtggtcaaagtgtagagattagcaaggctgatcgagaaaagtattttgtagacatttccgaactcaagcgcctgctggaatcgattgatcaaattaatgcgtttgatggcggtattaaagaagctaaagagattctaagccgcatcaataaaaatggcagcaagtacgcgacattatttgaaagacctgcattagagcaagccatccgcgaccacgaatcaatatacggaggcggtcatgtttga

SEQ ID NO: 44743 - DNA, 351 bp, Acinetobacter baumannii
atgcctccaccttcacatcttttcttctgtaaccatggtaagggtaaaacccaagcttggtaccaagaaccaattttattagctcagaaaaatgagcaaaaagtgcatataccagtttcaaatgacgaagcacaaaagcatctccaatcattgatggaacgattaaaaatcaatggtcgtaaacctgcaccagtacaaaaacttcaggcaaaagaaaaagagcctgagcttgcaaaggaattaggtccagatcctttcgataatccgcaggaatacgcagagatgtgccgccgtgaaggtatgcctattccaagaaatattctgcagttaattgaaggggcgaatgcatga

SEQ ID NO: 44744 - DNA, 1701 bp, Acinetobacter baumannii
atgaaaatgtcacgtcgtgcatacgcagaaatgtttggtccaacggttggtgatcgtattcgtttggctgatacagcgctttttattgaagttgagcaagacttaacgacatatggtgaagaagttaaatttggtggcggaaaagttattcgtgacgggatgggacaatctcagcttctagctgatgaagttgccgatacagtcataaccaatgctttaattgtggattggtggggaattgttaaagccgatgtgggcttaaagaatggacgaatctggaaaatagggaaagctggaaaccctgatattcaacccgacattaccattcctttaggtgctgcgacagaagtaattgcaggtgaaggacaaattttaacagctggtggtattgatactcatattcactggatctgtcctcagcaagttgaaaccgcgctgatgtctgggacaacgacaatggtgggtggtgggacaggaccagcagcaggtacttcggcaacgacagtgacaccagggccttggcatattgctaccatgttgcaggcgattgatgatttgcctatgaatattggcttgttaggtaaagggaatttaagtttacctgaccccattcgcgagcaaattaaagcaggagtaattgggttaaaactacacgaagattggggttcaacacctgcggctattgataactgtttgagcgttgcagatgagtatgatgtacaggtcgcaattcatacggatactttaaatgaaggtggttttttagaagaaacgctagcggcatttaaagaccgaacgattcatacttaccataccgaaggtgcgggcggcgggcatgctcccgacattttaaaagcaattgggcaaagtaatgtgttgccatcttcgaccaacccaacacgaccttatacgatcaataccattgatgagcatttagatatgctcatggtatgccaccatttagacccagcaattgctgaagatattgcttttgcagaaagtcgtattcgtcgtgaaaccattgctgctgaagatattttacaagacttaggcgcaattgccatgatgtcatctgactctcaggcaatgggacgtgtgggtgaagtgattttacgaacttggcaaactgcccacaaaatgaaagtacaacgtggcccattagagggtgacaatgagtttcatgataacaatcgcgttaaacgctacattgccaaatatacaattaacccggcaattacccatggtttaagccatgaaatcggttcggttgaagtcggaaaacttgctgatttagtgttatggaagcctgcgttttttggcgtgaaaccttccatgatcattaaaggtggcatgattgcagcggcacctatgggtgacattaatgcttcaattcctacacctcaaccagtgcattatcgcccaatgtttggtgcttatccacgtggtgtgcataacacctgtattaccttcttatctcaagtcgcaattgatgaaaaagttgctgagaagctaaaccttaaaaagttaatcagtccctgtaaaaacacgcgttcaattaccaaagccgatatgaaacacaatacatattgtcctgttatgcaggttcatcctgagacttacgaggtgcgggccgatggtgaattattaacgtgtgaacctgctgacgtattaccgatggcacaacgttatttcttgttttaa

SEQ ID NO: 44745 - DNA, 2070 bp, Acinetobacter baumannii
ttgagtcaaagggcagccgatttacttaaagttaaactaggcgatatggtatctattgcagatgcggcatttcgctttagtggcgtgattgtgcgagattcaaatcaagaacttggtttttctggtttttcgcctactgtcattattcatcaagcagatattgctaaaactcatgcaattcaaactggtagtagaatcgattatcgactgttaatgtctggtcagcctgaacaggttcagtcattttcaaggcaatttaagcaacaacatcaacctgcaaatgaacaggaagaaaccatagggttgcgtttacgcgatgccagtgaatcaaatagcagattattacgtccgttagaaaacctagatacctttttgcaattggccaatattttaacgattttattgtgtggtatcgccattgctttaacgagtcaaagatatgttcagcaaaaccaagatcacattgctttaatacgttgtttaggtgcgagtaagtttcaaattttatgggcctatatcgggttactttgtgtagtcagtgcaatttcgattgtaatcggtagtctcttaggaataatgatgggctatggcttgcttgagctcatgctacaactgattccacaactagagttaagtttctctgtggttggttttttacttggtcccttaccaattgccatttttaccagtgtaattgtgctacttggattcattttgccaagcatttgggaattgttaaatactcctcccatccgtgttattcgggaacaggcaaaatcccgaaaatcgttattctttatgttctttgctggtattaccagtcttgttatttttagcttagttttaagtgaaaatttaatgctcagtatttgggtgctaacagcgattattctgctttgcattttactttacaccattgtctggctattgcttcgtgctttaaaaaagatgaaaacctgtttgtctttttatattcgttcagcatcgcaaagtgccttacaaattacagcactggctttgggtttaagcctcattaccgtgttaagtgtattaagaacagatttattagagcgttggcaacagcaattaccagagggaacaccaaaccagtttgtttatggcctaccaccatttgatttaaaagcttttgagcaacagttgaagcaaaatggttggcaaagcacaccgttatatctaaacattcgtgggcgattagttgccaagaatgatgttcctttttcagaagaagctataaagcaaaataacgctctacgccgcgaattaaatttaacgcagtcgagtgctttaccagatgacaatgtcattacaaaaggtcaagtggaatttaatgcagtaggccaagtttcagttgagagtaaaacagcagaaagtttaggaatccagattggtgacaggcttacttttagtctgccagaaggtaccttgcaagctaaagttataaattttcggagcgttgagtgggaaagctttagtcctaattttttctttattttttcgcctaaaactttagatgaaaatgctggtagttacttgggtagtttttatgtgcctaagcaagatcaacctaaaatgatccatatgattcagcaattctcaaatacggtttttattgatgttgaccgtattttggatgaagtaaagcgcttaatgaatgtcttggttaaaattgtgactgtgcttgcagcgttagttggcttttctggaatacttgttttaattgcttgtttaaatctattaatggatgaacgccgtcgggaagtggctttgttacgttcatttggtttgtcgaaaaataaaatgaagcaaatgctcagcctggaaattggttttttagggttgttagcaggcattgttgcctgctgttttgccgaggtaattagcgctattgcaagttataaaatgaatatggctttacagtggcatattgaaatatggttgattttaccatttgccatgatgttgctttgcgctctgattggccgatatagactcggttatctgtgtaatttaccgccactacaaagtttacgtgagctgaaccagatttaa

SEQ ID NO: 44746 - DNA, 561 bp, Acinetobacter baumannii
atgttcgtctcggcaaaaactattttaattttaggagatagtatcagtgccggttatggaatagaccctaaacaaggttgggtacaattactacaaaaacgtttagaccaacagtatcccaaacaacataaagtggtcaatgcaagtgtgagtggggaaaccactagcggtgctttggcacgattaccaaaacttttacaaacttataaacccgaggtagttgttattgaattaggcgggaatgatggcttacgtggacaaccaccacaaatgattcaaaaaaatctgtctcagctcattcaattaagccagaagcaaaaagctaaggttattctttttggtatgaagattccgcccaattatggaacggcttatagcaaagcattcgaaaataactataaaactgtaagtcaaaaatatcaggtgaaattgctacccttttttcttgatggcgtcgctgggcaaaagcaactaatgcaaaatgacttgattcatccaaatgcccaagcacaatcaaaattactgaatttagcttacccatacataaaaggtgccctatag

SEQ ID NO: 44747 - DNA, 1026 bp, Acinetobacter baumannii
atgacaaggctgtccgccccaattaaagcctctatgaaaaaaactgctactgcactgactttggcttgtagcttattgtcagtcatgagcatttctcaagcgcaggcagccgataatattgatgtcagctttcaaacaatattacagcaagaacgtaactgggcaggactgcaaagcaaaagcctaaaggtgggtgatatcacttggtcatatagtgaaggtggctctagcacaaagccaactttactactcattcatggcctagcgggcagtcgagataactggaaccgagttgcccattatctcacgacaaattatcacgttattattcctgacttaccgggcagtggcgaaactatcgtctcgcacgactttgattattcggttcccaacttagctgaaaaattacgtcgctttgttgaagccgccaatttaaaaggcccaattcatattgctgggcactcactcggcggatctattgccctactctatgctggacaatatccatttgaaactaaaagtctatttttagtcgatagcggtggtattttccgttctgccaacacaatttatctaaaagatccaacctatctaaaacaacttttagtctctaaaaaaggtgattttaattatttattaaaacaaaccatgtttaatcctccgtttattcctaaagagttcctgcaagctcaagaaaaactgatgattaatcaagcacctcaaacacagaaactggttgatcaattgattgcactcaataaagtctataccccagattcatttgccgtacttactaaaacgattgacgcccctacactcattttatggggtaaacaggataaaattattaatgtagaagtagcaaacgagctaaaacggcttttaaaaaatgcccagcctccagttatcttagaaaacgtaggtcatatgccaattttggaagctgaacagttagttatccaacaatacgtaccgtttttactgaaagtagaaacaaaccagtcgtcaaaaacgacaacaccttaa

SEQ ID NO: 44748 - DNA, 1335 bp, Acinetobacter baumannii
atgaaaacggttcaactcgaccaattaaaacaacaatttccactcattcaaacattacaagactatcaagaaacattttggtttcatcctcaccgttatcctttaaatgaagcactagcgaaagtgggtcttacagaacaggatgtaaaagaagcagaagcaaggctagcgcgtttcgcaccttatttggcaaaagtctttcctgaaactcaagcccagcatggaaaaattgaatcagcgctagtagaaattacggagatgcaacaaggtctatcgctagaaaagcataagacacttacagggaaactttggctgaaaaaagatagccatttacctatttcgggttcaatcaaggcacgtggtggtatttatgaggtattgacccatgctgaaaaattagccattgaggcagggcttctcaagctagaagatgattacagtaaattagaccaagactcatttcgaacatttttttccaaatatcaaattgcggtaggttctactggtaaccttggtttatcaatcggtattatgagcgcgaagcttgggtttagagtgtcggtacacatgtctgccgatgcaaggcaatggaagaaagataagctacgttcacttggtgtaaatgtggtggaatatgccagtgattacggagttgctgtagaagaagggcgtaaggcagccgaacaggacccattttgtttttttattgatgatgagaattcgactactttatttttaggttatgcagttgcaggtttgcgtttaaaacaacagtttgaacaaaagcaaattaaagtcgatgcagatcatcctttatttgtatatttgccatgcggagtagggggcggacctggtggggtgagctttgggttaaaactcgcttttggtgagcatgtacattgtatattcgcagaacctacccattctccgtgtatgttacttggcgtttatacaggcctgcatgatcagatttcagtaaatgacattggtttagataacatcactgcggcagatggattagctgttggccgtgcttctggttttgtcggacgtgctatgcagcagttaattgacggttactacaccattcatgatgaatgtttatatgaactctttgcgcttttaaatcaaactgaaaatattcaagttgagccctcggcggcggcaggcatgatggggccatattatgtgcaaactactcctgattatttggctttgcatcaattgtcagctgaaaagttacagcatgcgacacatgtggtatgggtgacaggagggggaatggttccacctgatgaaatgcaaaagtatttaacgcatagccaaaacaattaa

SEQ ID NO: 44749 - DNA, 3687 bp, Acinetobacter baumannii
atgtctacgcttgccaccctaaaagcgcttcttgctaaacgcattctgattattgatggtgcaatgggaaccatgatccagcgccataaattggaagaagctgactatcgtggtgagcgttttgctgattgggcacatgacttaaaaggtaacaatgaccttttggttctaacacagcctcaaatcattcaaggtattcatgaagcctacctcgatgctggtgcagacattattgaaaccaacagctttaacggcacacgtgtttcaatgtctgactaccacatggaagatcttgttccagagattaaccgtgaagcagcacgtttagccaaagcagcttgcgaaaaatattcaacgccagacaaaccgcgttttgtggcaggtgtactggggccaacatctcgtacatgttcaatctctccagatgtgaacaaccctgcttttcgtaacattagctttgatgaactaaaagaaaattatattgaagcgactcatgcactaattgaaggtggtgcagacattatcctgattgaaactgtatttgatactttaaactgtaaagcagcgatttttgcagtcaaagaagtattcaaacaaattggtcgcgaattaccaattatgatttcagggaccattaccgatgcatcaggccgtactttaacaggtcagacagcggaagctttctggaactcggttcgtcatggcgatttgctttcaatcggttttaactgtgcccttggtgcagatgccatgcgccctcacgtaaaaactatttccgatgtcgcagatacctttgtttcagcgcacccaaatgcaggcttaccaaacgcatttggtgaatatgacgaaactccagagcaaactgcagctttcttaaaagagtttgctgaaagcggtttgattaacattactggtggttgctgtggtacgacaccagaccatattcgagctattgccaatgcagtaaaagacattgcgcctcgccaagtgcctgaaacggtacctgcttgtcgcttaagtggtttagaaccatttaatatttatgatgattcattgtttgtaaatgttggtgaacgtactaacgttaccggttctaaaaaattcttacgtctcattcgtgaagagaactttgccgaagctttagaagttgcacagcaacaggttgaagctggcgcacagattattgacattaacatggatgaagggatgctcgattcgcaaaatgcgatggtgcatttcttaaaccttgtagcatccgaacctgacatttcacgtgtaccgatcatgattgactcatcaaaatgggaaatcattgaagctggcttaaaatgcgtacaaggtaaaccggttgttaactcaatttccttaaaagaaggttatgacgagttcgtcgaaaaagcccgcctctgccgtcaatatggtgctgcaattattgtgatggcctttgacgaagtaggtcaggccgacactgctgaacgtaaacgtgaaatctgtaagcgctcttacgacattttagtaaacgaagtaggcttccctgctgaagatattatttttgacccgaacgtgtttgcagttgcgactggtattgaagaacacaacaactacgcagtcgattttattgaagcaacgggctggattaaacagaacttaccgcatgccatgatttctggtggtgtatctaacgtttcgttctcattccgtggtaatgagccagttcgtgaagccattcattctgtattcttgtaccatgccatcaaacaaggcatgaccatgggtattgtgaacgcaggtcaaatggctatttatgatgatattcctaccgagctaaaagaagcggttgaagatgtcattttaaaccaaaatcaaggtgagtctggtcaggctgcgactgaaaaattacttgaagttgcagaaaaataccgtggacaaggtggtgcaacaaaagaagccgagaaccttgaatggcgcaatgaatcagttgaaaaacgtcttgaatatgccttggttaaaggtattacgacttatattgaccaagacaccgaagaagcccgcttaaaatcaaaacgtcctttagatgtaattgaagggccactgatggacggcatgaatgtggtcggtgacttgttcggttcaggcaaaatgttcttgccacaagttgtaaaatctgcccgagtcatgaaacaagcagtggcatggctcaacccatacatcgaagctgaaaagaccgaaggacagtctaaaggtaaagtcctaatggcaacggttaaaggtgacgtacacgatattggtaaaaatattgtaggcgtagtacttggctgtaatggctatgacattgttgaccttggcgtaatggtaccttgcgagaagatcttacaaactgcaattgatgaaaaatgtgacatcatcggattgtctggtctgattaccccatctttagatgaaatggtatttgttgctaaagaaatgcagcgtaaaggctttaacattcctttattgattggtggtgcaaccacttctaaagcacacacagcagtaaaaattgacccccagtatcaaaacgatgcggtaatttatgttgccgatgcttcacgtgctgttggtgtagcgacaaccttgctttcgaaagaaatgcgtggtgcatttattgaagagcatcgtgctgaatatgccaaaattcgtgagcgtttagccaacaaacaaccaaaagcggccaaactgacttataaagagtcggttgaaaatggttttaaaattgatgaaagctacgtgccaccaaaaccaaatcttttgggaacacaagttttaaagaattatccgcttgctacactcgtggattattttgactggacgccattctttatttcttggagtttaactggcaaattcccgaaaattttagaagatgaagtggtcggcgaagcagcaactgacctttacaaccaggcacaagcgatgttgaaagatattatcgacaacaatcgttttgatgctcgtgccgtatttggtatgttccctgctcagcgtacagatgcagataccgtcagcgtatttgatgaagctggtcaaagtgttacgcatacttttgagcacttacgtcagcaatctgacaaagtgacaggtaaaccgaacttgtctttggcagattacattcgtgctgaccgcgagcagcaagactacttgggcggattcactgtatcgatttttggtgcagaagaactagcaaatgagtacaaagccaaaggtgatgactactctgcaattttagtgcagtcattggccgaccgttttgcagaagcttttgcagaacatttacatgaacgtattcgtaaagagttctggggctataaagccgatgaacagcttagcaatgaagaactgattaaagagaaatatgtgggtattcgccctgcaccaggttacccagcttgcccagagcactctgaaaaagcagtgttgttcgactggttaggttctacagataaaatcggcaccaaactcactgaacactttgcaatgatgccaccatcttcagtcagtggtttctattattctcatccacaaagtgaatactttaacgtgggtaaaatctctcaagaccaacttgaagattatgcaaaacgtaaaggctggacactagatgaagcgaaacgttggttagcgccgaatttagatgattcgattgtttaa

SEQ ID NO: 44750 - DNA, 1509 bp, Acinetobacter baumannii
atggatatatttgattttattaataattataaaaaccatcctgtactctttattggtacaggttttagtttacgttatcttgaaaattcatactcatgggaagggcttctaaaaaaaattgcatttgaattaaaaggaaacgatgagtttttttatgatctaaaagggagagtctacgataggaaatccggaaactatgatttcatgcagctagcttcttttttacaagaggaattcaatcgtcaagtttctgatgatcgtaatggaaaattcaaagatataaatgatgaatattatcgtaaaagtagtgagggtattacttctgataagtttaaaatttatatcgcttccttattaaaaaatttagataaaagaaatggaaagagcgaggaattggaagtatttaatttactgtcaaaaaacatatcatcaataatcacaacaaattatgataaattaatagaagatgttacagattttgaaccattagttggaaataatattttattaagtaacccatatggttcagtatataaaattcatggaagtgttgataatccagaagagttagtttttacgacagaagactatgccgattttgatcagagatatgatttaattcgagctcaattaatttctttatttgtccataatccaatagtctttttaggttatagcgttaatgatataaatataaaaaaaattctaagtactatttttaagtatgtacagtttaattcagaacaagcggaattaataagaaataatttcttacttgtagaatatcaagaaggatcagattctttagaaatattagatcatgatatcgatgttcatggttatcctctacgaataaataagcttaaaactgataactatattgaattatatcgtgcattagagtcattaagtctaccggtatcaacgtatgaaattagacgtgttttagataatgtgaaagatataacttcaggtggaaccataaaagttagtattgctgatgatattgatcaattaaaaaattcagaaagaatattggccatttctccaaagtctaaatctactattgaatatacatatacggattcatcacagttaataattgattattttgatattattgaaaataaaagcgaaaatttgataaagttgatcgatgagtttcctatagctaaatcacattggtttcctatatttggatttgcgcatcttgtacctgatttacaaaaagctgaaactttaaaagctcagcaaaaatcaaagcttacaaataatttgaaaaataatttaagtagatttgatgttcatggcttaaataatattgatgatattttaattacttcaaatattcctgaaagctataaaattgattatatattttataaagtttttaataattcaatttcgcctgatgatttaaaaaactatttaataaaaattgatggtgatttagattctaattataagaaattgttatgcctatatgactttaaaaaatacgagaattag

SEQ ID NO: 44751 - DNA, 918 bp, Acinetobacter baumannii
gtgttgccagatgaccatccacgtagcttaggtgctttccataactcggcaggtgttgagcaattattaaaagatgctgacctgatggtggtagtgggttctcgtttacgtagtaatgaaacaaaaacttattcggttgaatttcctgaaaacattattcaggtggatgcaaacccagtagctcagcaacgtaattacaaaatccgtaacttcatttgtggcgatgctaaagatgtcttaacacgtgtgttagaacagcttcaaggaacttcaaaagttgatgccgattacaatgctgctgtagtagctgctaaacaagctgcgattgatgcactgcgtaaacaaatcgaccaatacgctttaatttgtgatcacttacgtgcagctttacctcaagacggcatttttgtacgtgacatcaccatgtcgggtagtacatggggcagtcgtttattcccggtacaagcgccaaaccaaaacatccactcacttgcgggtgcaattggtttaggccttgcaacagcaatcggtgcttcgattgctaaccctgataaaaaagtaattggtttagtcggtgatggcggcttaatgctgggtattggtgaaattgcaactatggtgcaagaaaacaccaatatggtcctaatgattatgaatgacggtggttatggcgtaatgcgtggcattcaaaataactacttcggtggtcgtcagtatttcaatgaattacatacacccgactacaaacttcttggcgaatcaatgggtgtgaaaagctggaaagtcggtagtgcagaagagtttaaaacggttattcaagaggctgtcgcttttgaaggaccaactgtgatcgagctcgatatgaactcgattggaccattaaacttcgcgggtccaccgcaaaagaaactgtattaa

SEQ ID NO: 44752 - DNA, 441 bp, Acinetobacter baumannii
atggataaacttaatcaagtcaatgtcatggtaaaacatgagcagtcgttagcacctgctcaaccagtcagtaaacttgcccgttctatgtgggtgcgttgggtgtttattggtttggcttggttgtgtattgcgcttggcatattgggtatttttattccgggtttacccactgtcgactttatgattttggcggttttctttgccgctcgaggctctgaaaaacttcatcaatggtttcgaaatcatcgctatatcggcccactcattcgtgagtggcaagaacatcggcgtattcccaaaaaggcaaaatacatctcgaccttaagtatgagtttagctgcgggattgatgatttggaccattcctcacccgtggtttgtctatcctgcaattttatgtatggctggggtagtggcgtggatgtggcttaaaaaataa

SEQ ID NO: 44753 - DNA, 597 bp, Acinetobacter baumannii
atgaattcatctacagaacaaatcattagcaacagtttgtctttacgtttgaaacaagaaactgctgctgaacacgaacgtatgcatcaattaatgtcagaggcaaaggtgttttcaagtaaagaaaaatacgcgcaatttactttgtctcaatattactttcagcttgaaattgaacatctttttgagaaagaaggggtagcaggcctgattccagacttagacattcgtggccgctcaaaacaagcacttgccgatttaaatgatttagggattcaacccaacgggcagcaattacaaagtgaaaacgtacaactacccgaagctttaggctggatttatgtgtctgaaggttcaaccttaggagctgcatttttatttaaagaagctcaaaagcatttgggtttttctgaaacgtttgctgcacgtaatttagcggcctatcccgaagggcgcgcgaaagtctggaaacgttttgtacaagtactggatgaaacaggctttgaccaaacccagcaagaccgagtcgttcaaggagctttagatgcctttggatattttggtcaagcgcttgatcagcttgatgaattgaaatag

SEQ ID NO: 44754 - DNA, 921 bp, Acinetobacter baumannii
atgaaatcaaaatcattattccctacccataagccgattgttatgttgcctttaccacaagggccgaagcatttttataagtttttaatcgtagtggtggtgattggactgcatgtgtttgctgtctggatgctgagtcatttaattgaaccttatacttttaaggcaacacccaaagtagatgcattaaaagtaagttttgtatcattggcacctgctaaaaagccatcggttgaaaagactgaaagccaacctaaaaatagtgtaacacctcaatctactttaaacagttcggtatctcatgcgcccgatcagccaaaatactcgcctacaaatgttcaaacattagcgtcaaaaactgcttctaaagaagttgtgcaaaataatttaaatgacaaacagcaagcacaaccaaaaatgactttaaataattcaacttcactccaaccagcgcagcgtacagaaatgctggtgactcataccgataaaaaactgagttcgacagactttgaacaaacgcaaactgagcagttgacacaaaacgccaatagtgaaattaaaagtggtggggtcaaaacacccgcaatgcagcaagaatattccaaagcccctagcactcaagttgaacacgatgacgttgttcaggtgagtagcgtggatgtgctgagttttggcgggcttgactatgataaccgtgagttaaaacaacaaaatcgtttggttgagcttcggattcgcattaatgaaaaagggcagcccatcaacattcaattacgtcaaagttcgggtattcaaagccttgatgaacgggtcatacaagctgcacgtaaatccagatttaaaccccacaaaattaacggtcgagccgtgaccattgttgtggattttccagtccaactcaaactcaatcggggccgttaa

SEQ ID NO: 44755 - DNA, 1491 bp, Acinetobacter baumannii
atgaaacgaacgcttttgtgctgtctgacattgttgagttgtccatttttatatgccgacgaagacacacagcttcgtcttaatcaaagcttggaccaaacgcttttacaagaacagcgacagtttcacgaacagggaaccattcgtagtaccgagcaattacctaaacttcaaattaatggacaagaatatagtgttgagcaaaatccgaatgatcttgccaaggcgttatatttggcagtcatgcaaaaacagtggctcaaagccacggtttatttagaacattataaaaaatatgttggctacgatcgggctttaaccgactttgccgaaggggcagttgcacgttctcagggtcaactgaaattggctgaacaaaaatttcaaagcagcctaaaacaacaacctcataatttaatttgtgaacttgagttagcgcgcgtgctgtttgaacaacagaagaataaggaagcagcacgcctttttatttccattcaagaccaacttaaacaaagtgatcctgcggtaattccgtctggagttttaacaacagtaaatacttttgttcaggcactaaaaaagcgagactcttggcaaggctcggtttcagcgggttacacctatgtcagtaatttaaatagttcgtctgaacagagcaaaacatggacgctttatggcaaagatagtaaaggtaatattatcccaattgagcaagttactcgtgggacgcctaaagctgagtcggcaacgggtttagattatgaagccagtcttataaaacgctatgcgattaaggggcatcatggcgtggctttacgtgcgctggcgtttggacaatcctataacgaccacgcggcatttaatgaatctaccatcaacattaatacaggctacagctactttgacttaaaaaatcaaattggggtgagtccgctatttgaacataaacgttatggcaatgatggtctttacaatgcatggggggcgcgtgccgaatggatgcattttatctcggcagataaagctttcaagcttgaggctgagagtaaagatttaaattatcagaaatataaaaccctagatggggtagaaagctcagcttttgctactttctggaagatttttccagaccagtggactttttttggtggtctagatgtgctcgaccattcgacccaagaaaaatacatggctgcctaccaacagcaaggtgtgcgattgggcttaagcaaatcttggagtacaggatttaataccactttgctgagttcttatcgttggcgtgtgtttgataaatacgcagaaactttcttagctcgtcgtcatgatttcgaacagaactatacctttgttgtgcaaatgccgcgctttgatttttatggcatgacacccaatttaacctatcgctataaccataataaaagcaatgtcgattggctgtattcctacgataaacacaacattagcttcaagcttgagcatcgtttttag

SEQ ID NO: 44756 - DNA, 792 bp, Acinetobacter baumannii
atgaaaatctctcaattgttcttgggtctcgttgcttgttcaactgcatttgcttatgcaggaattgatggtatttcgagtaatgaaagtaacatcaaaatcggtgctgctgccaatgcaagtcatccgggtggtgtagcagcggtgtcggttcaagctgcgggtgcgccatataacgcttttacaggttttagttcgttaaaaggtttggctcaggcttttgctgctcagggaacgagtaacaccaatgtaacggttggcagcaaaacctttaatatttcacatattccagtgtctgcaatgccaccttcacacagtgcattaggtaattttaactttggtcaggtgggcacacaggaagtctattttggtgaatggtggaaagcgggcgacacgccggcaagcgcgagccataccgtttactacgcgggtgataataccaataccactgttccaaccgcgggtactgcaacttataccgttgcagggattaacggctctggaagcaatctgttaagtggtacgttcacggcaaattatggcgcgggtacacttgaaggaacacttactggaactggtacggctgtttcatcattaagcctagatggtgtggcatttaacccgggtactgctgcgtttgcaggtttggcaacggctaacggtacggctggtatcgacaactctggtgtggtgcaaggtcaattctttggtgcaaatgcttcggctttagcgggtattgcccagtttgataacgtgtcttacaacactgcatttggcggtgctaaaaattaa

SEQ ID NO: 44757 - DNA, 3174 bp, Acinetobacter baumannii
atgagaaaagcgggaacggggcaaaagcggaatcgatcgatttttcgattctcaacattggcatttgccatacatgctgtgtcgatgggtgggcttgttgtacttcctatgcagcaggcttatgcagaaacagccggagttaaaagctataacattcctgctggccgtcttgctaacgtactcaatcagtttgccgaacaatcgggtacttcaattgcaatggatgcacagcaacttcaaggggtacacagcctaggtttaaaaggtaactttgcagtcgaacaaggttttgagcagcttttaaaagcaaccgaatttaatgttgtaaaagttgggcagggctacacactcaccaagaaacctacgctgcgagtcactcccgctaaggttcaggccgctagtctgccgccaagtagtgctgtaattgaagaagatgcgtcgctacgacttacgccaattgtggtgtacggcaaagaagaccgtgacacagaaggctataacaaagtttatgacgcaaaccgttcttcggtctatgcgggcaaagactatgtcgaacgctttaaaggaaccaacccagccgatgttttacaaggtatggtgggagtctatagcggtgatgcccgtaacagtggcgcactcgacccaagtgtacgtggtgtgcagggtgttggtcgtgtgcctttaaccattgatggcaccgaacagtcgattgccgtgtggcgtggctacaacggggtaaataacagaaactatatcgaccccaatctgattgcaggcattgaagtcattaaaggcccatctttagagcgcaataccacaacttctgtaggtggtggcgtagtggttaaaacgctagaggccgatgacattgttcgtccgggtaagtcttttggtgccgagttaaaagtagaaggctcaactaactcaatcgatccatctttgccagatatgagtaaagtgggccaaaactacgatgacacaacgccttggatcgacatgaacgggtcaaaatatgaccccgatatttataaaaagaaccggactagaagtgataactctcatttttcgggcgatgacttagcgggccgactggcaattgccaccaagcaagacaaattcgatttactggctgtctatgcagtacgtgagcgcggcaactatttttctggcacacatggcgcgggctactataaacgagcgacgccagacagtagcctcgattttattccttactttgcctatgcctatcaaccgggagatgaagttcccaacacttcaagtcatatggagtcgtggttgttaaaagggacctatcgcccaacagatgatcagactcttaaactgacttaccgagataccaaaaatatttttggtgaaattatgccgtctcgaattgtttggggcattacgcctgacttgggtgttccgcagtggcctttaagcaatattcactctaaagcctatagcctcgaatataagtttaagcctgagaataatcgctggattgatttctatgccaacatttggcaaaccgacaccgaaagccagacatacacacgtggtgggtggccaaccacaatcgattttcgagataacacgattattaacacggcaataagccattctgacaatacgcgtaaaggcattacggtcagtaataaaacccgtttattagaccagcttgatttgacgctcggtggaagtttcttaaaagaaaaactaacgtctgacgatatatatggcgaatttggcccaagttattcgctctatcaggcgctgccacgggcagggcgccgtgaggaaaaaacgttcgactttaattttaattatcgacccgtgtcttggttaagttttgatgcgggcatgcgttatcgctcgtattgggctgttgatgactttttaaataagtctttgcagagcgagattgacccgagtttaaatccgctttttaccaaaaaaagtaggcttaaagaatatacctttgaatatcagaccatgcctgagagttacacctcgactcagcagcgtttaatcaatgttttaaaacagcgctatgccacaaaaaatcctgagtgggatgggcagctcgacactgtgcctgcatcagagagcacattgtataacatgatctggtcacagaaaaatacgctgagctggaaagcagatgcgaatggacaattgtcgcttgccgataatcctttaaatcagctcaatgcctctggacaaaagtacgtcgtaactggcgggaactttatgtcggtggtagaccaagttccggttgagtcggccgacaaagttaaagatagcggctgggcaccgcagttaggtgcctcaattcacctcacgccaaacagcagaatctatgcacgctatgcagaggaatatcgcttaccaagtttgtttgaaagcactgtcggtttttctgccatgttgccatatcaagcaatcaaacctgaacacgcttttaactacgaagtgggttatgtctatgacatgcgtgattggtttagcacagcacgcaatgccgacattaagctcgcctattactacaacaaaaccaaaaatgtgattgagcgtgatcaaaaccttatttttaccaatatggatgagcaaaagctatcaggtctagagttacaaagccgttttgataatggtggtttcttcacagacttgagcgtggcctataacttaaaaaatgaagtgtgtgataccaatagcgccattaacaaaatgattttaggcggtacggttcaaaccgagcagggccttgagttccgcgaaccgtatcagcgttgtgttgatgacggtttcccaaatggctacttggtgactatggccactcctgaactgagtttccacggtttgcttggcgcacgcttttttgatgaaaagttagagctcggtgcacgtgcaatattctataaagcttatgaaagcccgctacgcaaaaacaatgatgctagcgttaataaaggctattacctcaatgtgcctttggcttgggatgacacgtggatttttgatgcctatgcgcgttatcaggttgatgactacaacacagttgagtttgtaggcagtaatctttctaaccagttttatatcgatcctttaactcgtagtgccatggccgcacccggccgaacgatgaaaattagctggaccaccaaattttaa

SEQ ID NO: 44758 - DNA, 1017 bp, Acinetobacter baumannii
atggccatggataaaagcaagcatcaccaactggttgaagaagccgcgcattggattgttcaactgagttcggatgatgaaagctcacgaaaaaccgccaagcaaaaatttgaagagtggaaaaaaaccagtgagcaacatcgtcaagtggctgccgatattgaacagtgtatcggttcaattcaaaaactttcccaaaccagtggacataaaaaagtcactaaagttgctcttaaagctggcctaaactcaggcaaagcatataaacatttacgtgcaggaacagcttttgccgttgtgtttattgccatgagtggggcgttattttatttaactgacaccacagtggcctatgtgactgctgacattcaagggcaatcggggcagtggactacgcaaaccttaccagatggttcacgtttaattttgcgtggtaaaagcgcagtcaatcttgattttaaaaccaaccagcgagtggttgagttggtgcaaggtcaaatttatgtcgatgttgctaaagataagactagaccgtttttggtcaaaaccagtcatgggcaaattcaggcactcggcacagcttttagcgtcagttatgacccttcggcaaccgaactcaaaatgttgcactcaaaggtaaaagtagaagccacacaggttaaaaccacccaattgcatgcgactcgtcaggccattgttgaagcagggcaagccattaaaatggaccaaaatggcgtacaaaaattgcatgaactgaatgtttataacgaacaacaaaaatggcaaaagcatcagcttatggtagaaaacctgccgctgaatcaggtgctacaagagctagaccgcaactacaaaggcaaaattatttttaatgatgcggcactgcaacatgtgcgggtcaatgctgtgttgcctttagatcaaaccacagagtcgcttaagcttttggctacggtttttccagatctgaaaattaagcaaatcacgccgtttgtggtcatggtttctttaaaataa

SEQ ID NO: 44759 - DNA, 570 bp, Acinetobacter baumannii
atgataattattatcatttgtaagttccttgttttgagtccaattgctgtgaacaaaacttctttgcttgtagatcagttatatagaagtcaccaaagctggcttcaccaatggttgagacaaaaattaggtaatactgatcaggccgcagatctggttcaggacacatttattaaactgttacaaacccgagacgagctattcggcattaaggaaccgcgcgcctatttgacgtcgattgctaaaaacctgctgattgaccaagtacgccgtaaacgcattgaacaagcctatttagatggcttgagtcaaatggaatatatgcttgaagcggtggcttcacccgaagagcaaatgcaaattattcaagcgattaaccagctttgcaaagcactagaaggggtttctgaaaaagcacagcaaacttttattttgcattacctcgaaggctatacccataaagaaattgccgagcgtttaaatgtgtcgaccaaaatgattcaaaaatatttggcgagctgtttaattcagtgctaccaaaacagacaagacatggacgcttacatttaa

SEQ ID NO: 44760 - DNA, 891 bp, Acinetobacter baumannii
atgaattatgaattatggaaaatatttttagacgcggtcgaactcggtagcttaagcaaagtcgcgatgctacataacaccaaccaaccgcaaatcagtcggcaaatgagcgagcttgaagcgcaatgtggcggtcgtttgtttaaccgaactggacgcggcgtcgagctgaccgatttaggccagcatttacttcctaaaattcgttcatggctgaacgtaactgaccaacttaataatgaaattttgcattcgaccgatacaccgattggtacggttcgtattgccagtttgccgtctactgctcatccattgttatcgactctgtataaagtgcttcaagagaaatatcccttaattaagctgtcagtccgtgaagggcaaggcgtgcatttagaaaaatggcttgaagatggcagtgttgatttagccatactctatcggtttaatccaacgcctaaacagggggatgtttaccttaccgaagctgatacctatttggtcggttgtgaaggcgatgtgctcactcaggctagtgaagtcgattttaaagacgtaagtcagttaccgctggtcaccttttgcagaccaagtaactggcgtaattttttagaccacatggcttatgaaaatggggtagagctgaatattgtgtttgaagccgattcgattagtttacaaacccatttggtttcagagtctcgcatgtacaccatgctgggaccacaagcgttaaagaaggccagccaatacacctcaattcaagccgcaaaaattattaaccctgcgctaaagcgctacatttctttgtctatttctaaacatggctatttaacgcctgcgtgtaaggctgtgatggaagaaattaggagtttggctgatttgctttaa

SEQ ID NO: 44761 - DNA, 825 bp, Acinetobacter baumannii
atgaaaagattacttttatgtggggtaatagcgttttgtactacattacatgctaaaaatttaacttcaattaatgacatctataaattaaaagataaacaatttgaagaatgtgaggtcaatggttttagtttgcttaagttagataaggacttaacgattggccttattgcaaggttacatccctttggcgttttaaaacctggggattttgatatgagcgcttgtctaacaaagagaaatttacaggaaaatgttataacgacctatttttggcaaaagaatcaaaaatttgtaggacaaaatcttaaaagttatgttgcctatgacagttctaataaaaatatcttagttattttattagataatgatttaaacacttatatcttaggtaaccgcgaccaatatcttatcgatgcattaaagaacagcagagacccaagtgatgtagcttttagtcgtattaactggagttctactagatcttttagagatcttggaccaaaaaatgtaattcctactaaagatgatctacttcaaatgcaggaagaaaaataccagatcgaaaaaaaagatttattgtgtaaagctggttttgagatggctgaaaatattatgaaagcacgtcaagctggagtgagtaaaacaatgcagttagactcaaatgagcagaatctttatagatatcctgagtactcaaaatataaaatggatttaataaataaggcttatgatgaacccattcatgaaaactctatagataaatatgctgttagtaagggatttgcctataaatcattttttgaatgcaaaaaaagagtatag

SEQ ID NO: 44762 - DNA, 1851 bp, Acinetobacter baumannii
atgtgtggtatcgctggttggctttcttttagtcgtgatttgaataatcaagcaaaaacgatttgtcgtatggtacagactatgatgaatcgtggtcctgatgaggaaggcatttggattaatggtccaattgctttagggcatagacgactttctattattgacttggctggtggtaaacagcctatggttgatttagtggatgataataataaagttgccttgatttacactggtgaaatttataattttcaggaattacgtgctgagttgatatctcgtggtcatgtttttaatactaaaagtgatacagaggttgtcttaaagtcttatgttgaatggggaatagattttgtagataaactgaatggaatgtacgcatttgcgatctgggatgatcgtattcgtagtttatttttagttcgtgatcgtatgggggttaaacctctgtattattacccgaccgcagatggtgttttatttggatctgaaccgaaagcaatattagcaaatgatctggcaaaatctgttgtaaaagcggatggtttacgtgaaatttttgaaatggtgaaaactccagagcatggaatttttcatgggatgtatgaagtccgtccaggtcaatttttaaaaattgactcatcaggtattcaaaaatatcaatattggaagctagaggcaattgaacatagtgatgatttagaaacaactataagtactactcgtgatctactcgaagatattgtttcgaaacaaattgtatctgatgttccattatgtagcttactttctggaggcttagattcttccatcattacttctttagcttcaaaaaaattattaaatggtggtcatgaaaatatccgatctttttccgtagattttgtgaatcatggatctggttttgtaagtgattcagtacgtggaactccggacgctccttttgttaaagatcttgttgatatgattggatcatctcataaggaaattttaatagatagtaaagatatggcagatggtcatttaagagaaaagattattcgtgctttagaccttcctcctgcattttggggagatatgtggccatctttatataagctttttgaagaagtaaaaagaaattctaccgttgctttatcaggagagtctgcagacgaagtttttggtggatatcgttggttccacgatcctgaagcgattaattcgacgacttttccttggctcacctcggtcacagcaaaatattttgatggaaaaacgttattttcaaatgatcttttgaaaaaattagatctggatgatttcgttcaagatagttattcacaagctttggctgaatccccaatattatcaagtgagagtcttgttgataaacgaatgcgtcagatgagttatgtaaatttaactcgttttgtacagactttgttggatcgtaaagaccgaatgagtatggctgttgggcttgaagtacgtgtaccgttttgtgatcatcgcttagtacaatatgcttttaatattccgtggcaaatgaagtcttttgatggtcgtgaaaaaagtattttacgggctgctaccaaagatattttacctgaatcaatctcacagcgtgtgaaaagcccttatccatcaacacaagatccatcatatgaaaaagcattaagacagggtattgaagcaattataaatgacagtaatgctccagtttacggcttgcttgaaaagcataatgtaaatcagcttttacagaaaaatttaggttcttcttcaccaatgtatgaccgtatgggaatggaattagccatcggtttaaatagttggttaaaacaatacagagtgagtgtagaaatataa

SEQ ID NO: 44763 - DNA, 984 bp, Acinetobacter baumannii
ttggggggaatttttttatctaaaaatcaatttaatactaagcccatatccgaatcagcatttattgcattgtctaattttaaacctgatctagttattatttctaattcggatggatttcattttgatgtaatcaaagaattaaaagactttaagggatttgttatagcagaaaagcccttaatttcaccatctgatagttgtagcctcactaaagaaaacttagcgaatatctctggtttttgtatggatttggttgaaagatattctgaaaatacattttttttgaaaaactttatatttactgaaaaccttagattagttaaatgtaattttgcttgggcaaaaaatcgtttaggtgattatagatctacaactggtgttattagtgaagtaattcatcctttggatttgattaattatatttgctatccaaacgataaattgattttaaaaaaaatcattggattgcgttcggatttctcaatttctggtgataattttactgattctgtttctttaatcgcagaattgaatcaagcaaaggtgattggttatagtagctttgttaatttaactagaaatagaaatattgactttatttttaaggataaagatcaaaatttaatatatgtcacacttgtttatgataatccaacttgggattcagattatttgaaaatctggaaatatgataatgattttaatgaagttattttgcatgagaataaaactttttcttcggttgatgagcagtataagactattttaaagctgtcaaaaatggtgattgatgttttaaattttattaaatttaaacaaatgccagaaactgatttttcggatttaaattatgctctatatcttcaagatttattaaatcaaattgatattaatattggagaggatgttaattataaatattttaaaaatactaatttacgatttttatttagtagtaatgatttagaaaaacttggttaa

SEQ ID NO: 44764 - DNA, 840 bp, Acinetobacter baumannii
atgtggcagtgtttacctaaagaacaagtttttggcctaatgtcatcattttcaattgtggaagcaagcgcattaattgcgggtcatccacctagtaactgtgcagaaaatacagattggaatggcaatcctgatggtacctattatctggcaaatgctagcgaacatgaaaaaattgtatttgatgcagctttaagtagtattacacatgatattgaaataggagagttaaaagccattataaaaacagaagcaatgacgcaattatataaaagtgatacacaagatgattggcaagccaaagctatattaagtatttttcagactcgtattaaacggaatgacctagtaaagtggctagcagatcggcattgctatcctgattttttctttagtaataagaatgagcctccatatttaatacaaaacaataatcctcaatattcacctaaattatgtgcagttattcatgcatgggaagcaacaaaagaagctgaggaaaataataatttagatgggatgtctgttaagaaatatgcatcaaattggttggaaaataatgcccaaaaatatggagttgaaggggtgactaattatgatgatatggcagccattgtaaattggaatactaaaggtggtcgagtttcagagaaacctaccctaacaaaagatgaacctacccctatattagagaaaggtaaaattgccttaagcgatgatgatgtaaattctgctgttattgatacgttacttatagaaaaaacagatttagttgagaatccttataaaataaatagcaataagccaatagcctctttagatgatgacctaccattttga

SEQ ID NO: 44765 - DNA, 1230 bp, Acinetobacter baumannii
atgaaaagaacagaaatcaaacgtagaccgttatcagacaccgtactggctaaccttgaacccgaagcaaaagaatatcgggagctggacggcgaaggcttatatttccgtgtaaagcccgatggtaaaaaagcatggttattcagatataaaaaagctgatggtaagtggtcatggctgggtatcggtacttatcctgaattatcaggcaaaggcgcaagaaaaaaagcatctgagatagttcaagacatttcgcacggtgataatccaatcattaccaagcaggaacgtaaacggcaagaactggaacagaacaatgccacctttgaagtattggctcgtgaatggctggacacaaaagcgaatacttgggtacaagacaccatgacccgaaataaaggcgcattagaaaaacatatatttcccatttttggcaaacgcttgtacaccaccataaaaccgattgaatggatgaatcatttaaaaggtattcaacaaaagcaaggaatctatgaacaagtaaaccgagttcgggccatgtgtcgcgatatatacgattttgcaaaggtgacaggccgtattgattacaacccattagagggcctacaaaagttcttacagcaaggcgtaaaacaaaatatgtcgcatgtgagtgaacaggagttcccagcactattaagagctatcaataattatccgactatggatgttcggatgggcctacagcttttagctatgctgttctgccgacctaccgagctaagggaagccaaatggcaggagttcgacctagatcaaggcttatggaatatcccagccgagcgtatgaagaaacgccgtgagcatatcgtacctttatccactcaagcggtggcgatattaaaagagttgcagacctaccaaaccaattctgactacttatttccgagcagatcggacaagagtaagccaaaatcagatacagtttttatcatggctttaaggcgcatgggatatgaaggcagacagacaccgcatggctttaggcacattgccagcaccttattaaacaatcgtggttttgatgaacgtcatattgaagcagcactggcacacgtaaaggacggcgtggcaggggtatataacaaggctcaatatttagatgatagaaaaatcatgctgcaatggtatgcgaatcatttagaagaaattgcggatcagagcatcattcagtttaaaaaggctaagtga

SEQ ID NO: 44766 - DNA, 909 bp, Acinetobacter baumannii
atgccacaagatcagcatctcggcgtcgacaaagcaaaaatcttgattgaagctttgccatatattcaacgtttttctggtaagacgctggtggtgaaatacggtggtaatgcgatgactgatcctgaattggaaagttcatttgcccgcgatatcgttttacttaaaactgtgggtttaaacccgattgttgtgcatggcggtggcccacaagttgactctttcttaaagcaattaggacgtgagtctgaccgtattgatggtatgcgtgtgaccgatgaagctacgatggaagtggttgaaatggtcctaggcggtagcgtaaacaaatctattgttaatttgattaataaacacggcggccgtgcaattggcttgactggtcaagatggcaacctattacgtgcccgtaaattattaatggaaaaacaagaagaggacggttctatcaaacatatcgatttaggtatggttggtgaggtgaccggggttaaaactgacgtattagagatgtttactcaaagcgactttattcctgttattgctccattaggtgttgatgaaaaaggtaatacttacaatattaatgctgacttggtggctgggaaggtcgcagaagcattaggcgcagaaaaattaattctgctgactaatattagtggcgtattagatgaaaacaaaaaccttttaaccggtttaacgacacaagaagttgaccgtttaatcgaaacaggcgtaatttacggtggaatgattcctaaagtaggttgtgcgcttgacgctgtaaaaggtggtgttgtgagcgcacatattgttgacggtcgtgtaccgcacgcaacactacttgaaatctttacagatcacggggttggtacgctcatttctaaccgtacacaaacgactcactaa

SEQ ID NO: 44767 - DNA, 1419 bp, Acinetobacter baumannii
atgaatgtaagacactcatttccaaaaaatattttccgtgcttacgatattagaggcaaactttcttatttaactacggacgtcgtccgttcaattgcctatggattggcacaacaatataaacaagcagaacaaactcaactgattattggttatgatgcgcgcctaacgagtccggcttatgcgcatttaatcgaagagatattagtagagcagggtttaaatgttacaaatattggttgttgctcaaccccgatgatgtactacattgcacgggagtttggtggtaatggcataatggtaacagctagccataaccctaaatcagataatggtattaaatggattttaagaggtgaacctccatctcctgaaatgatccagcaagtaggtgaatttgcgcaaacttatgtacctactcatacaatttcattattagaattatcaactcctcaatttaattcagaattttgtaaaaaataccaacaagcaatctttaacgatattcaactcaagcgtcctttaaaagttgtattagatggcctgcatggatcggcagggcattgctcaaaactcgtacttgaaaaaatgggttgtgaagtcattgctttacgtacaactccaaatggtgagttccctgatcatgcaccagacccttcacatgctgcgcatttaaaagaactacgtaaaacgattattgaacagggagcagatattggtattgcccttgatggtgatggcgaccgtgtcgtattgcttgatgaaaaagccaatatacttactgctgaccgtttattgtcactatttgcacaaatgtgtctggagcagcaaccagacaaagaaattgtatttgatgtgaaatgctcgctcatggttcaaagaaccgtagaacgacttggtggtaaacccaaaatgattcgcacgggaagtagcttcctccgcgcgtatttatctcaatcaaatggtaacgctatttttggaggcgaatacgcgggtcattatgtatttaatgatgggcgtggttttgggtatgacgatggtttgtacgctgcattacgtgtaatggaatatttcaccgagtcgagtgcggcaacaatttctgatttattttctaattatcctgaaagatgctgtaccgaagatacttatattggtacccatcagtccgaccctaaatatgtactacaagatattgaaattttaagccatcgtttgggtgctcgaattagtaaaattgatggcgtacgtcttgattttgatgatggttttggcattattcgagcatcaaatacaggtgagtattttaccgtaagatttgacgctgataatcctttacgtttaaaggaaatccagcaaaaatttattgatatgttgcaagagcgttatccgcaaattgcacaagaactttctgaggcctaa

SEQ ID NO: 44768 - DNA, 306 bp, Acinetobacter baumannii
atgaatgctaaagtaaatatttctaatcgtgccggagcaagtttccctgtgcgtcgtatggactttgagtttgctcaagttccacgctattgggcaaattacgatgcaggattaactcattttatgacagcattatcggctctttttccggaaggagagcagttctttgtaaacagtactcgtgctgtgcgaaatgatcctaaactggctgatccagcacttcaaaaagaaataagtgcttttattggccaagaagctatgcattctaaagagcatctagcatttaatgcttctgcgcaggcgtaa

SEQ ID NO: 44769 - DNA, 315 bp, Acinetobacter baumannii
gtggacatttataaaggaaataaaattagtttcttagaaagcagtgtttttaaaacctcaggcaatgtgaaagctggagaatcttatatttttccactttatgcaaccttaactttcaattttgagcaaacaggggcacaacctgtaaatttaggtattgtcattgatgaacatggcgatattagaactgatattaagccaaatgctacaatcactgatatgtcaggacaatgtgctaccgttgcagacagtaatttaattgatagtctaggtgtacaacaataccgtatttggttcaactgctgcgactattaa

SEQ ID NO: 44770 - DNA, 1176 bp, Acinetobacter baumannii
atgaagtcggtactttgtcatcaagcaacattacaagtagtggaccaaccgaacttaacgcctgcaaaaggacaagttttattggaagtggtgcgatgtgggatctgtggttcagatttacatatgcagcaccactgcgaccacatgcatgatttggctgcacgtgtcgggtttaatggtctagccaagtctacagacccatttgtactaggacatgagttttgcggcaaggttttagactacggcccaaaaacacgtcataaatttaaaacggatacactcgtttgtgcaatgccgcttttaaatgtagatcagcatggttacttgtcaacagggctttctccaaatgcttcgggcggttatgccgagcaagtattggctcaatcaagcttgatgtttgaagtaccgaatggtctagatgcagatagtgctgccatgactgagcctatggcggttgcattgcatgctgttcgccgtagccgtgtaaaaactagtgaacctgcgattgtgattggctgtggtcctgtcgggctaggtgtcatattaatgcttaaagcagctggggttaaaaccgtagttgccagtgacttttctccaaaccgacgtaagcttgccgagcaatgtggtgccgatattgtggtagaccttaaagagacatcgccatttgccaactggaaagagtttggtttgcttggcaatgtttctgatgccattaacatgggcatgggactgtttgataagttgcaagcgacacgcttaccttggtggcatggatggcgcatgattgataagttaggcgctctgccaaaacgtcctgttatttttgagtgcgtcggcgtaccgggtgttttgcagcaaattattgaaggtgcacctttgttttcccgaattgttggggtgggcgtgtgcatgcaaagtgacaaaatagaacccgcacttgcaattaataaagagttagaaattcagtttgtgttgggctatacaccgcttgagtttagagatgcgctacacatgattgcagaagggaaagtgaactgttcaccgctcattacgggtgttgttggcctagaaggcgtaactaatgcatttgaagcattacgtgaccctgaacagcacgccaaaatcttgattgaccctaaacgtagcggttcagatattcaattgatgagtcattaa

SEQ ID NO: 44771 - DNA, 948 bp, Acinetobacter baumannii
atgcgaagaagtatcccgtccattcagggtctaatttgctttgaaagtgcagcgaaacatctaagttatacctatgctgcgcaagagttatgtattacccaaagtgcagtctcgcgccaaattcagcagttagaagatttcttgggtgttgaactctttatacgtactcggcatggcgttgaactcaccattgcaggtcagcagtattttaaaagcattaaaccctatttgttagggctagagaaatgtacagccgatgtaatttctcataaaggtttaggtggaacattaaagttaggcgtggtgcctacctttgcaacgcgctggctgttacccaagctccatcttttaaatcaaaaacaccctgaaattacagtacatttagaaaccagtaccaaaccctttttatttaatgacaatatttttgacgctgcgatttttgcaggtacgcagcagcaaattgaccattggcccggcatacaagcgcattatttaatggatgaagaaattgtacctgtatgctcgccaaggctaatcgaaaagtattttccagatgcagtcatgattaatgaaaatacctatgatttaagctctgaagatttactgaaaatccccctacttcaacaaaccactcggcctagcatttggcaagaatggtttctaacccatcagatgcaacacccgaagccttttgatggacaacgccatgagttattttcaatgcttgcggttgctgccagtcatgacatgggaatggctctaattccgcaaatgttgattgagtctgaactacaaaaaaaggaactggtgattgtttccaataaaaaattaaaaggtagccgaaagtattaccttattcattcgagccaagacatctcaccgactattcaaaaatttgttgagtggatttaccaagaactagaacaactaaagactaatacgaattag

SEQ ID NO: 44772 - DNA, 1323 bp, Acinetobacter baumannii
atgaacaatgacgttcaagtaatatcgaaagagttaagaaccacatttccaagtaaccttggaacatatgaaaagattggaccaaatacatggaaatgggcgttgttatttgcctattttgcgatggtggtcgatggcatagatattatgctgctgtcttatagcttgaccagcttaaaggcagagtttggtttaagtacctttcaggcaggtgccttaggtagtgcttctttagcagggatgggtattggcggtattttgggtggttgggcatgtgacaagttcggtcgtgtacgaaccattgccaactctgtaaccttcttttcggtagcgacctgtttattgggctttacgcaaagcttcgagcaatttatggctttacgttttattggtgctttgggtattggagcactctatatggcgtgtaataccttaatggctgaatatgtgccgacgacttaccgtacaacggtcttgggcacgttacagacgggtcagactgtaggttatattgctgcaacgttattagctggtgcaattattccagattatggctggcgcgttttattcttcctgactgtagtacctgctttcgttaatattttcctccaacggtttgtaccagagccaaaatcttggcagctcaccaaaattgaaagcttacaaggcaacagacagcctaaagaaagagtggtggctgaaaagccaaaaagtagcagtatctacaaacaaatctttaataactttaagcaccgtaaaatgtttttgttgtggatgaccacagcattcttcttacagtttggttattacggtattaacaactggatgccaagttatttagaaacagaagtgcatatgaactttaaaaacttaaccagttatatggtgggttcatatactgcaatgattttaggcaaaattttagcgggttatcttgctgacaaatttaaccgccgtgctgtttttgtatttggcacgattgccagtgctgtgtttttgccaattattattttcttcaatacccctgacaatattctgtatttattgatcacttttggcttcttatatggcattccatacggtgtgaacgcgacttatatggctgaaagtttttcaactgatgtacgcggaacggccattggcggtgcttataacattggtcgtgtcggggcagcgattgcaccagccaccattggattcttagcgtcgggaggtacgtttaccatggcctttattgtgatgggcgctgcgtattttgttgcgggtgtattgccgggcttatttattaaagatcgtcagtacgatccacaaagacaatcataa

SEQ ID NO: 44773 - DNA, 930 bp, Acinetobacter baumannii
atggaaatcaagcaaataaagtattttttgacggtcgttgaatcgggcagtattggaaaagctgcccaaaagctcgatgtcggtgcttcggcgattagtcagcaaattagtaagctcgagcaagagttaagcattcgcttattacagcgtaatgcttttggtgtgaccccaaccccagcaggtcttgcctttttaaaacactcgcaactgattttgcgtcaagtgaactttgccatagatgcggcacattcggcacgcttgtcaggtcatgtcagccttggttttccgcccaccattaccgctttgattggcatccctttaatgaaactaatgtctgaacgttatccagatattcgtttagagattgtggaaaccctgtcgggcaacctgattcagtcgattaattcgcgtcagcttgatatcgccattatttttaccaatgaaattgataaacagtggtcaattcagcctttggtgcgcgagcaaatgtatttaatggcacgcaaagaagtgctcgaaaaatacggacttagcgaatgtattaaaagtggaattattcagtcgcagcaaattggcgatattcctttagtgttgccacgtcagcgccatagcttacgaaagctgcttgagcacaagattggacagcttaatgtcgtctatgaaattgatggcttacatttgcttatggacagcctgattcacctcgaccttgccagtgttcgccccggaagtgcctgcctgcaagagtataaacacaagctgcaattgcttaaggttgtcgacccggaagttgaacgaattaactatttggtgagccttgccgaagaagaattatcacctgctgcacttgctgccaagtcagccattaaagcatgtgtgaaagagttgattcaaaaccaaatttggccatgttctgaaattattttataa

SEQ ID NO: 44774 - DNA, 642 bp, Acinetobacter baumannii
gtgggcggctcattaccgatgctcaccaagaacccgattagcatggctgcaaacgcagtgactcaatatcaaaccattatgggtaatgcagttgatccgcaacaagcggcagtgttatcgattggctcaatccaagctggaaactcgaataacgtgattccttctactgcattggtcaaaatgaatttgcgctggtttgatcctaaagtgcgtgaaaccatgctaaataatattaagtctatgagtgaaggtgcggcccaaatgcaggggatgggtaaagatcaattacctacctttacgtttaaaggttcgagcacacctgtagttaacaataaagaattttcggcacgtttaaatgggcctttaaaagcactattgggagataaacatgttctaactgagtatcccgcggttatgggatcagaagatgttcatcatttattgggcgaacaaaaagacattccttttaactttatgtttattggtgtggcagacccagttgtgtttgcaaatgcagtcaagcaaggcaaacctgtgccttatattccacatagtccaaactacattgttgacttaaaagctttaccagtgggagccaaagtcactacagtttcgatgctagaactacttactaaaaaataa

SEQ ID NO: 44775 - DNA, 558 bp, Acinetobacter baumannii
atgatgccaactttagaaatatcttccaaaaaattacaggtggttcaaactgccatccaactctttaccacgcatggatttcacaatgcaggcgtagacttgattatcaaaaaatctaagattcaaaaagccacgttttataactactttcactcgaaagaacgacttgttgaaatgtgcctaatctttcaaaaaagccgacttaaagaagaagtactagcaattgtctattcacatcgctatccagccgcagccgataagctcaaagaaattgttcgtttacatgtcgatgtaaatagcctttaccatcttttgtttaaagcgatttttgaattaaaactgctttatccaagggcttaccgcatgacagttgaatatcgaaaatggctactaaaagaaatttttgatttggtctttagtttagaaaccaacaaactcaaacccgatgccaacatggttttaaacttaattgatggcttgatgctacaggttttaagctcaaattgtttagatgaaagagatgtggtgttggagcggttttgggggaaagccatctga

SEQ ID NO: 44776 - DNA, 1002 bp, Acinetobacter baumannii
atggcttatgtcgttattggcctaataacagactttaaaaagacaattaaagcaattggctctcaacccattgatccaaatttaatttggaatttaagagatcgtattaacaaccgctatataaataataaattatataaattattagatattgatctcttggagtggattattagcacatttcgtacattctggccaaatatcggatatcctaatggagtttcagaaggtaacacaaatccttgggatgcttctaattgcataattggtcttattcaatatttagctcaagattcaagtgagcaggcatataaagctctggaaagattgagagactcatctgtcgatgattatagggacataataaaattagtattatttgaaaaaaaacaaatccatagtgaaagcctttattctcctccatctttgcaagcaattaaggctattacaaatgatcttattcctcagtctatcactgatttacaagtatttattttagatgagttaaatactgttcaagcaaagattaaaagtgatgatgctgaatcatggcgaggattctttgatgataatggcaaaccatacgttgaagaacgttgtcgggatcatttattaggcttattacgtcaaggtgactctagaattacctatgaaccagaaaaacatgcagcaaatgataaagaagtcgatattacatgctcagtaggccaacttcgtttaccaatcgaagtaaaaggccaatggcatccagatctttggacaggtgcagatgatcaacttaatgaattatatgcacaggattggcaagcaaaaggccgtggcatctatttagtattatggtttggtttaagaacagataataaaaaattaaaacatcctagtaaaggaaagcctatacctaaatctcctcaagaattacaagatctgttaactgcaaatagccgatcagctcaagaaggtaatattaaaattctggtcttagatatagaccataaaaaatag

SEQ ID NO: 44777 - DNA, 1722 bp, Acinetobacter baumannii
gtgtcattccaaaccccaataagtatatctgaagctattctaaatatagatcaaaataaatatttactaccagcaatacaacgtgaatttgtttggtcacatgacaaagttgaatggttattcgattcaataatgagaaactatccaattagttcttttttattttgggaagtaaatgaacaaacagctaaaggatataaattttataaatttatatctgaatatcgagaaaggtataaaacacataatgatgaaatatctacaaatggtttaacatcttttaatgcaattttagatggacaacagcgactaacatctttatatttaggattaaagggtagttttgcatataaagaatatagaaaaaaatgggaaaatacagaagtatcgataccaacaagacagctttacttgaatatagatcaagaacttaataatgaagaagatggtagagtatatgagtttaaatttttaagaaatcaagatacaaagaaccaaataatatataaatcaagtaccaatgttaattggtttaaagtaggtgaaattctcaatttaacaaatgatgaagatttagataattttgtcgaaaacttaaatggagcatttgcaagaaaagctattcgccaacttaagcgaacaattaatgactacaaactaattaatttctttttagaaaaagatcagaatattgataaagctttaaatatttttatacgtataaacagtggtggtgaacctttaagtttttcagacttgatcatgtctattgctgttgctaattgggaaaaaaaagatgctagaaaagaaattcatcaattagtagacaacatcagagataaaggctttagtgttagtaaagatttaattttaaaaacttttctttatttatatagcactgatattaaattcaaagttaataatttctcgaaagaaaatgctcaattatttgagaaaaaatgggatgagataagagatgctctcttagaaactttcaacttacttaaagggtttggctttaatgactacacattaacatctaaaaactctattcttccaatagtttactggatataccacaataaaatttataaagattttagcactaaagttgaatataaaaatcaacgacttgaaattaaaaagtggttgcatataagtctattaaaacaactttttagtggaacatctgactctgtactttcccaaataagaagagcttttagccctgaaaaattaacaacatcttcatacccaatacaagaaattttttcatttgtgaaaaaagatatcagtattggaagtgaatttattgaagagttattaaatattcaatacgaagaagcccaatccttttctatattggctttattattcccacatttagattataaaaataattctttccataaagatcacttacattctaaagatgagttcaaaaacttatctaatgaagataaaaccaaatacagttggagagagtacaactctatagttaacttacaaatgcttgattcaaatgaaaatatgtcaaaaaataatttacctttagataaatggattgagaatgaaactattgataaagagtctcttaaagataatttcttagtaaatcatttactaccattagaatgtgattttgcaattactgagtttgataaattctttattgcaagaaaaaatatcttatttaataaactctatgaaattttaaaataa

SEQ ID NO: 44778 - DNA, 1764 bp, Acinetobacter baumannii
gtgaatgacaacgacaccacctataacggcaatggtactggtgatagcggcgtgagcgctctgggcggttctggcaatggttctggcaatggttcaggtgatggcgcaggtaatggtatcgcttctggcaatggtgaacataactatggtattggcaatggtaacggcgacgatgttgatattactgctccgattaccggcgttctaaacatttcagggaactcatttactctcattggtaattcttcatcaagttcagtcaatactgcgccaaccaccacatcaaatacagtgaacgacaatgacaccattgataatggtaatagcggcggcacaggtagtggttcaggcaatggctctggtgatggtttacttaatggcgctgcttctggcaatggcgagcataactacggcattggcaacggaaatggtgatgatgtagatattaccgcaccaattacaggtgtttttaatttctctggtaactctttctcactcattggcaattcatcttctagttcaattaatactgccccaactacaacgaccaatacagttaatgacaatgacgtgactgataatggaaataatggaggcgggcttcttggtggaagttctggaaatggctctggtgatggcctgttaaacggcgctgcttctggcaatggcgaacacaactacggtattggtaacggaaacggtgatgatgcagatttcaccttccctcttactggtgtacttaacttttccggcaactcgctttcaggctttggcagttcatctagtgactcggtaaatgttgcaccaaccacagcaaccaataccgtcaatgataatgacacgattgataatgccaacacaggcggccttggtgacggttcgggcaatggctctggcgatggaattttaaatggtgcagcgtctggtaatggcgagcataactatggcattggtaacggaaacggtgacgatgcagactttacgcttccatttactggcggtttaaatattctgggcaatgctttatcaggtatcggcggttcttccaccgactctattaatatttcaccgaccactacttcaaacacagtcaatgacaatgacactaccaacaacggcaacacttcaggtggtgtgattggttctggcgactcaggcaacggctctggtgatggcttattaaatggtatttcatcaggtaacggtgaacataattatggcattggcaacggtaatggcgatgatgttgacgttgttgcccctatcacgacaccacttaatgtattaggcaactctttctcatttattggtggtgaaggtacaggcgatatcttaggtccgattactggcgttattggtggtattggcggtgatggagatatcctaagtccaattactggaatcatcggtggtattggcggcatcggtggggatctgggcgataacccactcacaggtattattcaaagcggtattgacgttctacaaaatttagaaagtctaaaaacaggtttgattaatacaggtattgatacgattgccggaacaattattggtgtgttccctgatgcagagcaccctgtcggcgattttgcagatcttggaaaactacttttcgagacttcacgcgatagtgttaacggtacgcttgaggctatttctgaccttgcaggggctgaccttgagggtgcaagtggctcgattactggtgtaattgatacacttattaccaatggttcaacggcatctaccattattgagtga

SEQ ID NO: 44779 - DNA, 387 bp, Acinetobacter baumannii
atgtttattaaaagtattttatcttcgattactagtattatcccacttcctgaaaatagtaacacaagcagtaatttaggtaacggctctggtgacggcctacttaatggaatatcttccggaaatggtgaacacaactatggtattggcaatggtattgccgatgacgcaagcattactgccccactttcaattccaattaaccttgcgggtaactctattaccctaattggtgactcatcttctagttcggtcaacaactctgcaaccaatacatcaaataccgtgaatgacaacgacaccacctataacggcaatggctcaggtgctggtaatggttcgggcgatggcttgttaaatggaattggttctggcaatggcgagtaa

SEQ ID NO: 44780 - DNA, 1185 bp, Acinetobacter baumannii
atgaaaaggtcattattatttttaggaattctaagtttaactgctggagcacaagtctctgcagctgatttgagttggggtgatccaactttagattcgggtcaatttaaagtgtctggcgcagtacgttctcgttatttacataaagattatgtggtcggggcgaatgaaggttcccaaaatgatgactggcgacttactgatattaaattagtgttgggttatgaaaacccaaactggattgcaggggcagatgctcgctgttatcaatatgatcgcttgtgtgatgcgatttttctaaaaaaagcttgggtagggtataagttatctgaccaacaaagagtcacggcaggtttgcagcctgttgattttggctttggtgaattttggggaagtagttattacgaaacgcttttaaataccgttggtttagaagatattgataatctggggattaaatataaatttgcagatgacaaatacaatttaaccttaggattctatccaactgatggaggaaattataaggggacatcaaaagactcaagccgatatagtggtaatttcgttgaagctgatgatttaactacaggaaccaatatagaagaaaaaaatatgtggattgcgcgggcctctagaaaatttgaacttgataaagctcaaaaactttcgaccgagttaggtggttcagtttggtattctgatttagaaaataaaagaacagatgaagatggacaccgcaaatcatggaatgtatttgctcaaacgcaatatcaagcatggcaatggatgttcttagcaggtaagcaagatgtcactaatggtgataatttattgccaaatagctcaaccattggagcatttgattacccgtatcaagttgctaacaaaggcaaatatctagtcaatgaaattaactatacctttgctcagccattccacaaacttgaaaatattaagccctatatctctcatagccgctttttcaaagatgaggatggatataaagactctgagcgtttaattgcaggcgtttattttaattacaaagccattggtattcagggtgaatatattatgagtaaaaatgatccaatggttggtggtggggcgaatggccttgcacaaggtagcagtaatgattgggataaactgttttatctttcaattggatattatttctag

SEQ ID NO: 44781 - DNA, 447 bp, Acinetobacter baumannii
gtgtctgaaatcagttttgaacgtcttcatcaatttttctgcaaagttccaagtgtacaagaagcccgtatcatggctcatggagcagatggcgaacacgcttggtggtttaagttcagtattgatgtacaacaccctctcgcatggcaaaccgttcaagaactaggtcatgttttaaattacctgtcgacgaatgaacgtttacctactttattctttcctgtgtctccaccaccttacatgaatggtgaagcaaaagattttttatcatgggttattcagtgtaatcaccctgagttttctccagatgtggtttgtgattggcttgaagcgcgtttgccgaatcctgtagatgatgagtcgcagtggaaaattaagacggatttgagtgaaatagaaaagttagatgataaagcgttggatcagttgattccgccagcgccttaa

SEQ ID NO: 44782 - DNA, 1803 bp, Acinetobacter baumannii
atgccacaatacaaagcgcccttacgtgatatgcaattcgttttgcatgaattattaaatgctgaagaacactatgcaaaattacctgactttcaaggtaacgtaagccgtgaattggttgatcaatatttagaagctgcggcagacttctgtgaaaatgaactttctcctttaaaccaagttggcgaccgtgaaggttgtacttggaatgatggtgttgtaactacaccaacaggctttaaagaagcttatcaaaaatacatcgaacttggcttcccgtctttatcagcagaagaacaatacggtggtcaaggcttacctaactctttaggtatcgcaatttcagaaatggtaggtagctctaactgggcatggggtatgtaccctggtttgtctcacggtgcagtacgtacattagaacatcatggttctgaagagcaaaaaaatacttacttaccaaaccttgtttcaggtgtttggacaggtacgatgtgtttaactgaatctcatgcaggttcagacttaggtattatccgtactaaagcagaaccaaatgcagatggtagctatgcaatctctggcgagaaaatctttatctctgctggtgaacacgacatggctgaaaacattatccatatcgttcttgctcgtctaccaggcgcaccaaaagggactaaagggatttcgttattcatcgttcctaagttcaatgtcaatgcagacggatctctaggcgaacgtaatgccgtacgttgtggttcaatcgaacacaaaatgggtattcacggtaacgcgacttgtgtcattaactttgaccaagcaaaaggttatttaattggccctgaaaaccgtggtttgaactgtatgttcaccttcatgaacacagcacgtattggtactgcggttcaaggtttatctgcatctgagtcttctttccaaggcgctttaacttacgcgaaagaacgtttagctatgcgttcactttctggtcctaaagctccagaaaaagaagcagatccaattatcgttcaccctgccgttcgtaacatgcttttaactcaaaaagcgtttgctgaaggtggtcgtgcacttgtttacttacttgctcaatatgcagatatcgttgaaaaaggcgaaactgaagaagagcgtaagtttgctgacaacatcttgtctttattgactccaattgcaaaagcattcttaactgaaacaggttctgaatctgctaagcacggtgttcaagtgttcggtggtcatggcttcatttctgagcatggcatggagcaaatcgtacgtgatacacgtattgcttgcttgtatgaaggtacaactgaaattcaggcactggacttgttaggccgtaaagttttacaaactcaaggtgcaatgcttcgtgatttcactaagattgttcacaagtttgtagaagcaaataaagacaatgctgccatgaaagaatttgttgagccacttgctgcgctgaacaaagaatggggcgacctcactatgcaaatcggtatgcgtgcaatgcaaaatccggatgaagtgggtgcagcggctgtagattacctctacttctctggttacgttactttagcttatctatgggctcgtatggcgcttgtagcacaagagaaattagctgcgggtacaaccgatgttgatttctacaatgcgaaagtaactactgctcgcttctacttcaagaaaattttaccgcgtgtacgctctcatgtagacgttatcgcaggtggtttagacccattgatggcattagatgctgaacatttcgctttctaa

SEQ ID NO: 44783 - DNA, 1875 bp, Acinetobacter baumannii
atgtctaaatcttttcaacctactcgtctggtaggggctatcgctattgcgatggggtgttcacctgttatttttgctgaagatgcaacagatgcaactcagcttgacccaattgttatcactgcttcaaaaagtgctgaaaaagcaagtgaagttccggcacgtattacagtgatttctaaagaagaaattgaaaaaaatcctgctttaaatctatctgatatcttgcaaaaagatgcatctatttatgtaaaacaaaatggtggaattggccaacttgcagacctatctttacgaggtgggcaaactgggcaaacacttttattgaaagatggtgcccgtttaaattcacaaaatggtttcggtccagtcaatccagaatttataaatttaactgatgttgatcaaattgaaattctaaaaggtccagcttcagtacaatatggttcagatgctattagtggtgtaatcaacttaatctcaaaaaaaccaacaaaatcaggcataaatttgactggaatttatggagagaataatacttataagtcgattattaatacagattatgttgatgcttctggattctatgctcaggtaggcggacaacgtttagaatcggatggaacacgaatacttagcattcaagataaaaatgataaagctggctttgatcaaaaaggataccatgcaaaaataggttatcagcaaaatcagattgataccagcatctctattagtgagaatcaaggtaccaatgtatattatgactcaactttaaattccaacacaggaatacgtgatttcaaaaatcaactcatcaattggttaggttcatatcaagtcaatcctgatattaagcttaatgcacgttattccaatattaagaacacaagggtatcaacagatacagattggcaaacctataagcttacatctagtcactataatactgaaacaaatgaaagtgatctaaacgcagtttggaaattcatggaacatcagaatattttagctggtgttacatatagcaagtcagaatatgatgcatcatctactccggaagcgatacgcagtacgaactctacaggttattatttacaacaccaatatcagaagaatggcctcaacactcaagctggcatacgcttagaagataatgattggtttggcacacatactgttggacaaatcgcagtacgctatcagcttttaccacttacaagtatctataccaatgttggtacggcatttaaagcaccaacactagaacatttatatggttcttatggcagtagcttttatagtaatccgaatctcaagccagaaaaaagtgtctcttatgaaattggtttagatcaaaaactaaactacggattatcagcttatatttcaggttattctactgatgtggagaatttgattagctcgggtaagatagatggaaaaacaacctacatcaatttaaataaagcaaaaattcaaggcggtgaaattggcttaaaatgggtactcgacaatctatttgcaaatgctgaatatgtctactcaaaagcacaaaataaagagactaaattagatactccttatcgacctcgtcaaacttatacattgacagtgggctatgatgaaggattgtatggcgtcaatgctgctgtagttgctcactcaaaagcaaatacaagctctgctaatattaaagttccaggttatgcaacagttgatctaaatgctttttggaatatcagctcaaatgtaaaacttttcactaatattcagaatattggtgatgtagaaaatattgtcgttaacgatttcggttcagaatatatcaacggtggccgtcaagcttctgttggcgtaactttccgctattaa

SEQ ID NO: 44784 - DNA, 1050 bp, Acinetobacter baumannii
atgcaagaatttactatctcaaatggttacttctacctttggaatacgtatttaaaagaaaaaggaatagattggcagacacttaatttaagtgaaattcaaacacgtcaagtccaaaatattttatctgcttctatagatgctcaatcttctttagacctttttattgaacttttagagataactgaaacgcgattacatgtgactaatttggctttagagatggcagcctgtattacccctgccaactttggggtcttgggttatatggcgtccagaagtgataccttaggtcaagtggtggagtatattgcaaagtttcatcgtttggtcattgatggtgcacaggttgtccctatacaaattgaacaggatgcctccaaaattcgcctatattggcctttggtcgacgacagtaatattctactaagtgagctgaccttggctgcaatggtacagcttgctaaacagattgcccctgtacatgagtttcttttacagcatgtagagttcgtacaccgagcgcgtggggcagtagttcactatcaacgtttctttcagtgcaaattatcatttgagcggccttactatgcattaacttttgcaagtgaaagtttaaatgttcgccctcaacatgcagacccaactttggtgcaacttttggtgaaacaagctgaagaagctttagttcagcggaaaatacatgccgatttagttcagcaaatacattggatcgtacaggaatactttaagcataagcagcaagcacccaaaatagaagatattgccatcgagttgaatgtttctgttagaagcttgcagcgccaattacaggcattaaacacttcatttaaattaattttagatgctgagcgtatgaaacgctgcgagatattgttaagtcaaaatgaaagtctgactgcaattgccgaccagttaggttattcggatcagtctgcactagcaagagcatataaaaatttaacagggcaaacattattaactcgaaaaaagcaattacagctcatccagaaaaatgcaacgaaatag

SEQ ID NO: 44785 - DNA, 258 bp, Acinetobacter baumannii
atgtccgataaaaattcttccgagtcagcaattttaggctggaaatttgttctgatcgttggtgttttaagtgcgattttccttggctttttctatttagcaatgagtaatgaacctgactatatgccaggtgcacagcgcaaagctcaacaagagcaaatgcagcaaaaggctgaacactctacagagcaacatgctcaacatagtgacaacatgcctgaaatggatatgcaagaacataagcaatcaactcagtaa

SEQ ID NO: 44786 - DNA, 357 bp, Acinetobacter baumannii
atgaacatacaaattaaaagaacttatgacgatgtaagcggtgatgatggaaagcgaattttggttgatcgactatggagtcgagggattagcaaagaaaatgctcatttagatttatggttaaaagaaatagctccttcaaccgaacttcgtaagtggtttcatacagagtccgcagaacattgggatgagttcaaacaacgttatttaaaagaactagaaacaaaccccgcagttaaagagttattagaaatcgtttcacatcataaagtcacacttttatattcggctaaagatgtggaacataaccatgcgattattttaaaagaatacttattagaaaagagcaaaagttaa

SEQ ID NO: 44787 - DNA, 3099 bp, Acinetobacter baumannii
atgtggtttacccgaattagtgtgaagtaccccgtttttaccatcatgatgatgctcagtctaatggtactcgggttagcatcttggaaacgtatgaccgttgaagagtttccaaatattgatttcccattcgtagtcgtcactacgcaatatgcgggtgcttcacccgaagcagttgaatcggatattaccaaaaaactcgaagatcaaatcaataccatttcgggtattaaacaaattacttcacgctcaagtgaagggctttcgatggtgattgcagagtttaatcttgatacgtcttcggcaattgcagcacaagatgttcgcgacaaaattgctccagttattgcccaattccgcgatgaaattgatacgccgattgtacaacgctacgatccatcatctagcccaattatgtcagtcgtatttgaatcgaacagcatgagcttggctcaattaagctcctatgtagacaaaaaaattgtgcctcagcttaaaactgtttctggtgtgggtaatgtcaatttactaggtgatgctaaacgtcaaattcggattaaggttcatcctgaacaattacaaagctatggtattggtattgatcaggtcattaacacgctaaaaaatgaaaatatagaagtacctgcaggaaccttacaacaaaagaattctgaactggttgttcagattcaatcaaaagtcatccatcctcttggatttggtgatttagttattgctaataaaaatggttcccctatttttctaaaacaagtagcaaccgttgaagatactcaagcagaactgcaatcaagtgctttttataatggaagaacagcggtttctgtcgatattttaaaaagttccgatgctaatgtaattcaagttgttgacaagacttatcaaactttagagaagctaaaagctcaaatgcctgcgagtttgaattataaagtcgtcgccgacagctctaaaggtattcgtgcttcaattaaagacgttgttcgcaccattattgaaggagcggtcttagcggttttaattgttttactctttttgggttctttccgttccactgtcattacaggtttaaccttaccgattaccctacttggcacattaacattcatctgggcatttgggtttagcattaacatgatgacactgctggccctgtcactgagtattggtctattaattgatgatgcgattgtggttcgggaaaacattgtcagacatacagagctcggcaaagaccatgtcaccgcggctttagacggtactaaagaaattgggttagcagtacttgcaaccacactcaccattgtggcggtatttttaccagttgcatttatgggaggcttaattgggcgtttcttctaccaatttggggtaactgtaagtacggctgttcttatttccatgttcatcagctttacactcgacccaatgctttccgcacactggaaagatcctataaagaaaaaagaaagtcgactgcaacgtttctttaactatatttctaatctattagatggcctaacgcacaactatgaaaagcttttaaagcttgccttacgctttcgtttcatcacagtcattattgcaattgtttcattggttgtggcattaggcttatcaaaaatgatcggaaccgagtttgtacctacaccagataaaggtgaaattcgtattcagttcgaaacccctgttgattcttctttagaatatacccaagcaaaattacatcaggttgatcagattattaggcaattccctgatgtcgtttctacttatggagtggttaacagtgaagtcgactccggtaaaaaccatgcaggtttaggagtcaccctaaaaccaaaacaagaacgtagtgcagacctgacaacactcaacaatgaattccgtgatcgtttacaaagtgtagctggcatccgagtgacttcagtcgctgctgctcaagactcagtgtctggtggtcaaaagccaatcatgatttctattaaaggatctgatctaaatgaactacaaaaaatctcggatcgtttcatggctgaaatggaaaaaattgatggtgtggtcgatttagaaagctctttaaaagaacctaaaccgactttaggtgtacatattaaccgtgtactggccagtgatttaggtttatctgtttctcaaattgcgaatgcgattcgaccactcattgcaggtgagaatgtcacaacatgggaagatcgtgacggcgaaacttatgatgtgaatatccgtttaaatgaaaataaacgtgtgcttccccaagatgttcagaacctatatctcaactcgaataaaaccaatgcaaatgggcaaaatattttagttccattaagcgccgtagccacaacccaagaaaaacttggagcttcgcaaattaaccgacgtgaccttgaacgtgaagttttaattgaagcaaacacttcaggacgtccaagtggggatatcggtcaagatatcgataaaatgcaaaaagcattcaaattgccagctggttatacctttgatactcaagggacaaatgccgatatggctgaatctgcgggttatgcgttaacggcaattaccctttcgattgtatttatttatattgtgttgggttctcagtttaatagttttattcaccccgctgcgattatggcatctttaccattgtccctgattggtgtcttcctggccttattcttatttaggagtaccctaaatctattttcaattattggcattattatgctgatggggctggtaaccaaaaacgcgattttgcttatcgactttattaaaaaagcgatggaagatgggataagtcgttatgatgctattttacaagcaggcaaaacccgtttacgcccaatcttgatgacaacaagtgcgatggtaatgggtatggttccattagctctaggtctaggtgaaggtggtgaacaaagtgcaccaatggctcatgctgtaattgggggtgtcattacctctaccttattgactcttgtggttgtccccgtcattttcacttatctggatgacttgaaaaactttatgctgcgtcaaacccgacgattcatgtcataa

SEQ ID NO: 44788 - DNA, 2079 bp, Acinetobacter baumannii
atgggctttaaacttaaaaagaaaagtggcaatcgcggtgctaccggaaaatcgagtgtcaattttattgcaaaaatccagtcaaaaattgagcagtttgccagtttatttggggaaagtgaaaagtccaagcctatcctttatgcagcgctgttatgtttagtatgtgcgttaatttcattagcttatctattttataatgtacctcgtcataatcagttaattcgtagtcttggtgagttacgtctgttatctcaaaccatttctaaacaagcaactgaagcaacagagtcgggttctcaagaggcgatcacaaagctacagcaatctaaaaaagactttgatgagaacttacttgaaattgaaaatattcacggtaagtcgaccgatgaatatcaaaaagttgagaaaatatggggtgaggtttcaaaaaatattgatttgatttcatcacatcaacgagttcttaaccagttatatgataccaacatctcgattagtgaaacggttccagagattcaggcagaatataacttgatggtcgaccaaatggctcgccaaggtttgcctagtagtcaggtaattattgctaaaaaccaggtatttattgcagagcgtattttacgttcgattaactcggtgttaagtggtacggacggaaatgtatcaactagtgactttagtgtcgatattgagacttttggtacctatttaaatgctgaactgaatggtaatgccgagttaggtgttgatcgtattgctgatccggctttacgtgaatctttagaaagtattaagtctgaatatgacaaagtcttaaaatctgctgctgcaacggtattaaaaaatggtagccagattgtcaatgttcgtcaggcttcttctcagattttctctaaatcggatgtaatgttggaaagtctaggacatttatctgatgttgcaagaaagaactggctcaccttatttttaggtgctgttcttattctttcattaagcggactaattttctctgtattcaagttaattacactacgtagtgtgatggataagaaacgtgttgctcgattacaggaagaatatgaccgtaaccagaatgcgattttacgtttacttgatgaaattgccgatttggcggatggtgacttacgttcatatgcaactgtatctgaagactttacgggtgccattgccgactcgattaactttgcaattgaccaactacgagatttggtttcacgaattcatgaaacctctcaggaagttgcacgctatacacaagatacacaaagtattactaaccagttagcagaggcatcagaacatcaggcgcaagaaattgcaggtgcttctactgccatgaatgaaatggcacagtcaattgaccaagtatctgccaacgcttctgaatctgcggaagtagcacagcgttcagtacaaattgcatcaaatggtgcacaagtggtaaatcgttcaattgaaggtatggatactattcgtgagcagattcaggaaacttctaaacgtattaagcgcttaggtgagtcttctcaagaaattggtaacatcgtatcgctcattaacgatattgcagaccaaacgaacatccttgcattaaatgcagcaattcaagcatctatggcaggtgaggctggtcgtggtttcgccgtggttgccgatgaagtacaacgtcttgctgagcgctcagcatctgcaaccaaacagatcgaaacactggttaaaacaattcagaccgataccaacgaagccgttatttcaatggaacaaacaacaacggaagttgtacgtggtgcgaatttggcaaaagatgcgggtattgcactggatgaaatccaaaaagtctcgggtgacttggcaaaattgattgcgagcatttccgatgcagcaaaacttcagtcagcatctgcgagtcacattgcaaccaccatgacggttgtacaagaaattacttcgcaaacaacaacggcaacgtttgatactgctcgctccgtatcagagttggcgaatatggcagagtcattacgtgagtcagtaacggactttaaattaccagactaa

SEQ ID NO: 44789 - DNA, 4521 bp, Acinetobacter baumannii
atgaaagaaatattaaaaactttaactgaagcaatgacgctacctgaagatagctattctgaacaagatgctgagtttcttgagatcttcattgaagaaattgaagagatttttgttgatttgcaacctttgataaataaatggatgcagtctgagaatattgctacgctcactgaaattcgtcgtcatttccataccttaaaaggttccggaagaatgattggcgctaaatcttcagctgagcttgcgtgggcagttgaagatacactcaaccgggtaatcaaccaaagcttacaattaacgccaactattcagagctatgtgcagttagtatttaagttctatttccttaaattagtagataattttaagcaaaaacgagcacataccttagatttcagacctcttattttattaggccaacaactacaacaacagcaaagtttagagccagctttagaagagcttttacaactttcaaatacgcttatggccgaaacagtgactggtcttgagctagattatattgaacaagattcgttagccgagccaatcattcaagctacacatactgaaattgaaataaatctagatgaaaccttgaccttatttatggaagaggcggaagaacatttagccacgattcatcaatttttggatcaagagttacatcagtacgacagttataacgctttaatccgcgctttacatactttgcgtggtagctctgcaatggcacaggtcgaaacaattttcgaggccagtaccaaagttgagcatttatttaaaatactgctacaagaagagttatcttctcactctgaagaaattttattattacaagaatatcgtgagtttgttcgagatagcttggaactactatctagatatagttcaagtgaacagctcgaagcgagattgcagcaatttaatcaatcttgggatgcatatgttgagcaacatggtgaccgaacagatccgttaatgccttctcatggcttggtatcgcaattattacaattagatgtttctgaattactggatgcagaattagattttgagaagggtattcgtaatgagtttcctgattatcttgaacgcctaagtgaacaggctgatttattactgcaacatacacattctcaagcaatgttgggtttacatgaatataccagccaactgaaagaaagttatgaagtgctgcttgataaacctactttattacaatcagactatatatttgaaatttatcaaaaagcgcatcaacagctcattcaattatttgatgctttagctgctggtcagcgagtcggtgttgttaagcaacatcaaagtattttagaagaattaaaactttatacgcagtacactccagacctatcaaatgacctgcctcagcaggattcgacatcttttgaaccaatatccaatattgaacaagagccagaagtagtagctactgtagagaatttctcagactctgtagactgggcggtattaggtcaaagtgtgcagcaagatcgacaatatatttcatctacacaagtgaatcgaaattttgatgctgatcttttagatatctttcttgaggaagctgaagaattacttgagggaattgataccgatcttaatatttgggtaggtgagcaagaaaactttgcagctctgaacaacctaatgcgttatttgcataccttgaaagggggagcaaatatggttcaggcaacgtatcttggtttgattgcccatgaattagaaagcatttatgagcgtttaattcaaaagcaattagtagcaacttcagatttaattgattttattcgtttggttcaagatgacttggctgaccgtttacaaatcatgcgtgaacaacaactagattatgcagccccttacacaattaacgcattaaaacgagcgggtcaaaactctaacttccaacctttaccagtggttgaggcatttgatactgaaagtgagatattctctgagcaagaggtgatatctgaagtaataatagatgagataccagtagaacttgaacctgctcttgcagagttagaaactcatcacgatcaggtattcgacacagcggttactgagttagctactccagttgagatgattactacggttacatcgcaagagagtgaaattgcagctgatgaacaggacattgaggctgttgttgaacagacgttcctggaagaagctactgaattgttagaaatggctgaatcgctattaaaacaatggtttgaacagcgtacaaaccgtagtattttgcttcagcttcaaagagccgtgcacagtttaaaaggtggtgcacggatggtgggtttagaagccgtacaagcaattgcctaccaactagaaaatgcttttgaacaatttgcgctacatcacttcaattcgaatatttatgatcatttattagaaagtgcgattgcatggttaaaagatgcaattttcaaccacaattatcagcatttcgatggattacagcaaagtttagaaaatattcaattctttgaaactacaatccagattccgactaagttaactagagcggacttgtttaactcagaaccggtgatgacctttatacaaggtgatggtacagagcctccaccaatgatgggagcgtgggagcaaacagagcgtctggatcagaataatgaaatgatccgtgtttcagccgacttaatcgagaaaatgattgatttgtctggtgaaaactccattaaccgttcacgaattgaaatggacctaagccagtttagccatacactagttgaaatggagttggcgattcaacgacttgccgatcagttacgtcgaatggaaggtgagttagaaacacagattattgctaaacatggaattgaacattctcgttataccgactttgatccgttagagatggaccagtattcatctttaaatcaattgtcgaaatcgcttgctgaatctgcatcggacttggtcgactttaaaaatacgttatctgacaagatcagagataccgaaagtttgcttttacaacaatcacgaattcaagcagaaattcaagaaggtttaatgcggacacgtttggtcccattttcgcgtttattgccgcgtttacaacgaattgttcgtcagacgtctacagcattgaatagacctgctgagcttttcgtaaataatacagaaggtgagttggaccgcaacattttagaacggttagtgactccgcttgagcatatgctcagaaatgcaattgaccatggtttagaagaccgaatgcagcggcaacaagcaaataaaccggaaacagggcgtattgaacttaatattcagcgtcaaggtacggatgttgtggttgtctttagtgatgatggtcaaggcattgatgttgaaaaagtacgtcagaaagcactccttgccggattgatcaagccagaacaagacttagaacagcaagacatactgcaactcattttccatccgggtttaagtacagcagagcaagtcactcagatttccggacgtggtgtaggtcttgatgtcgtgcagagtgatattaagtctttgggtggacatgtcagcgttgaatccatctatgggcagggaacaacatttacgattcgcgtaccgactacagtagcggtaagtgatgccttaatggttaaagtggcagatcaacaatttgcgattccactcgctcaaatcgatcgaattattcgagtatcaccagcctctttagagcagtattttgaaagtcctcaagaactatttgagtatgaaaataaacgttatccattacgttatctttcagaatttgttggcaaccaacccataccacgtctaaatggcgtgatgtattcattacctgtgttaatgattaaagccaataatggccaaactgtggcactacttgttgaccagttaattggctctcgagcacaaattgtagtgaaaccaattggtcaacagttctctagcattggagcaattgcaggcgccacaattttaggtgatggacaggtctgcttaattttagacggacaaaatattgcgcgacaaattcagtcaactcagcgtcataaacaacttagtgaagcaatatatagacaacgagagtctgatgaacgccgtctcatcatgattgtagatgactcagtaactgtgcgtaaggtcacttcccgattacttgaacgccaaggctatgatgtggttacggctaaagatggtgttgacgccatagagcagctagaaaatattaagccagatttgatgctacttgatattgaaatgccacgtatggatggttttgaggttctcaatcttgtacgacattatgatatgcatcaatacatgccaattattatgattacatccagaacaggcgaaaaacatcgtgaacgagcattctcgttaggtgtaagtcaatatatgggtaaacctttccaggaagaagagttactagagaatatcgatgctttacttgtagcgtctgacagtgaggtcaaatcatga

SEQ ID NO: 44790 - DNA, 465 bp, Acinetobacter baumannii
atgaaaggtagcgtaaatacatcattgatcgctaatatggaccaacaagagctacagcatcttattacggtttcaactggttttattgacgcttatatcattgaatgtaacgatcaggtacctatgctattgccacaaaacattgtgttgtctgccatggatgtaaaaaatggcgtaaaacatattgaatggcatgatgtgaagctaccggtctactcagtacataacgcaattgatcaacatgcagtcgcattagtgattgaaggggaagatattagccaacgttttgcattaatctgtaaaactatgccagtttctactcgtctgcgtatttctgaaattgtcgatgaaatggatgagcatgaggctgaacaacacccagcagtatttaaatatgtgcgtatgcaacatcaacgctactatatacctaacttagaatatattgaaaaaacacttggtttataa

SEQ ID NO: 44791 - DNA, 1476 bp, Acinetobacter baumannii
atgaatgaacaactcaatgccacactgatgtcgtgggtacaattttttaatgaacctttatgggattttctggttattttcttgctggccgtcggtattttttatacggtcttaacaggagcagtgcaaattcgcatgttcttgcaaagtattcgtgttatgaaaagcagccgtacagaaggcgaagatgagcatggccttacacctttccaagcgtttgtaactggtcttgcgagccgtgttggggtgggtaacattgctggtgtggcaattgcgatcgcaattggtggcccaggcgccgtgttctggatgtgggtaaccgctgtacttggtatgagctctgcttttatcgaatctactcttgctcaactttttaaggtgagagacagtaatagcaagcaattccgcggtggtccagcctactatattactcaaggtttacgtagtaaaacttttggtgtgatcttcgcgttagcattgatctttacttatggttttgtatttaactcagttcaaatcaatgcaattgctaatgcatcttcgcatgcttggggttgggataaagctaatcttattgcgcatttaggtggtgttgatttagaaatttcatgggttggtcttgctcttgttgtgatggttgcattagcaatctttggtggtattaaacgtatcgctaaattcgcagagatgtttgttcctttaaaagcaggtctttatctctctgtagcgttatatattgcattaagcaactatgcgattttgcctgatgttttaaaactgattgtgactgaagctttccactttaatgctgcggcaggtggtttcttcggtgctgccgtgtcaatggcaatgatgcaagggattaagcgcggtttgttctcaaacgaagcgggtatgggttctgcaccaaatgcggcggctgcgtctgatgtaaaacatcctgtaaaccaaggtttggtacaaatgcttggcgtattcgtagatacattcattgtatgtacaagtacagcaatcatcattttagtttctggcgtttaccaagatgctggtttcgtcggtgttgaattaacccaacgtgcactagagactcaagtggggcactggggagctgacttcttagctgttctattattcttgttctgttactcagctgtattaggtaattatgcttatgcagaaagtaacgtacagttcattaataacaacccgaaagtcatgttcatcttccgtatttttgtattggtgatggtgtatttcggtgcaattggtagtgtgccattagtatggtcaatggcagacttgtttatgggtattatggctaccattaacttggtcgcaattttactcttaacaccaatggctcgtactttgttgaaagattaccgagcgcaattgaagcaaggtattaaagaacctgtatttaaaattaataaatatccagagttgaagaaaaaagtcgattcagatatttggtaa

SEQ ID NO: 44792 - DNA, 510 bp, Acinetobacter baumannii
atgataaaaatagaagatataaatctacttgagcaagggtataagttggtatttgatttaaggtcattttcttcaatcttgatggatgaaaattatatcaaaaatatacagcaaactacgttggataagggaacaactattggccttaaaggtgataaaggtttatatgcaacagctgaatggtgggaaaatatcaaaaatggcaatatagaaacttattgtgtgaaaggagtaatagttgggattaatcaagaaaatccttttatagaggaaaatacaatgattacaattaaagtaaatggaacgaataaagaaagttttcaagatatagtttttactagtgaaagagaaaaaactattagtaaagagctttacaaagctggaaatgagatagtatccatttatattcttgataaattaaaagaagatgatgtttggaattgggtggtagaggagaaattgggtgtttctccattacttaatagagtttacattaagggtaggggttaa

SEQ ID NO: 44793 - DNA, 135 bp, Acinetobacter baumannii
atgaaaaagtcgtcagttaaactcagtcaaacccaatggtttattctgttatggcttggtggttttttagccttagctgtgattgcgggtttgtttaaagtgatattgatttatgctgccccttacttaaagtaa

SEQ ID NO: 44794 - DNA, 765 bp, Acinetobacter baumannii
atgatggacgctataattgctgtgttatcaaaaaatgcattagttactgctcttgcagtaacgggtttaatgatgttcgtttcccatctactatcaaaatatttgacgaaaggaaagctacaaagctctgcaatcgcgattactttaggtttagttgttgcttactttgcaggagtttatacgcagggaaccaaaggtgtttcggacatcgctattttttctggttttgcgctgttgggcggagccatgattcgtgatttagctatcgcttcaactgcatttgaagttgatgttaaagaagtcaagaaagcaggcaaaattggtctcattgcattaatgcttggttgcgttgtgccttttgcaattggggttctggtcgcatggggcatggggtatcgagatcccatttctatgacaacgatcggtgcaggcgcaatgacttatattgtcggtccaattacaggagccgcaattggcgcaagctctgatgtgatcgcactttctattgcgattggattaatcaagtcagttttctttatggtagggacgccactgcttgcgaaatttatgtatctaaaaagtccacgctctgccatggtctttggcggtttggcaggaacaaccagtggcaccgcagcgggcctagctggcactgatgttcgattggtaccttatggcgctttagttgcaaccttttatacaggactagggtgcttacttggaccttctgtcttcttcttaacggttaatgcgatttttggataa

SEQ ID NO: 44795 - DNA, 402 bp, Acinetobacter baumannii
atgattatatatggaacagcaatattagcgatctgccatttattaggcgactatcttggtaacaccttaggcatgctattaggtgttaaagcgaatgtcggtggcgttgctatttcaatgattctcttaattttgtctaaagaattgttggcaagaaaaggttacttacctcaagtcacacaatttggcgttttatattggtctggtatgtatattccgatcgttgttgcgatgtcagcaggtcaaaatgtcgttgcagcattatcgggtggcatgttagggctgattgtctctattgcatcgttaattggcacggttttagtcatccgttatttaaatagaattagtggcgactatgaaacttatgaatggacgttagaaagtaaggaaaaaatagcctaa

SEQ ID NO: 44796 - DNA, 1680 bp, Acinetobacter baumannii
atggaaggatcagttcagaataaagaacgattatggacaaagcggcgtcatgccaaacaactaaaactagagatggcaaaccaatataccgatggtgtggtgattccaactcaagacattattaaagttttggaaaccttaattacaccgggtgacaaagttgtactcgaagggaataaccaaaagcaggctgattttttatcgcgctctttggctcaaaccaatccagatattttgcatgatttgcatatgatcatgccaagcgtagggcgttcagaacatcttgatctgtttgaaaaaggtattgcgcgtaagctcgatttttcttttgctggcccacaaagtttgcgtattagtcagttaattgaagatggtttactagagattggtgccattcatacctatatcgaactatattcacgtttggtagtcgacctcattccaaatgtggtgctctcggcaggttttatggcagaccgtcaaggcaatatctataccggcccaagtaccgaagactctccagcacttattgaacccgcggcttttagtgacggtatcgtgattgttcaggtgaatgaactggtcgatgacgtctcagagttaccacgtgtcgatattcctgcttcttgggtggattatgtagtggttgcagaccagccattttatatcgaacccttgtttacccgtgacccgaaacatatcaagcctgtgcatgtactcatggcaatgatggcaattcgcggaatttatgaaaagcataatgtgcaatcgttaaatcatggcattggttttaacactgcggcgattgaactgattttaccgacctatggtgaatctttaggtttaaaaggaaaaatctgccgaaactggactctgaatccacatccaaccttaattccagcgattgaaacaggttgggttgaaagcgtgcattgttttggtaccgaactcggtatggaaaaatatgttgcagctcgttccgacgtattttttacaggtcgtgatggcgctttacgttccaaccgtatgatgtgtcagcttgcaggtcagtacgccgttgatttgtttattggcgcaactttgcaagttgatggtatgggccattcttcaactgtcaccaaaggtcgtttggctggtttcggtggtgcaccaaacatggggcatgatccacgcggacgtcgtcatgatacacctgcatggttagatatgcgtttgcaaggtgccaatgaaaccgaaacttatttggcacgtggtaaaaagttagttgtacaaatggtggaaaccttccaagagggtggcaagccaacttttgtagatcgtctcgatgcgattgatgttgctaaaacggcaggcttacctttagccccgatcatgatttatggcgatgatgtgacccatttactgaccgaagaaggcattgcttatctatataaagcaagcagccaagaagagcgtcaagccatgatcgctgcggtggcaggcgtgactagtattggtttaactcaagaccctaaaacaacagcacgtttaagatatgaaggtctggtggtattccctgaagatttaggtattcgccgcaccgatgccacacgtgaacttttagcggcgaaaaatattgccgacttggtgacatggtcagatggcttatatcaaccacctgcaaaattcaggagttggtaa

SEQ ID NO: 44797 - DNA, 636 bp, Acinetobacter baumannii
atgtatatccctgatgattttgcagaaaaccgtttggatgtattgcattctcttattgcagaacatccatttggggtgctttttacgcatggaagtaatggcttagatgcaaatcatcttccattcgagttgcaagcaaatgaagggaaatttggcatgctacatgcccatgtgtcacgaaataattctgtttggcaggacattaaaaatggagatgaggtattggtcgtttttcaagcaggcgatgcgtatatttcaccaaactggtacccatccaaacatgaacagcacagacaagtacccacatggaactatagggttgtgcatgtttatggcaaagtgacgattcgagatgatgagcgttatgttcgtggtgtggtggctcgcttaacccgcacccatgaagcttctcaacctgaaccatggaaaatgtcagatgcaccaaaagactatcttgaaccgatgttaaaagccattgtaggtattgagattgaaattaccaagctgcaaggaaaatcaaaacttgggcaaaacaaagaacgccgagacattttaggcgcggcagatggcctatcgaaatctggtcatcaaactatagcgaatgccatgtacagtgtggctgagttaaataaataa

SEQ ID NO: 44798 - DNA, 1491 bp, Acinetobacter baumannii
atggcaagaatggcaaaagttgtggaacttccgtctattgcaaagattgataaaagccaaggaaagattagtgctcaactgactcaagctttacgtgaagctgtacaaagtggtgatttacaacccggtgatccgttgccttcttctcgtgaactggctttaaccctaggtgtcgctcgcggaaccattattgaagcttatgatcagcttttagctgaaggtgtgtttgactctcaaccacgaactggcacttatgtgtctcatgctttggttaaaacatctgtaatacaacattcatcaaaagaaaataaacctaactcgatctctttgaccaaatcggcacgttcttatgccaaagtgcttgatgaatttaagccacttccccatgttccttttgcggtatctgtccccgtcggtcgtactcaaccaagtgatatttggcgtaaatttggtaataaatatagatcacggggagcaggtgctccatcaggttatggtgaacctcaaggggtgttatcacttagagttgctatagcagactatatacgacggtcacgttctgtccactgcgaacctgaacaaatcgtgattacacctggcattcaacagtcactttatatttgcagccaaattttatttgaggcgaaagatgaagtttgggttgaagatccggcttatcgcggtacaacagccatttttgagcatactgtacaaaacattcgaatggtgcgtgttcctgttgatgaagaaggtattcaggttgaaaccggaattaaactttctaaacatgcgcgtgctgcttttgtaacaccctctcaccaatatccactgggtatgccgatgagtctagcaagacgtacagctttattagcttgggcaaaacagcaaaaagcatggatcattgaagatgactacgacagtgaacttcgctataacggtcagcccttcccatctttgcaaggcatggcacctgaccaagtcatttatcttgggactttcagcaaagtcttatttccatcgcttaggcttggctatgcagtgttgcctaaagaactggtagctcctttttgtgggcttagagtcttaattgatagacacccgcctgctgccgaccaacacgttttggctgcttttattcaagagggttatttagagcggcatatacgacgtactcgaaatgtctatgcagaagttcgagaatacattattggtctgattgaaaaatacatacctcaagaactggcttggttacagccgggcgatcaaggcatgcatatggtgttatggcttgctcaacatactaatgatattgacgttgcaagctcggcagtcgatgcaggtattgccatcaaagcaatttcaccgacattttcaaaagagcggcgacgttcgggtttaattgtcggcttaggcgattttgaacccgaactaatgcaacaagctatcaaaaaattatcaaagattattcaacagcacgtcaaatcaatgtag

SEQ ID NO: 44799 - DNA, 666 bp, Acinetobacter baumannii
atggaacttgattatctatttcaagcgagtcacctcgaacgtttaatgtggggactttgggcaacggcaaaaattgcatttatttcagtgtttttctctgcgattttcggcacagttttcggcgtcattatgacctctaaaaacatagtcgttaaagcattgtgccgcctgtacttagaagccattcgaatcattccaattttagttttgctgtttgtgttttatttcggctttgcgacatggtttaactggcagttttccgcaatgtgggtatgcgttgttgtatttgttttatggggtacggcggaaatgggcgatttggttcgtgcagccattacttcaattgaccagcatcaacgcgattcggcctatgcactcggactaactcatgttcaagctttgatctacgtcatttttccgcaaagtctaaaacgagtaacaccaggcgcgattaatttatttactcgaatggtgaaaaccagctctttggcagttttgatcggggtggttgaggtgattaaagttggtcagcaaattattgaaaattcgctgttaaccgtgccgagtgcttctctttggatttatggttttatttttattttgtattttctgatttgctatcccttatctcgtttggcggcacatttggaaaaggtctgggagtaa

SEQ ID NO: 44800 - DNA, 975 bp, Acinetobacter baumannii
atggctaatactagatatgaagatgataacaatagttcaggtacttcaaatcgtggatttgcaagtatggatcctgaaagagtcagagaaatagccagtaaaggtgggcgagctgcacatgccagtggcaatgcgcatgaatttacttcagaagaagctcgtgaagctggccgtgctgcacatgccagtggtaacgcacatgaatttacctcagaagaggctcgtgaagctggtgctttaagtcataaaaacgatgatcgtaatggtcgtggtcgcagccgttatgatgacgacgaagatgatgaccgcggccgttcaagcggtcgaggccgtggccgcagtcgttatgatgatgacgacgaagatgatgatcgcggtcgctcaggcggtcgaggccgtggccgcagtcgtgatgacgacgatgaagatgatgatcgcggtcgctcaggtggccgaggtcgtggtcgcagtcgttatgatgacgacgatgaagatgatgatcgcggtcgttcaggtggccgaggtcgtggccgaagccgtcgtgatgacgacgatgaagatgatgagcgtggtcgttcaggtggtcgaggccgtggccgcagccgccgtgatgacgatgatgaagatgatgatcgtggccgttcaggtggccgaggccgtggtcgcagccgttatgatgacgacgatgaagatgatgagcgtggccgttcaggtggccgaggccgtggtcgcagccgtcgtgacgatgatgacgaagatgatgaccgtggtcgttcaggtggtcgaggccgtggtcgcagtcgttatgatgatgacgatgaagatgatgaccgtggtcgttcaagtggccgaggccgtggtcgcagccgtcgtgatgatgatgacgacgacgatgaccgccgtggtcgttcagatgggcgtggtcagaactctcgtaatcaaaaacgcgatgcttatggacgctttacgtcttaa

SEQ ID NO: 44801 - DNA, 480 bp, Acinetobacter baumannii
atgttcaataaatgttgcgaattattagcaaaggaaaaaattaaaattgcattttttgaaagtgcctctgcgggttaccttgcttatcgtttctctttaagtccttattcaggcgatattctgattggaagccttgtaagttacgaccttcgcgtaaaggaaaataccttacatatttcagaagagcttattgaaaaatatactgcagaatcaatgcaagtaactgttgaaatgattaataaaggtaaagaacttttacatgctgacctgtatgttgcctgcacaggtcttttgaaaaaaggcggctctgaaacaccagaaaaacctgtaggtactttcttttactcaatatattataaaaataatttttataattttagacgtgttttaagggggcctgcctttttaaaactaagaaagttgatttactatgttactcaagatataaaacttattatattagaagacaaaagacgttaa

SEQ ID NO: 44802 - DNA, 1239 bp, Acinetobacter baumannii
atgaaactttatcaagctaccctattttctttggttttaattacgagctttgcacaagctgatgtagaaaagagccaatggattaccacttggtctgcgagccctcaaaaagtctggaataaagacttcgtttttccaacactcattccagagcaagtatctaatcagactattagacaaatgagcaaaattagtttgggcggtgaagctgttcggctcgtttttaccaatcaatatggtaaacagccactttatattgatcaaacaacgattggtttagcgaacgcagcaactctaaaatctaagagcacctatcccgtttatttttctggtcaacttaaagcaagaattttacccggcaaacaactcataagtgatccaattcagttgcctgtacccgatcatgctcaattggtgatgaatagctttattcaaaagtctacaacgtttaaaacatttcattgggatgccaaacaaaccagttggctgattagtggaaatcagacaacaaatttaactacgccaaccgatgccaaaacaacgacggcacggttattactgtctgcaatagaggtaaaacccaaacaaaaggctcatgtagttgcagttgttggagactcaattaccgatggggcgactgcaaccttagatgcaaatacaagatggaccgattttttagcgaaacgtttatctgcacatcgtgtggccgtgattaatagtggcatttcaggaaatcgattacttaccgatggtatgggtgatagcgttttaaaacgtttaaacagtgagatatttcaatattcaggagttaaaactttaattgttttggttggtatcaatgacatttcatggcccggtacagcttttgctcctaaacagcaaataccctcttttgaggcgctcactcaaggttatcgacatgttgtaagtgaggcccataaacataatattcaggtgattggtgcaaccttacttccgttctctggtgctttacctaatacccctttagataattattatcaacccaacaaagatcaattacgtcagcgcattaaccactggatgagaaccagtcatacctttgatggtgtgcttgatcttgataaaggcttaaaagatccaaaacatcccaatcgattaaatccaatttatgattctggagatcatttacatcctaatgatcgcggcaatcagcatatggcagaattggtagatttagatcaaattattaaaaattaa

SEQ ID NO: 44803 - DNA, 1803 bp, Acinetobacter baumannii
atgcctttatacaaagctccattacgtgatatgcaatttgtactgcatgaaatgcttcaaacagaacaaaactatcaaggtttaagcaaatatcaggaaagcgtaaatcgagaattaattgatcaatatttagaggcagcagcagatttttgtgaaaatgaattggcgcccataaatcaaaatggtgatcaggaaggctgtcatttaaatcaaggcgtagtcacaacgccgaaaggttttaaagaagcctaccaaaaatatgccgagcttgggtttacttcattaaccgccgatccggaatatggtgggcagggcttgccgacattgctgcggattgcgatttctgaaatgttatgtggttctaattgggcttgggcaatgtatccgggattgtctcatggcgcaatgagaacaattgagcatcatgggactgagcaacaaaaacaaaagtttttgactaaacttattagtggggcttggaccggaacgatgtgtttaaccgaatcacatgcaggctcagaccttgggttaattagaacgaaagcagaaccaaattctgacggtagctactccattacaggcgaaaagatttttatttcagcaggagagcatgatctttctgaaaatattattcatattgttttagcccgtttgcctcaggcacctgcagggactaaaggtatttctttatttattgtgcctaaatttaatgtgagtgatgatggtcaggtgctggaccgtaacaaagtcgtttgtagcgcgattgaacataaaatggggattcatggcaatgccacctgtgtacttaattttgatggtgccaaaggttatttgattggtccggaaaatcgcgggcttaattgtatgtttacctttatgaataccgcacgtattggaacagccgtacaagggcttgctgcttctgaaatctcatttcaaggcgcattaagttatgctaaagagcgtctcgctatgcgttcgttatctggtcctaaatatcctgacaaaaacgccgacccaattattgtgcatcccgctgtacgttcaatgttaatgacacaaaaagcgttttctgaaggtggccgtgcactggcttactttctagctcagcatgtcgatattgtcgaaagctcaaacgatcaggaacagcaaaaacactccgacgaattactggcttttttaacgccaattgctaaggcctttttaacagagtcgggtaatgagtctgcaaagcatggcgttcaagtatttggcggccacggctttattgttgagcatggtatggagcaaattgtacgtgatgcacgtatctcgacattgtatgaaggaacaacagagattcagtctttagatctgctggcacgtaaagtcctcaagtcggaaggcaaacttttaaagaacatgactgatttaattgatccgtttattagccagcaccaatccaatgaagtgctgaaaccttatctagaaaaattagctgagcttaagcagcaatggctgtcactgaccaaatcgattgcagagaaagccaagcacaaccctgaagaaataggagccgcttcagtagattatttttatttttccagttacgttgtgttcgcgtatttgtgggctcgaatggcacaagttgcccatgaaaaattagaatcgggtacacaagaggaagctttttataaagcaaaattaacgacagctaagtttttctatcaaaaacttttacatcgtacacagagccatgccgcttctattgagtctggagctgaatctgtgatggagctcgatcaagatgcttttgcattttag

SEQ ID NO: 44804 - DNA, 435 bp, Acinetobacter baumannii
atggaaagcccgaaatacacaggtcttgagtttttaaccgctttaaaaaatggtgaagtttctccatcacctatggctcacaccataccgatggaactcgttgaagtttccgaaggtaaagcaacttataaagttactcctcgcaaagaacatagaaatatacaaggcggtgtacacggcggcttttgtgccacagctttagatacggcgacaggcagtgcggcccataccctacttgaacatggtgttggctatggaaccattgatttaaatgtaaaaatgatccgccccatgcaggttgatacgtcttactatgcgacggccgagttgatcaatgcgggccgcaatattattagtacccaaggtaaaatcgtagatgagaacggcaaagtgtatgcttttgcttcggcaaccttaatgattattcgcaaataa

SEQ ID NO: 44805 - DNA, 1218 bp, Acinetobacter baumannii
atgaaaacaatagttgagcccaatgcagaaaatatactgtcaaaaagctttatttttatcatggcaatgacatgtggaatttgtgcgggttcaaactattataatcagcccttaatttattccattgcagaagcattaaaagtcaatgccgaacaagtcgccttaactattgtgattagccaactgtcatatgcagttggcctttttatattggttcccttaggcgacttttttgaaaagcgaagttatatttgcttgctcatgtgttgtacaggccttgcccaagtagggctatctttaagtcaaaccttgccagctttatatggctttacctttttagcgacattcttttcgattgcgactcaagttttggttccttttgccgcaggtttagccagcccgaaaaaaagtcctcaagttgtaggcactctcatgagtggtttgttcttgggaatattattggcacgctctattgcaggcttactttctacagtttggtcttggcatgcggtttatttaattagtggaattgtcattttggtgtttgcttgggtaatgtgggtgaagttgccagttgcgcgtaagtctcaccaactcaatattctacagatttatagttcattattttcattagccgttcatcagcctcatttactacgccgtggtttggcaggggggattggctttggtattttggctcttatttttaccaccatgacttttattttggcgaatgagccttatcactttaacgatttccagattggtttatttggaatagtgggcttggccggtgtatttgcgaccccatgggcaggtaagaaaattgcagcaggtcttgaaaataaaattgcagtgatttgcatggggttattaatgagtgcatggatacccctattttttgcgcagcagtctctggttgcctacgctgttggtgtgattatggcgtacttcggtttgtcagcatttcatgtgcttaaccaaaatttggtctatcgaatttcggccgaggcacgttcccgtattaattcaatttatatgaccttatattttggcggagccgccttaggttcttttattgcggtgtatgcttggaaacactggggatgggaagcatgtgcaaccttagggctagggttagcaatgttaagtttcttgattgatcgcttagatttttatgaaatgaacaaaattgcaaagcaagaaaaagctccataa

SEQ ID NO: 44806 - DNA, 1317 bp, Acinetobacter baumannii
atgaaaaaattaattttagctgcagcttgtgctgcggcttcagggactatttttgcaaattcttcagatacgacagaacaaagaattaatttgctagaaaccgagctgcaaaaattaaaagctgaacttgctgctcagaaacaaactcaaactaatttacaggtcaaacaggttaagatcgaagagaacattgaaaaaactaaagcaacggtaacagaaaagcctgttgctccttcatgggttacttggacggataacgttaaggtttacggtattgcccgtattgatgcagcggtcgattttaaatcatcacctgactcgggcggtagaacgaccagcagtctgtaccgaacaccttttgaaaatgaaaaacgttcgaatcatgcgcgttcggatgccatgattaatgcaagccgactcggtgtttattttaatagcccaaataaagcggttacaggaaatatcgaagccgatttctttgatagttctaacatgggaacgggggatggtaaattccgtatccgtcatgcttttttcacttataaagactggacctttggtcaaacatggtcactcatgtctaacatggaaacccgtacagaagctgttgattacacccaatttgtgggaacttcctatacgcgtactcctcaaattcgctatgactggaaaattgatgccaataatgatttaaaactagctttggaatatacaggttcgagagtctcggcattgccatctttaacggggcgctatacttttaaacatgggcctttaactgctcttgcgcaaggttttatcaatgaaaaatccgtagatgtcgcaactgctacggtgaagaaagtaagctggggtgctggaggcggcttaaaatatcaactcacgccacaacaatcgctacaagcaaattatcaatatattgtcggtgatcaaaaatttatgccgtacaccactcaaagtggactggcaaattcaacaagtttaaatgctgcgggagatttctccttaaacgaagataaaacagatttggtgatgaataagttgaatagcgtcaatattggctattcatataaatttaatgagcaatggcgtgcgaacttatcggcctcaatgtttgattatgatgatgacacggcttatgccaaactcaacccagatgctaataaacgcttaacggactatgctgctaacgtcttttattctccaattgagcaaatggatattgggatggaatatcaccaaggcaaacgtgaagtgttcgatggccgaaccgctgatgtgtcacgcataaactttgtatcaatgtataaattctaa

SEQ ID NO: 44807 - DNA, 654 bp, Acinetobacter baumannii
atgtcagttcaaaagcgttctcgtgaagatattgccaagctcattgccaatgacattccggaaggttcctatgtcaatttaggcattggcttaccgaccaacgttgctaaatttttgccaaaagacaaagaaatctttttacattcggaaaatggggttttggcttttgggccgccgccacagcctggtgaggaagatcaagatttggttaatgctggaaaagaacttgttactttgttagatggtggatgctttatgcatcatggtgactcgtttgacattatgcgtggcggccatttggacatttgtgtgatcggtgcattccaagttgcggtaaatggagacttggcaaactggcataccggtaaggcagatgatgtgccggcagttggcggtgctatggatttggcagttggtgcaaaaacgatttatgtctatatggagcatgtcactaaaaaaggtgagcccaaaattgtaaaagaactgagctatccaataacgggtgagcagtgtgtaaaccgtatttataccgatttatgcattattgaactcaaagaccaaaaagcttacgtcaaggaaatggtagacggcttaacttttgatgaattacaggcagtcactgactgtgaactaatcgatgcacgtgtagcctaa

SEQ ID NO: 44808 - DNA, 669 bp, Acinetobacter baumannii
atgataaataaaatcaccagtgacattgaaccgattttaaaagctattcctgatggggcaaccatcatgacaggcgggtttggtgtgacggggcaacctgctgaattaattgaagccttaatcgatttaggaaaaaaagaactcaccattgtaaataacaatgcagcttctggtgatcgtggtttaacaaatctgattattgccggttgtgtcaaaaaaatgatttgttcatttccgaaatctgctggatcaaccgtttttcaagacttatatagagcgggaaaaattgagttagaactggttccacaaggtaatttggcttgtcgtattcaggccgcaggtgctggtctcggggctatttttactccgactggttatggcactaaagttgccgaggataaagagacccgaaccattaacggtaaaaactatgtgcttgaatatccacttgaagctgattttgcactgatttatgccgataaagccgatcgctggggcaatttaacttaccgcaaagcagcccgtaattttggcccaattatggcaaaagctgccaagaccacgattgttcaagtgaatgacaccgtagagctaggaacgcttgaccctgagtgcattattacaccaggaatttttgttcagcacgttgtaaaagtaggagatatctaa

SEQ ID NO: 44809 - DNA, 1314 bp, Acinetobacter baumannii
atgcctcatgttccttctgaggatatggacatgacaacaaagactgttacagagaatatgagtagcactgaagctattcaaacaccaaaaaagatttggattacagcttttatattcgctttttttacacttttatgtgacggggccgacttaggttttttggcattaagcctcactagtcttaaagcagagtttcatttaactggtgtgcaagccggaacattaggaagcttgacactatttggttcggccgtgggtggccttattggtggttgggcttgcgaccgttttggtcgggtccgcattattgttttctttattgctttttcttcgatattaacctgtgcactcggctttacacattcttatatgcaatttgcagttttaagaacaataggcgccatgggcttaggtgcactttatattgcctgtaacattcttatgtctgaaatggtgccaaccaaacaccgttctaccgttttagcaacgctgatgacaggttatacactaggttctttattagcgacattactagcaggtcatattattcctgaacatggctggcgttttctatactggattgcaattacgcctgtggttttgtcagttttgatgcatttttgtgtacctgaacctgagtcatggaaaaaagctcgtcaactaaaagcgctagaagtcgctcaaagtaaccaacctaaaaaacgtcaaaatccatatcttgagattttaagagataaaaaacatggaaccatgtttattctttggattattagtactggggcattgcaatttggttattacggggtaagtaactggttacctgcttatttagagtctgaccttggcatcaagtttaaagaaatggcgatgtatatggtcggtacattcctaattatgatgtttgccaaagtaatcgcagggatcgttgccgataaattaggacgccgcgctgtatttgctttcggaaccattggtacagccttatttattccagtcattgtttatttaaatacaccaaccaacattttatggatgatgctgttcttcggtttcctttacggtattccatatgcaattaatgccacctatatgacagaaagcttcccgacttcaattcgaggctcggcagtgggcggtgcttataacattggcaaagtactttcaattttctctccattaacaattggttatctatcgcaaaacggttctattggtttaggactcttggtgatggctgcagcttattttatctgcggggtaattccattgttatttattaaagaccgattatttaacccgcaaaaggcagagtga

SEQ ID NO: 44810 - DNA, 1155 bp, Acinetobacter baumannii
atgatccgtgatgaagggatgttggagcagttactttcaacaattcgagattttgtaaaaaatgaattgatccctcgtgaaaacgaagtggtagagaaagacaaaattccagatgacattgtgcagcaaatgcgtgagcttggtttgttcggtcttacaattcccgaagaatatggtggcttaggcatcactatggaagaggaagtcagagttgcatttgaacttggacaaacttcaccggcttttcgttctttaattggtactaataacggtattggctcaagtgcaattttgattgatggcacagaagagcaaaagcagaaatatttaccacgttacgcaagtggcgaaattattggttcattttgtttaaccgagcctgaatctggctctgacgctgcctctttaaaaaccagtgcaataaaagatggtgacttttatgtgttaaatggcaccaaacgttttattaccaatgcaccccatgctgcaactttcactgtaatggctcggacgaatcctgaaattaaagggtcgggtggcatttcagcttttttagtcgaggccaatacaccgggcattacattaggcaaaattgaccaaaaaatggggcaaaagggttcacatacctgtgatgtgatttttgaaaattgccgtgtacctgcttctgcactcattggtggcgtagaaggtgtcggttttaaaacggccatgaaagtgcttgataaagggcgtttgcatattggtgcctatagcgtaggtgttgccgaacgcatgttaaacgacgcactgcactatgcgattgagcgtaaacagtttggtcaacctattgcaaacttccagcttattcaagccatgcttgccgactcaaaagccgagatttatgcagctaaatgtatggtcctagatgcagctcgccgccgtgataatggcgaaaacattagcacagaagcatcttgcgcaaaaatgtttgcgactgaaatgtgcggacgtgttgctgaccgctgtgtacagattcatggtggtgcgggctatatcagtgaatatgcgattgagcgtttttatcgagatgtgcgtttgttccgtttatatgaaggaaccacgcaagttcaacaacttattattgccaaaaacatgattagggaagctacagcctaa

SEQ ID NO: 44811 - DNA, 789 bp, Acinetobacter baumannii
atgagtgtgtcaacagggaataatttcgtagaagtcgacttttctattcaaaaaatagcggttgttaaaattaaccgcccagaagcaaaaaatgctttaaacggtgaagttcgtaaacaactcgcacaagtttttaccgagttaagttttaacgatgagatcaatgcggttgtgctcacaggcggtgaagaagtctttgctgcaggtgcagatctaaaagaaatggcaaccgcaacttccacagaaatgttattgcgtcatacagaacgttattggaacgcgattacccagtgccctaaacccgtgattgctgccgtaaatggttatgcattagggggtggctgcgaacttgcaatgcacgctgacattattattgcaggtaaaggtgcaacctttggccagccggaaattaaagttggtttaatgcctggtgctggcggtacacaacgtttattccgtgctgtgggtaaattccatgccatgcgcatgattatgacaggtgccatggtgaaagccgaagaagcttatttgattggtcttgtttcacaagtcacagaagatgaccaaactattccaactgcaattcaaatggcacaaagcctagccaaaatgccgccgattgccctgcaacaaattaaagaagttgcgcttatgagcgaagatgttccattaaatgcaggcttaacgctagaacgaaaagcattccagttattgttttcgaccgaagataaaaatgaaggtgttcaagcttttctcgaaaagcgtaagccgtcgtatcaaggtaaataa

SEQ ID NO: 44812 - DNA, 762 bp, Acinetobacter baumannii
atggccagaaaagtattaattagtgcaggtggttcagggattggacgatgcattgcagaagcatttttaaacaatcaggatgaagtttttgtttgcgatattaatgctaaaagcctagaacaatttcaacaagattatccaaatttgcatatctacacatgtgatttagctgatcatgagcaaattaaactcatgtttagtcaagccattcagaaacttggcggtattgatattttagtcaataacacaggcatctcaggcccaaccgttgcagcagatgaattaagttttgaagattggaacacggtgattaatttaaacctgaatagcacttttttaattagccagttagccatttcctatttaaagcaagcacaggcaggcgtgattataaatatgtcatctattgccggacgcttaggctatccatatcgattggcctattccacttcaaaatggggactgattggttttaccaaaacgctttctatggaactcggtgcagataatattcgagttaacgctattcttccgggtgcagtcgatggtgatcgagttcaacgtgtattacaggcccgtgccgatgtagcgcatacctcacttgaagaagtgactcaaaatgcactgaaaaatcagtcactcaaatattttgtcaatccaaaacatattgcagatttatgcctatttttagcatcagatagtggccgctcaatttcagggcaaatcttaccaattgatggtgataaacaatgcttaagctaa

SEQ ID NO: 44813 - DNA, 1524 bp, Acinetobacter baumannii
atgacttatgatattaaaagcatggctgtgattggtgtaggtgtcatgggcagtggtattgctcaaattgctgcacagtcaggtcataccacttatttatatgatgccaaagcaggtgcagcagaacaggctaaagaaaaactggctgctacatttcaaaagttagtcgacaaaaataaaattacatctgagcaagcaacagcggcaaataaccatttaattgttgctcatcaaattgaagatttaaaaaattgtgatctgattgtagaagcaattgttgaacgtctcgatatcaaacaaagcttgatgcagcaacttgaagacattgtttcagataatactattttagcctcaaacacctcttctctttctattacagccattgcggcaaattgcaagaagcctgagcgtgttgtgggttatcacttttttaacccagttccactcatgaaagtggtcgaagtcattcgtggtttaaaaacagatccacttattattgatgctttaaacgatttatctcgtgcatttggccatcgttctgttgtagcgaaggacacccctggatttattattaatcacgcgggccgagcttatggcaccgaagcgctcaaaattttaaatgagaatgtctgtggcatcagtgaaattgaccgaattttacgtgacggcgttggttttagaatgggtccttttgagttactcgatttaactggccttgatgtctcgcatcctgtgatggagtcgatttatcaccaatactatgaagaagctcgctacaaaccaaacccgctgaccaagcaaatgcttgatgccaagcaacttggacgtaaggttaatcaaggtttttataattatgaaactggctcaaaaacaggtgaacaacctgcgaagtttgtagagcgtttagcaaaatatccaaaagtttgggtcgctgccgatttcttagacgataaaaaacagctcgaagattatttaactcagcaaaatattaccttagacaccaatttggaaccacaaacagatagcttatgtttgctcgcttgttacggtgaagacacaacccaagcggcgacccgactagggattaacccagaacaagccgttgctatagacatgctttatggcattgcaaagcaccgaaccttgatgccttcacttgttaccaaacctgaataccgacaagcagctcactctattttcaatctagatggaaatatggtcagcatgattgctgaaagtattggctttgttgcgcaacgtgttttagcaatggtcattaatctaggttgcgatattgcccaacaaaaaattgcaacggtagatgatattaatgctgcagtacgtcttggcttaggctatccatttggaccaattgaatggggcgatcaagtcggtagcgaaaaaatcttacttattctgaaccgtataacagcacttacgcatgacccgcgttaccgccctagcccatggttacagcgccgtgtcgcacttcatttacctcttacttttactcacgagtcttga

SEQ ID NO: 44814 - DNA, 1206 bp, Acinetobacter baumannii
atgttaaatgcatatatttatgatggtttacgtagtccatttggccgtcatgcgggtgaacttgcctcaattcgccctgatgatttagcagcaacggtcattcaaaaactacttgaaaaaactggtgtaccgggcgcggatattgaagatgttattttaggcgacactaatcaagcgggtgaagatagtcgtaatgtggcacgaaatgcattattacttgcaggtttacctgtcactgtaccgggccagacagtaaaccgcctatgtgctagtggtttaggcgctgtgattgactcagcacgtgccattacttgtggtgaaggcgagctgtatattgcaggtggtgtagaaagtatgtcacgtgctcccttcgtgatgggtaaagcagaaagtgcttatagccgtgatgcaaaaatttatgacaccaccattggttctcgctttcccaataaaaaaattattgcgcagtacggcggtcattcaatgcctgaaacgggcgataacgttgcagccgagtttgggattagccgcgagcaagctgatttatttgcagctcaatcacaagccaaatatcaaaaagccaaagaagaaggtttctttgccaatgaaattacaccaattgaggttttccaaggcaaaaaattgccacctaaactcgtttctgaagatgaacaccctcgtccaagctcaactgttgaagcactcacaaagttaaaaccactctttgaaggtggcgtggttacagctggtaatgcttcaggtattaatgatggtgcagcagcactcttgattggttcagaagcagcgggtcaaaaatatggcctaaaaccaatggcaaaaatcttgtccgctgcggcggctggtattgagccacgcattatgggtgcaggtcctattgaagccattaaaaaagctgttgcgcgcgctggccttactttagatgacatggatattattgaaattaatgaagcctttgcttcacaggttttatcttgtttaaaaggcttaaatgttgattttaatgacccacgtgtgaacccgaacggtggcgcgattgctgttggtcatccacttggtgcctctggcgcccgtcttgcgttaacagtagcgcgcgagttaattcgccgtaagaagaaatatgccgtggtgagcctatgtattggtgtaggtcaaggtcttgcgatggtgattgaaaacgtttcataa

SEQ ID NO: 44815 - DNA, 843 bp, Acinetobacter baumannii
atgtctcaaaacacggaaactgaaaaaccaataaattttgatgagatacgtttagatcctatttcgcatatacatcgggaaaacaacccgcaatttattgcttctttagcacgcggtttagaacttttaagatgcttttctgcaaataatcaggtgcttggcaaccaagaattagcaaaaatgacaggtttacctaaaccgaccattgcacgtattaccaatacccttgtttcattaggttatttaaaacaattgcctaactcgaccaaatacacactagatattggtgtcttatctttaggatacgcagcattatctaacatctcgatacgcaatattgctcatcaatatatggaagagatgagccagtatgttcaagcgcctgtagcgatggcaacgcgtgatcgcttaaatatggtgtatatcgatgttgtgcaaattgaaacagccttaaatatgcgccgtccaattggttcgactttaccactgcatagcagttcgatgggacgagcatgcttggctgcgactcctgaacgtgagcgcaactttctacttgatgcattgaaacaaaaaaatccagaaaactggccagccataaaacgctcattagaacgagctttccgtgattatcaagattatggatattgtttgtcgttaggtgagtggcataaagaagtgaactcggtggctgtacctttggttagttctaaacacggtctttatgtttttaactgtggtgcgccaagttttcatttaaatccggaaaaacttgaaggtgaaattggaccacgtttaatccacatggtgcataacattcaagatgccttgaatgaaacgcactaa

SEQ ID NO: 44816 - DNA, 1185 bp, Acinetobacter baumannii
atgactataggcatgatgaaaaacgcactctataccccaaccattattttaatggcgattgccgcaggcatttgtacaggtggaaattattttagtcagccacttattcattcaattagtgtaagcctaaatttaactgaaacgactacagcatgggtgcccactctagcccaaatcacctatgcctgtggcttactctttttaatgccgctgggagacataatagaaaagcgtaagctgctatttatctttatgttattggcttcaagcggattaattattagcggtttttcgcacaatatttatcttttactgcttggcgccgtcattactggtctattttcaagttcagctcaactgttattaccccttgctgcaagtctggttccgattcaacaaagtggccgtgtggtcggctttttactgagcggactgatgatgggtgttttactcgcccgttccctttctgggctgatgtctacgctttttgcatggaatattatttatctggtcagtggttttctattacttgtgattgccttcattttacacagtaatatcgggttatttccaccaaccaaatctgaaaactatgcgaaaactattcgttctttaccacagatttttattcaaaatcgtcggttaagaaccagaacttacattggtggttttacatttgcttgtgtaagtttaacctttaccaccatgtcgttgcttctggctccagcgccctatttttttagtgactttaccattggccttttcggttttgttggcgtgttaggaactttcgttgctaatttctcaggcaaatttattgaccaagggtatatccataaaatttcaatttattgtggcctcgggctgattttaagttggattcttttttcacttttaccctaccatttcgccttttatattattgccttacttattctctacgcttctctttctgctgtgcatgtcaccaaccaaagtattgtatttaaacttaatcaagaattacgctcacggtttaatgccatttatatgacaggttactttgctggcggcgctttaggcacaacagcgggaagttatgcttggaaacactttggatggacaggtgtatgtattttaggcttaatttttgccgttttatgtctttattattgtgtgcgtgatgcaaaaaatcagcacaattaa

SEQ ID NO: 44817 - DNA, 972 bp, Acinetobacter baumannii
atgaagaccaaaattacagaactatttgaaatcgagcatccaattattcaaggcggtatgcattatgttggttttgcagagcttgcggctgcggtttcaaacgcgggcgggttaggcattattactggcttaactcagcgtacgcctgaaaatttggcaaaagaaattgcacgttgccgagaaatgaccgacaagccttttggggtaaatttaacctttttgcctaccgtaaatactcctgattatccgggttttgtagaggcaattattaaaggtggcgtaaagattgtagaaacagcagggcgtaatcctgaacaagtcatgccgtatttaaaggctgctggtattaaagtaattcacaaatgtacttcggttcgacatagcttaaaagctcagcaaattggatgtgatgcagtttctgtagatggttttgagtgcggtggtcaccccggtgaagatgacgtgccaaatatgattttattgcctttagcagccgatgcattagacatcccgtttgttgcctcaggtggtatggcagatggacgttcgcttgctgctgctttagcgatgggagccgatggaattaatatgggaacgcgttttattgcgactcaggaagctcccgtacatgaaaatgtgaaacaggcgattttaaatgcaaccgaacgagatacgcgtttaattatgcgtgctttgcgaaatacagaacgtgtcatgaataatgctgctgtagaaaaaatcgtggcaaaagaaaaagcactcggcgataacattaagtttgaagatattatggaagaagttgcaggtgtttatccaaaagtcatgattgatggcgatgtaaatgcaggtgcatggtcatgtgggttagtggcaagcttaatccatgatattccgacatgcgatgaactggttaaccgaattgtcaaagaggcagaagatattattcgcggacgtttatcagggcttttataa

SEQ ID NO: 44818 - DNA, 810 bp, Acinetobacter baumannii
atgcagcaggacaacaaaactcaaaaccagcttaaaacaggcacaattcatgagtattttgatagaaatatactaacgctcaccatgagcaaccccactaaaaagaatgcaattaattatgaaatgtatgcagctctaagtcaggcattagatcaagctgcaactaatcaagatattcatgtcgttgtgcttgctggtgaaaactccgcatttaccagcggcaatgatgtcaatgcatttgaaaaacgcgataccaccatttcagaaccacccgcttcgattgttttcttaaaaagcttagcaacgtttccaaaaccgattattgctaaagtaaatggtgtagcaattggtattggcagcactatgcttctacattgcgaccttgtgtatgcaagccaaaactctattttccaattcccctttgtgaatttgggacttgtacctgaagcgggttcaagttacatcttgccaagactattgggctttgctcgagcttcggaaattattttactcggtgaaaagttttcggcggaacaagcaaaaaattatggtctggtaaatgaaatatttgaagccaatgagctggatcaagtggttgaagatgtggcaattaaacttgctcacaaaccaagccaagccttacagctcagtaaaaagttactaagagatatgccaattgatgatctactcaatcgtattgaccatgagtcgactattttctcgcgttgtttacaaggttccgagtttaaagaagcattaagtgctttcaaagaaaaacggaaaccgaactttcacaaccaaacagcctaa

SEQ ID NO: 44819 - DNA, 852 bp, Acinetobacter baumannii
atgacaatgaatgatgcagttgatgcagaacagacagaaaaattattagcgcctttaaggcatgaattattacatccgattgaagatatgcaggatgaaaatgatcgccaatttattactgcattagcacgtggtttagagctattacgttgttttacgcctaaacatcagcatttgggcaatcaagagcttgctcagatgacaggtttgccaaaaccaaccattactcgcctcacacataccttgtcgcgtttgggctatatcaaacaagtacctaactcaagcaaatttcagctttcagtaggagttcttgcgtttggttattcgatgctgtctaacgtatcgattcgctctattgctcatccatatatgaaaaatttggcagactatgctggcgctgctgtagccatggcaacacgtgatcgactcaatatgatttatcttgacgtggtgcaaggcaaaggcaatatgaccatgcgccgtcaagtcggaacgtatttaccgattcatttaagttcgatgggacgtgcatgtttagctgccatgcctgaagatgaaagagagttcttgcttaatgccattcgtaacaagcacaaagaagactggatcaaaattaaccgtgatctagacaaagcctttaaagactaccaagattttggttattgtttttcaattggcgaatggcataaagatgtcaattcggttgcggttccactcattcatgaacaacatggtttattggtgtttaactgtggtggcccaagtttcattatgaatcgtgaaaaactcgaagaagatattgcaccgcgtcttttacatatggtgaataatattcgtaccgagattagctaa

SEQ ID NO: 44820 - DNA, 1218 bp, Acinetobacter baumannii
atgggtgctttaaatggaattcgggtacttgacttaagtcgggtgttggctggaccttggtgtgggcagattcttgccgatttaggcgcagaagtaatcaagattgaacgaccgaaagttggtgacgatacccgttcttggggaccaccttggatgaaagatgactcaggccaagacactcaagaagctgcatattatcagtctaccaaccgtaataaattatcggttgccatcgacattgccagtcctgatggtcaagaattgattaaagccctcattcaagacaccgatgtcgtgattgaaaactacaaagcagggtctttaaaaaagtacgatttggattacgagtctttatctgcgattaaccctaaactggtgtattgctcgattactggttttggtcaaactggcccaagagcagaagagcccggttatgactttattattcagggtatgggcggactcatgtcagttacaggtgagcgtgatgatttgccgggtgggggtccacaaaaagtaggcgttgcattttctgacttagccacgggactttattctacgattgccatacaggctgctttactcaaccgccatgtgacgggtttaggccaatatattgatatggctttgcttgatgttcaaattgccacaatggcaaatcagggaatgaactatctttcatcgggtaatatccctaaacgttatggcaatgcacacgccaatattgtgccttatcaagtgttcaaagcttctgaccgtgattttattattgcatgtggaaatgacactcagtttattcaactctgtcgaagtattgggttacccgatttaccgaatgatgcacgttttgcccgaaatgcagatcgaatcaaacaccgtgaggaaattatcgggattttatcaaaacactttttaactaaaacagcagatgaatgggtagatgcaatctatgcggctaaagttcccgtaggtgtaatcaataacttagaacaagcttttcaagaaccgcaagtgattgcccgtgaaatgttagtcgagatgaaccatcctcaacgtgaaaaactgaaggtaattgggtcaccaatcaaactttctagaacgccagttgagtacaaaacagcacctccgctgttgggtgagcatacgcaggccgttttggggcgaatagtttcttcagaaaaactagcagagcttaaagaaaagggcgtaattgggtag

SEQ ID NO: 44821 - DNA, 1152 bp, Acinetobacter baumannii
atgattcgagatcaggaaaccttaaatcaacttgttgatatgattcgacaatttgttgaaggtgtattaattcctcatgagaatgaagtcgctgaaacggatgaaattcctcaagatatcgttgagcaaatgaaagctctcggtttatttggtttaaccattcctgaagaatacgaaggtcttggcctaacgatggaagaagaggtctatgtggcttttgaattaggtcgtacctctcctgcttttcgctctctcattggaaccaataatggcattggttcaagtggcctgattattgatgggaccgaagcacagaaatcctttttcttaccgcgtttagcacgtggtgaagtgatcagctctttttgcttaaccgaaccggatgcaggttctgatgcggcatctttaaaaaccagtgcagtaaaagaggatgacttttatattttaaatggtaccaaacgctttattaccaatgcacctcatgctggtgtatttacagtcatggcacgcacaaactttgacattaaaggtgctggcggcatttctgcctttattgttgatagccaaactccaggcatttctcttggcaaacgcgataaaaaaatgggacaaaaaggtgcccatacctgtgacgttatttttgaaaattgccgcatcccagcttcagcactcattggtggtgttgaaggggttggttttaaaactgccatgaaagtgctcgataaaggccgtttgcatattgctgccttgagtgtcggcgcagcaacacgaatgctagatgattctttaaattacgccatcgaacgcaagcaatttggacaaccgattgccgaattccagctcattcaagccatgcttgctgattcaaaagctgaaatttatgcagccaaatgtatggtcttagacgctgcacgcctacgcgatgcaggtcaaaacgttagcacggaagcctcttgcgcaaaaatgtttgcaaccgaaatgtgtggccgcgttgctgatcgctgcgtacaaattcacggcggtgcgggctatatcagtgaatatgccattgaacgtttttatcgagatgttcgtctgttccgtctttatgaagggaccactcaaattcaacaaatgattattgcccgaaacatgattcgcgctgcgtcttaa

SEQ ID NO: 44822 - DNA, 1251 bp, Acinetobacter baumannii
atggctacaaattacaaagaaggtctttctcgtatacagcctcatacgtggaaaatagcatttatttttgcatttctagcactattggtagatggggcagatttgatgctgctgtcttatagcttaaatagtattaaggcagattttggattaaattcagtacaagcaggtatgcttggcagttttacattggcaggtatggctgttggtggaatttttgggggatgggcatgcgataaatttggtcgcgtgcgcattgtggttatttctattttaactttctcgctcctcacctgtggcttaggtttcacccaaagctttcttcagtttggtattttaagattttttgcatcactgggtttgggttcactttatatcgcctgtaataccctcatggccgaatatgttccaacccgttatcgcactacagtactgggcactttacaagcaggttggacggttggctatattgttgcgaccttgcttgcaggctggattattcctgatcatggctggcgcatgctgttttatgttgcgattattcctgttgttattgccgttctcatgcatgtgcttgtacccgaaccagaagcatggcaaaagtctcgactacaacaacctgttgtgactcaaaacgcatcgaaaacctcggcatttaagcttattttccaagataaacaaaaccgcaatatgtttatcttatgggcgttaacggcaggctttttacagtttggctactatggcgtaaataactggatgccgtcatatctagaaagcgaactgggtatgaaatttaaggaaatgaccgcctatatggtaggtacatataccgctatgattttaggtaaagttcttgcgggtatgatggccgataaattagggcgtcgctttacctatgcttttggtgcaattggtactgctattttcctacctctgatcgttttttataactcaccaagcaacattttatatttactggtcacctttggtttcctctacggcatcccgtatggcgtaaatgcaacctacatgaccgaaagttttgcgactgctattcgcggtacagctattggtggtgcttataacgtcggacgtttaggcgctgcattagcccctgcaacaattggtttcttagcctctggcggctcaattggtttaggttttgtcgtcatgggtgctgcctacctgatttgtggtgtgataccagccctattcattaaagaaaaaatatacgacccacaaaagtcgtaa

SEQ ID NO: 44823 - DNA, 816 bp, Acinetobacter baumannii
atgacgaccaacaatacacaaattcaggctgtggtttttgactgggctggtacaactgtagattttggctcacgcgcaccaattttagcttttatggctttatttaaagacaataaagttgaaattacggttgaagaagcgcgtgcgccaatggggttagaaaaacgtgaccatattgcagctgttttaaaaatgccacgtgtggcagctgcatggcaggaagtatatgggcaagctgcaactgaagcagatattgatcgtttatataaagactttattccgtatcaattaaattctattccgaaatgttctgctttaattccgggtgcattggcgacttttgaaaatattaaaaagcgcggtgcaaaaattggcagtaacacgggctatgcatccatgatgattggtcgtttggttaaagatgctgccgatcagggctatcgaccagactgtatcgttactgccagcgacgtgaaatatggccgtccatatcctgaaatgctatggaagaacttaattcaactcgacgtatcggacatcaaaactgttgtaaaagtagatgataccgtggtgggtattgatgaaggtttaaatgcgggatgttggacagtaggacttgcaattagtggcaatgaagtcggtttaagctatgaagagtggagcgcattatcggccgatgaacagattgtgctaaaagataaggcataccaaaaaatgaatgcgtcgggcgctcactatgtgattgatagtgtcgctgacttaccaaacgtactagatgatattgaacgccgtttggggcagggtgaacgaccttaa

SEQ ID NO: 44824 - DNA, 1710 bp, Acinetobacter baumannii
atgttaaatgaagctgcttcagcggttttaaaaacacagccgcgtcgaaaaactgaatattcattaagatcaaatgttgctttagcagccgttgcaatcgctttaactttagcgattattgctccattggtcatgctatttgaaacggcattttttgatgaaaatcaaaattttgttggtcatgaaaatttttataattattttgatagtccagctttactcagttctgtatttaactcggtgtgggttgcttgtgctgctactgtcattacagtatttcttgccagtatttatgcttttgctctcaccaatgtgaatataaaaggcaaaggcttctttaaactggtggcttttttaccgattttagcgccgtcacttttgccctctttggcattggtttacttgtttggtaagcaaggtgtattaaaacctttactgggcgatatacaaatttatggcccaatcggtattttaaccagttattgcttttggctatttccagcaattttaatgctaatgatggtgtcttttcgcagtgtcgatcagcgtttaattgaggcatctttgtcgctgggtaaaaacatctggaagacgcattatcatgtcacattacctgcaattcggtatggactcatcagtgcaagtctggtggcttttatttatgtgctgaccgatttcggaattccgaaagtcattggcggttcatttaacatgatggcgcttgatgtctataagcagattattggtcagcaaaacatgagcatgggtgcggtgatttccatcttgttattgctaccagcagtgtttgtatttatttttgatcgaatacaaagcaagcggcatgcacggtttcaagcctttcaggctaaaccttatgtttcagcatcgaataaaaaacttgaagttgttctaagcatattttgtggtttggtttcaggttcgattttactgattatctttacggctgtgctcgcatcttttattcagtcttggccttatgatttgtctttgaccctagcacattacagttttgaatatgtcgatggtggcggttgggcggcgtacttcaactcggttcgtatggcactctttagcacggtttttggaacagcactgatttttatggtggcactattaaccgagcgttttaaggcacatccattcattaaaaactatgtgcaagctttggttttactgccactcgctgtgccgggattggttctaggtattgcctacattttgttttttaaccagcaaagtaacccattaaatgtgctgtatggaaccatgactattttggtgatttcaaccatcgtgcattattacaccgtgccacacctcactttaatcaatgcgattaaacaaattccgctgcagctcgatcaggcagcacaaactttaggaacatcgaagtggaaaaccttttggaaagtgtatttgcccatgtgttttccagcgctatgcgatgtatcggtctatatttttgtcaatgccatgacgactgtatcggctgccattttcctctattcaccagacaccagtttagctgcggtagctgttttaaatatggatgatgcgggagacacggttggtgctgttgcgatgagcattttgattttaaccacctcatgtgttgtaaaactcattcactggttatttacccgaaaaattatggcaagaagtcagcaatggcatgaaagttctcactaa

SEQ ID NO: 44825 - DNA, 540 bp, Acinetobacter baumannii
atgaaaagaattttattactaacatttatgtttttttatttacttactccgacttatgctcaagaagtaaaatataaaaatattgtagttaacctaaaggatcagtgggatattagcaaaggtcaaaatgaagagttaattgcaataaaacaagcgagtaaacaggcaattataatttcaatatattatcccaaaggtatagaagagggtatgcaatatctggttgcttctctacaaattcctaaacaaggactagtcaaaatgaaaggggtaacattagttaatgaggatattaatattccattgagtaatggtatgaattatcaagctaatgtatttacaaccaactttgataaacgttttcttattagtgcttcatcaggtactaatgctggagttatcttagtaacatatgaaggcgaaggtaatgatacaaataaagcgattaatgattttaaaagtttaataaataatataaagatagaggctcctaaagatggattcctttttaatcagaatgatttattgaaacataactaa

SEQ ID NO: 44826 - DNA, 585 bp, Acinetobacter baumannii
atgaaaaataagccgtggattgaagaaaatgaccctttaaaagaatattatggtttattggatgataacgagttaagtagttttttaagtttatttagtgagtggaataaaaataattacgcattagaatctgatattggtcaagttaagactgggattcaattattagatttctttgactattctaaagaaagttgtcatctacccttatttgagaatttatgctcaataatgggaggagagagtgagaagttatactggattcctcttaataataacgaagatattatctttcaagatttttctcctcttatgattgctaaaacttcgattacaaaagaaacacttgattatgtaagtcgttcatatgtgcagatgataaatggaggttacatatttattgatagtaaatgtagatttgtaggagtagttatagatggatattacatgcaggtctatatgaaaaaagttttcatgaatgatgtaatgaagccctatgtaaagaattgggaaaagatagatgaatttttagatccattattaaaaaaagatttaattgatcgagtacataggatttcaagatag

SEQ ID NO: 44827 - DNA, 909 bp, Acinetobacter baumannii
atgttttttattttaagaaaaaaacttcaaaaaatcggcattattttcgtagcaatcaacttattagcttgtggccatcaaccagattttaaagatattaagcatttagcagaaagtggtgatgcaggagctcaagcaaaacttggcgaattatatgtagagggacaggttgttcctcaagattataaaaaggcctttgaatggtatagcaaagctgctaatcaaggaaatgcagaggcacagaataatttgggagcaatgtatgctcttggacaaggggtagagcaaaattataaaaaagcattcgaatggtatagtaaagctgcagaacaaggagaagtgaaagcacaaaataatttaggtgcatattatgcaaatggagatggtggcgttaaaaactatcagaaagccttagattggtatagcaaagctgctgcacaagataatgccgaagctaaatactatttgggtatactttatgaagaaggctatggggtaacccaagattataaaaaggcctttgaatggtatagcaaagctgctgcacaaaattatgccgatgcgcaaaataatcttgcagcactttatgcacaaggtaagggtgtagagctaaataataaaaaagcctttgagttatatagcaaagcggctgagcaaggaaatgaaaaagcacaaaataacttgggggcgatatatgctcttgggataggtgtaaatcaagattataagaaagcattcgaatggtatagcaaagctgctcaacaggaaaatgacgaagcacaatttactgtagggatgatgtactacaaaggtgagggtgtacagcaaaacaatgaattagctgaaaagtggctaagaaaagcagctgaaaatggcaataaggatgctttatcgctatttgaagaatag

SEQ ID NO: 44828 - DNA, 195 bp, Acinetobacter baumannii
atgaaacgttactggaaacaaaccgaatcaatagcttcacgttggacgactgaacaagactgttttttaatagaaaataattcactttctatagatgagctaaaagagcatttaccgttttctgaagatgaaataagagttcgtagatcagttttaggactcgtaagacgagatcagcaaatgagaccgtattaa

SEQ ID NO: 44829 - DNA, 1029 bp, Acinetobacter baumannii
atgctgttaaaagttggtgaattggctaagcaaacaggacttactgtccgtgctcttcatcactatgacgatatcggtttacttcagccttcggcccgttccgatgctggttatcgactatatacccctaaagacatcactcgtttgcatcaaattcaagcattacgagggctgggtatgtcgctagccgaaatctatacggttcttgaagatcccaatctagcacttttaccgattattgatcggcagattcaagcaattgatcaaagactggcagagcagaagaaattgcgaaatcagcttggacaattgaaatctcagctcatcaatggtgaagaacttgatttggaggattggctaaatatgctggagcttatagcaatgtacgagaaatactttacgcaagaagaacttgaaaagcttacatttttacaatcaggtactaaaacccaccaagaatggcaagagttaactcaagctgtaaatacggtatttaatgctggagaatcatctagcagtgaaaccgctcaaaagctcgcccataagtggatgaaaacacttgagcagaatacgcgcaccaatccagaatggcttgttaaattaaataacatcaattctgcagaacctgaatttcaggaaaaattaggagtaatgccagaagttgttgagtttttacttaaggccttttcagagagtaagctgagtatttttgcccgttatttatctgataatgagtttgcttttttaaaggaaaattatgttcgcgaaatgaaaaaatggcctcaactattagtcgatattgagaaattgattgacgctgaggttaaaccgaatagtgaaggagcaaagcgtttggcacagcaatggctctctatgctacaaggttatactggcgaaaatccaagcactcaagaaaagatccgttcagcaatgcaaaatgaaccaagccttgctgacggtacttggctcaaaccggttaccctacactttctagaaaaagcagtagcagcattcaagcatagtgcttag

SEQ ID NO: 44830 - DNA, 636 bp, Acinetobacter baumannii
atgcctgtatttagcactcattttaagagtgacggtatttctatctctttacatacaacaagaatttataacggtaaaactatgccaaatttagaaacctcttctaaaaaattacacattattcgtaccgctattcgtttgtttaccacacatggatttcatacaacaggcgtagacctgattgtcaaagaatcagaaataccgaaagccaccttgtataactattttcactcaaaagaacgacttattgaaatgtgtatagctttccaaaaaagtctacttaaagaagaagtgcttgcgattatctattcaagccgttattgcacgccaaccgataagctcaaggaaatagtagttttacatgttaactctaacagtctgtatcacttgctacttaaagctttgtttgaaattaaagtggcttaccagcaggcttaccgtatggcaattgagtatagaaaatggctgactcgtgaaatttttgaactgatttttagcttagaaatacgtgtgttaaaacccgatgccaatatagttttaaacttaatagatggcttgatgttcgagtttttaagtacaaagagtttggatgaaagggacgtggtggtggagtattttttaagccaacttgtttga

SEQ ID NO: 44831 - DNA, 1206 bp, Acinetobacter baumannii
atgtgggtgattgtttatatggatatctgtttcacactaatttccatatttagcttttttcttatttatataaaccgtatttcggcagggatacttttatcacaagcggttctactggtttttccagttgtcttttgcttatttttcgatgtcgctacgcctgatcgccctcgagtggcccatttgtttttacctgccggagcgatattgggatatttgaattaccgtagagagccaagcttcttacaaattgttttaattttactatcgattggctgctttatattttttagtggcagctcttttactctcgatagtgccatacctttatcagaagatattcgtgatcatggcggatggatagccacttgtgtcgccacacttatgatttgtatttcaatttataccatgcaattagagatacaaatagaaagcagtatggagcacaatcttcgtttggcactcactaagcaacaatttgagcttttttatcagccccaagttaattcgtcagaaaagctgattggtgcggaagccttgttaagatggcatcatccggttttagggtatattccaacaaaagagtttattccggcagcagcaacttttgggttaatgccagagatcggagagtgggtattggcccaagcctgcaaagttttacaggactggagtaaaaaagaagagaccaaagatcttacgctttcaattaatattagtgctgatcattttatgcaatctaactttgagcacactgtgattggtctggttcagcggtatgatttcaatccctctcggttcatattagaaattactgaaaatattgctttaaataattgtgcgagcatgattgaaaaaatgcacttcttgtctaagcatggtattcagctttcacttgatgactttggtacagggtattcatcgttaagctatttacaaaaaatgccaattaaacaaattaaaattgatcgcagctttgtacaggcagctttagatgataaacgcagcaataaattagtgacgggtattattaaaattggcctagatttaaaccttcgcgtgttggtagaaggaatagaaacggctgaacagtttagtgcttttaaaagtaatggttgtaccgagtttcagggctatttatggggctgtccaatgtctttaaatgactttatcaagcaattgcccatcaagactgataaagaataa

SEQ ID NO: 44832 - DNA, 861 bp, Acinetobacter baumannii
atgatgattgagacaaactccaaacaaggtatggcatttgcagccgcatttttatctttagtttctgtacagatcggcgcagcaatagcaaaagtcctttttccgattcttactgctgaaggagtcaccttaactcgacttgccttatcggcctgtttcttatggatagtctttaaaccatggcgacagtggaataaacagaccaattggaaaaatctaattatttatggatcaatcctcactttaatgaatactttggtttataaagcattttcttacatgtctgttgggatcgcgatttccatcgaagtgttaggaccacttacggttgctattttaatgtctaaaaataaattagattatttttggggtggattatctattattggtttgcttcttctacctatgggcaatgccaataataactttagttttattggcatgacgtatgctttattagctgcagtgggttggggactgtatgtgatttatggctcaaaagttgcacaaggtggtggcagctctgttgcgaccggaatgtttatagcggctttatttgcaacacctttaggtgcatctcacattatccatatttttgatagttataagattctttttacatgtttacttatggcgatgctagcaagtgctattccatttatattagatatgattgccatgaaaaaactgcatcctcgagtttttgggattttactaagtgcatcacccgcagtgagcgctttggctggatggctgattttagatgaacgattaaatagttttcaggttctaggcataacaattattatggcatcatgtgcaggttgctcttatttttcttataaacgtaataaggtataa

SEQ ID NO: 44833 - DNA, 132 bp, Acinetobacter baumannii
atgatttcagcgctattcatgcgtaataaacccttaaaaaaacgaaaaatctacttttggtttattaaccaatttcaagtctttaaaaatgaatgtaattcaagaaaagtacaacaactggatgaactttag

SEQ ID NO: 44834 - DNA, 2004 bp, Acinetobacter baumannii
atgtctatagcgcaatcaaagccatatactatcttggaattattaactgagaaggaagtaaattatcaaattcctgtatatcaaagaaattatgcttggggaagaccacagattcacgcattgatacaggatgtttatgactattatctgaaatcgcagaacaatcctgaaaactattatatcggtagtttggtggtcgcaaagaaagagcactactttgaagtgttagatggacaacaacgctttacaaccttaaatcttttagctttattcttaaaatctaaactattaaattcaaggttggatcaattcaattgtatacgcttaaaatttgaaagccgtgaaaagtcagcaattcttttaaacgcattatggaagtttgcgaatgatcaatctattgaacgagaaatagatcgattaaacgcacaacatggggatcacgctattctcagaggttatcgcattattcaggaagaatgcctcaagattgtccaagaagataagcttgcagagtttgcagactatctattggatcaggttgtaattttacgcacgatcattccagagcttgctgatgtgacacattattttgatgcactgaataaccgtggggagcagttagaagcgcatgaagtgattaaggcacattttctaagtttattaagtacgaatgaagatgatcgtcatgtggttcatcaagtctggtcagcatgtcaggatatgtacaaatatgtggcatatggttttaacccaactgatagaaagcaaatatttggtgattcatatcatgaatggtgtgtcaaagactatgaataccttaagtcatgcctacctctcgaaacgcaatcgaaagatgtaagtacagaaggtaatagctcttatggggatgagctgactttagaaggaattctaaagcttaatcctgttcctatgagtcagaatcccaatgaagaatcgagtgagcgttttgcaagcatcattgattatccaaacttcctgatgcaagttttgaaaatttatgtcaaaacgcagttgaaagatggcgatgctagcaagattgcactcgatgataagactttattagaaagctttaaacacacaattgtagatgcaagtcatgccaaagcctttatctacctccttttaaaaacacgatatttattcgatctgtatgtcatcaaacgtgagaatagtcctcagcacaaaggttggtcactcaagaaacctaaatactatagttctggtaatgtgagctatgtcaataccttttcacaatctgaaacggagggcgaaagtgaattcgcattagaaggtggtcaaagaaacctcgtgatgcttctatctgcatttcatgtttcctacccgacacatgcacgtaagaactggttgttgagcgttttatattggctcataaatcatagtgacaaaagtattgatttcgatgcttattttacatttgtggaaaattttgcacgtactttgatcacaaatcggtacttaagtacaaagcaagactatgaaagttttatgtatggcgacgaagctgatcgtaacaatgtggtcactgcacaagatatagaaacgcattttacttatggaaagcttccttacttctgttttaactatttagattaccttttgttaaagaaggaaaaagggagtcatactaagttttactttagttataaggactcaattgagcatttttatccgcaggatcctaaggtaggcaatgcatttactgatcaatcagtgttacacagttttggtaatttagctttagtgaatcaaagtgaaaattcttcactcaccaatgacatgccgattcaaaaagcgaattggctaagaaagcatacaaaagtaccaatcagtttaaagttagagttgatgatgcaggttgttgagaagaacgaatctgagtggaatgaagcgagtatagaaaaacatcagcatgatatgatagagttactgatagaagatttaaacggaaaagcatgctcttag

SEQ ID NO: 44835 - DNA, 1491 bp, Acinetobacter baumannii
atgaccaccgcaacactcactccgagagtgatctcgttaaaagaactgtacaaacagcatttaagtattcctgattatcaacgtccttataagtggacagagaagcatgtcagaacactgtttgatgacctagattattttgttgcaggaattacaacaaagaaccgtgatgatgatcgttataagtatcgtctagggacaattgttctgcatagtaatgtgatcttccatcctaaaaaatctgctgatttttataagtactctttagagcggattgttcagtgcaaactgccagaagcaaaaagcaatatcgtagatggtcagcaacgtacacttactttttatttaatttggcatgctttgcaggcgagaaaggatcaacttaacaagttggggttggctgagtttagtttagacattcctgcatgtcgcattagccaagaaaacttacgtcgaaattacgaagttgttgaaaagctgattgataagccacgctcaaagcccttagatgaatattttaatattctgctgagtaaatgtgagttcgtgattgttgagttaagcaaactttctgaagcattccagttctttgattcacagaactccagaggattagatcttcatccacatgatttgttgaaggcataccatctgagagagtttgatccatcagaagctgaattgaaaacgaaagccgttcagcaatgggagcaaagagatgagaaagaagttcatcggatattttctcatttcttatatcccatcagacaatggacgaaaggggaaaaggcattcacctttggtaaagagcaggtggaaggttttaaaggtttgtcactgcatcaggaagatcagtttccactgagccaatcatatcgtatcttgcacagtatggttgatgagtacaacaatgatcgcttccgtaaggtagataacatacatttggcttatccatttcaaatcactcaaacgatgatcaatgggcgacgtttttttgagtggtttagccattatgaaagtaaagctttaggattgcttaattctaattcacgagatcatgatgattgggtcgagccattattaaccacaacaatgtcgaaaaaaatttggacagtcattaatggtaccaatcctaaagactatgagtatacgggtaagaacagaacaggtgatggctatgtccgaaaagtgctcaatgcttttttgttggcttactatgatcgctttggcgaagcggagttttcgagtgctttggagataggatttatttgggcatacagtttacgccttaagcaatccagtatttatgagtccagtattgagaaccatgtgataggtcagaatctctttaagcgtttgggagaatcactaagacccaaagaattctttaatttttccttgaatatctatatcaaagctagccaaacaagcaaagccaaaggtatcgaaaaattgttcaaagaaatgaaatacatggcggagcaagcataa

SEQ ID NO: 44836 - DNA, 567 bp, Acinetobacter baumannii
atgggtactaaaaaacgagtgacattgttacagggtgacatcacgacttaccctgtggacgcaattgtgaattctgcgaataagtcattgttaggtggtggtggtctagattatatcatccataaaaaagcaggcttgcaaatgaagcaagcctgtatagagctgaataagctcaagggtggatgtcctacagggcaggcagaagtcaccatcgcaggcgacttgccagcgcaataccttatccatgccgttggaccaagatggttggatggtgagcataatgaagcagatttgctatgtagtgcatattcaaatgccttgatcaaagcgaatgaagtacgtgctaaaaaagtatcattcccttccatctctacaggtgtttatgcctttcccaagcagttggcaggagaaatagcgataggcacagtattgtctaccttgccagattatccatggatagatgaagtggtttttgtcatcaaggatgctgaaaattatcagatttatcagactatcttgagcaatctacatgatgaaaatttagaaattaagattgaaaaaatatga

SEQ ID NO: 44837 - DNA, 2913 bp, Acinetobacter baumannii
gtgagtacacaagcagaacttgagctagaaaataacttcattcaacaacttgaaggactaggctatcaaagggtgtatctacgcaccgaaaaggcattgcttgataacttaaaactacaaattcaaaaacttaatcaactctcaaatccattttcagaacaagaatggaaacaggtttggcattaccttactaaagaaactaccgtatttagaaaggcacagttattacgtgatcgttttccattaaaatttgatgatggcacagtcaaacatttgtattttcttggtgaaaatgcattagacaatacttttcaagtttctaatcaaatcgtatctgaccattctactttgaatggtaagaccagtcgttttgatgtgactttattggtgaatggctttcctctgatacaagtggaactaaaacgacgtggcgtagaaattcagcaagcctttaagcaaacgattgaatacgcaaaaacagcttataaagcaggtgatggcttatttggttatatccagttctttgtaatcagcaacggcgtgaactgtttgtattatgccaatggtacaaagagtattgagttcgctttcccttgggcagatgaaaacaataaaaacattaatgaccttacagaatttacgaatgcatttttaaatcctgcacatgccttcaagatgctgtctcagtacattgtcttgcatcactcagatgaatttttgatgattctgcgcccataccaaatctatgcgattgagcgtatggttcagcatgtacagacctcaaaggaaaatgcctatatctggcatacaacgggttcaggtaaaacattaacttcgtttaaggcaagtcaattgctaatcaaaaatcctgaaattcgtcgtgtcatttttgtggttgaccgtaaggatttagatgagcaaacctatacagaattcaatgcctatcgagaaggctctgtagacagcaccaacaacacagcgaatctgatccaacagttacgctctttagataatcgtcttgttctcaccaccatccaaaagctgaataatgcgatcactaaagatcgacaccaaaaagagatggcggatctacaagatgaaaaagtcatttttatctttgatgaatgtcaccgtagccaatttggtgaaacccatcagaacattaaacgcttctttaaaaatgcacagatgtttggttttacaggcacaccgatcttttccaccaacagcctaaagaaatcgggtgagacctttaccacggagtatctattccctgtaagactgcatgaatacctgattgtagatgccatcacagacaaaaacgtattgccattccaaattgattattggggtaaatacagcaatacaggtgcaagtgagccaaatgagcaagttgaagctattgataccaaagagctttacgaccatccagaacgcttggaaaaaattgttcgtcatatcttaagtatccatgataagaagactaagaaccgagagttctgtgccatgttctgtgtcagttcagtcgagcacttgattcagtattatgagctatttgaaaaagtgcaggcagaaatggcggaagaggcaaaacgtaatggaagctattttcagcctatctccgtaagaacgatattttcttacgcgacagaagagcaagatcagcaagcaagtatagaagaaacagaagcaggtatgattgctgaagagcctgtagatgcaccaaacagtgtagacgagtcacgtaaagccaaattggatcgttatattgcacagtacaatgcaacctatggttcaagctacaacacgacagatagtttctatgagtattatcagaaccttggcaagcgagtgaagttctataacatcaagtatgaaaaagatgagcagattgacttactgcttgtggtgaatatgttcctgacagggtttgactctaaaccactcaataccatctatgtcgataaaaacttaaaatatcatggtttgattcaggcattctcacgtaccaaccgtgtatacaagccatctaagccatttggtaacgtggtgtgttatcgcaacttaaaacaagcgacagataaagcactggcattattctcaaataaaaatactgttgatgttgtcactgtacctgaaatgaatgttttcttaggacagtacgaaacagcagtggcacagttaaaagcattgacgccaaactgtcagaatgtagatgacttaaagcttgaagctgaacagttaaaattcgtggaaacatttagagaggttctacgcctgagcaacttactcaatatgtttaccgagtttgataaaaataaggcaccgattagtccgcaagatttggaggactataaagggaaatataaagacctctataaccgcatcaaacagccatctgatggcaaggaaaaagtctctgtcttagaggatatcgacttccaacttgaattggtgcataacgaccgtgtgaatcaagattacatcatggcactgcttggactgattgcaggggcatcaactcaggcgcagaaagatcaacgtagaaaagagttgatggacatgttgagcaatgatgccaagatgtataacaaaaaagacctgatcgaaaaattcatcaatgaacaattgccaaagatgatcacaggtcaaacagtgaagcaggcattctcagcattttgggatgcagaacgagcacaagcctatgagggtttctgccgtgatgagcaattgaaaaagcctgagtttgataaagtggcagataactttaattttaccgagcgtcttccattgcctcacgaaattaaagaactcccgattcaaaaaccgccgttgctcaagcgtaatcgttatttcgcagagttacatacaaagacttcagaattgttaagccgatatagtttgaaattgtaa

SEQ ID NO: 44838 - DNA, 339 bp, Acinetobacter baumannii
atggctatttttaatgaaatatatagtgattctttttatttactgacagagtcagaagaaaagttatttccatatcaacaaaaaaatagaaaaacaagacaaattagttttcgtgtaggacgtgaaagttcacataattcccttactcataaagatccaacaaaaagagtattggaattagatgaacatgaaatgtttgactatgtgattaatcaaggtgcttttgctcgcttccatattccaatggatgaaggtctacaatctaattatcgttcaatccatagcagcgatattaaggatgttgtgattcaccctggctggttacatctaaaaaagtaa

SEQ ID NO: 44839 - DNA, 462 bp, Acinetobacter baumannii
atgaatgtagagcttgattggtatgaaccgattgaattgggaagttcgagtacattaaaagagaatgtaaagaattttgacttgtccttacttcctgaaatttcaggggtctatattttttatagagagtatggtgattatcaagaagcactttatgttggaaagtctgagaatatccgcacacgtatgaaggctcactttaatagtattaagttgattgatgggcttgtagaaacacctaaaggtaaaaagaagctgatttttgctgaagtaaaaacgcgctcggatttagcaaaagctttagcccaagcagaaaaaggtttgatcaaccagttagatgatgaaaagcatcctttactcaatcgtaagctaatgaaagatcaatatgattatattatttccacaggaaatgctttaaatattattgatgaagaaatagctgtattttcaaacaaggcttaa

SEQ ID NO: 44840 - DNA, 1560 bp, Acinetobacter baumannii
gtgaaaaagatagaacaaaaaactgaaaccttaagtcaaaatctgcaagattggcttaaaaaacactttggcaaaaaagatattgcacagtataaaaatctagctttaagccttattttctataagtttttatcagatcaatttgagcagtttgcaaatgaaaacctagaagatgaccttgagtatattgctctagatgagcatcagcatgaagacttgatgattgctctccgagaagaggggcaagactctttagggtattttattgcacctaaacatttgatcggagcatttgctcaggcttatagcaataataatgaatactactttttagaagagtttgataaagcaattctccattttcaacaaaacctaacagatcagtcgaaatatgtctttgatgggttgttaagcgacattgataccacaagtgcattactcggtagttcagctaatgccaaaaatcagatattaggttcaatgttattagatttgaatgcaattaatctttactctaaagatgaacctaaaattttagggggtgctttctttagtttaattgaatttatggcaatgggtttgggtaagaagaaaggagatttttatacgccagctcatgtgtcagctttgatggcaaatattattcggactgaaaaaagccgagttcgtacactttacgaccccacatttggctctggctcattactgattaagacggaccaaatgctagagtttgtcgatcaaatcttcgggcaagacctgatagatggtaatttaaaaacagcgcgtatgaactttctaatcaatggatatcattattcaaaattgaaactagaaagtgacgatactctagaaaagcccaaacatcctgaattaaaatttgatgtgatcatctgtaatccaaagttttctcaaacttggaacaataataatgccaaaaagagtgatccacgatttgcaagctatggcaagcttgctccaaagtcaaaagcagatttggctttcatccagcatattgtttattccctcgaagaaaatggaattgcagttgtcctgattcctcatggtgtcttgtttagagataaagctgaaggagtcattcgtaagtttttaattgaacgcctaaattgtattgatgcagtgattgggttggcgaaagatctttcacctgtcattgatacagaagttgctatgttggtgttaaagaagaacagaaagtctgaagacaaagtattgtttattaatgccaaagatttttgtgtaaagcagaaagcttttaatatcattacaccagagcaaattgctgaaattacagaaatttataaaactaaagtaaccatacctaaaatttcggagtatgtggggcgttcaaaaattgttgagcatggctataacctgaatatcccacgctacatcgacttgttcgaacctgagcctgaaattgatattgatgacgtagctcttcaattggaaaaaatagacgaaaatttagaacagattgatgtggatcttaaaaagttttgtgacgagctaggtgttcgttacccgtttaaaaattga

SEQ ID NO: 44841 - DNA, 1233 bp, Acinetobacter baumannii
atggcgacgcctaagttacgctttaaagagtttgatggggattggttattaaaatccattaatgatatttctacgaaagttggcagtggtagtacacctcgaggtggatcagaagcttatgttgatgaaggcataatttttatacgaagtcaaaacgttaacgataatcagcttatcttggatgatgttgcgtatatacctgaatcgacacatgcgaaaatgtcaggtagtaaggtcttacctaatgatatcttgttaaatatcacaggtgcatctattgggcgtagttgtgtcgtacctgaaaccttttcagaaggtaatgtaaatcaacacgtttgtattattcgtacaccgaatgatgatcctatttttgttcaatcatttttgagttctgagaatggtcaaaatcatattcagtccaaacaagtaggtggtggacgagagggcttaaattttcaggcaatccgttcaattgattttgaaatgccatcgaaagaggaacaaaccaaaatcgcttcttttctttctaccgtggatgaaaagattagccaattgacccaaaaacacgaactgcttagccaatataaacagggtatgatgcaaaagctgtttagtcagcagattcgttttaaagcggatgatgggagtgagtttggggagtggaaaataacttccattaaagatgctgtaagttttatcaaagacggtactcatggaactcatcaagatgatccaagttccaatctatttttattaagtgctaaaaacttacaaaatggcaaaattgtgactgatgaaaaagatagaaagatcaatcaaaaagaatttgattcaatttataaaaactataagttgaaagatggcgacattcttttgtcggtagttggcacgattgggcgtgtggcaatatttaaagactattatgagtcttatgcttttcaacgtagtgtggcttttatgcgtttcaaaaaagctttacctgaattcatatatcaatcgtttttggcaaaagactttcaaaatgagttattagttcgacaagttgtatcagctcagccaggtatttatcttggtgatttaagtaagatagaaattaaattaccttgcctagaggaacaaaccaaaatcgctaatttcctctccgccattgaccaaaaaattgaaaaggttgcacagcaggttgaacaagcaaaacagtggaaaaaaggcttgttacagcagatgtttgtataa

SEQ ID NO: 44842 - DNA, 1572 bp, Acinetobacter baumannii
atgacccaagtacagcttcaagaactgcaaaaacgtttatggaacatcgcaaatgacctgcgtgggaagatgggggcagatgaattccgtgactatattttagggttaatcttctataaatacttgtctgaaaaagtgttaaacagtgctaatcaagagctaaaagacgaaggtttacagtttactgatttagatgccgagaatgcagagcatcaagagtatttagaagcacttaagcaagaaagccttgagaacatgggtttcttcttagagccagcacaactgttccatagccttgctgagcgtgcacaaaataacgaatttattttagatgaactgattcaaacgctaaaagcgattgaacaaagtacccttgatgctgagtcatctgaagactttgcccatttgtttgaggacatggatcttacttcgaccaagttaggtaacaatgctacagatcgtaatgagctgatctctaaggttttaatacatttagatgcaattgactttgatatttcaaatactgaagcagatgtgctgggtgatgcatatgagtacttgattggtgaatttgcttcaggtgcaggcaaaaaagcaggtgagttctatacacctcaaacggtttccaccttgctagcacgtattgtgacgcttggcaaagatcgtttgcgtagcgtatatgacccgacttgtggttcaggctctttattgcttcgagtgaagcgtgaagttggaaacaatgtcgatgcgatctacggtcaggaaatgaaccgtaccacctacaacttggcacgaatgaacatgattttgcataatgttcatttttctaagtttgatattaagcaagaagacaccttaaagaaaccacagcatatggacatgaagttcgatgcgattgtggctaatccaccgttttctgcaaaatggtctgctgatccgttatttttaagtgatgagcgttttaagtcgtatggcaaacttgcaccaagttcaaaagcagatatggcatttgttcagcacatgctgtatcaccttgatgatgtaggtacgcttgcgattgtattaccacatggggtgttattccgtggttcaagtgaagggcatattcgtcagcatttgattgaaaagatgaatgtggtggatgcgattattggtttacctgccaatattttctacggcacgactattccgacgtgtattttggtactgaagaaaaaccgtgagcataaagacaatattctgtttattgatgcgagtaatgagtttgagaagcagaagaatcaaaacaagctattgcctgagcatttagacaatattattggtgcgtatgaaaaccgtcaggatattgagaaatacgccaaagtagcgtctttaaaagaagtaaaagacaacgattacaatttgaatattcctcgttatgtcgatacttttgaagccgaagctgaaattgatttagatgtgattgcgaaacagcttcaagctttggaagtggaaagccaaaaaaccgatgctgtgattgcgaatttctgtaaagagttagggattgattcaccatttgcggaggtgaagtaa

SEQ ID NO: 44843 - DNA, 996 bp, Acinetobacter baumannii
atgaaactatcattcgctcaaccaccatacatttactcaaatacagacctatccattgaatcaccatatacgttcattgcaagtgagggagtcgtccaccattgttcacaacagttctcagtagtcacacagaaaagctttaaactgtttaagctgaagaaatcatatgcaggagcccaaattattgtacctgtatcagaaaagacattggatttcataaacatgattaacatgtatattccaataggtgcatatgcacttcataatcaaaattataaattcgcaagtcatgttcgtcatatgaatgaggtgcttgagacagcaattcagctattgccgactagaatcaatacttatcaattatcggatcagaactatattggtagtattgcaccaatcttagaaaatattttgaacgcattcaaacgattatctacaagcacattgcatatgaaagatatggctgagcgtaagctgtggatgaatgatcaacttaagagcgttatgactttgtttagaaaagtgtacaacaaggagcaaagggcaaacttagtgatggttacagtcaatcatttgacatcgaacattgcacatttaactcaagatgaaattgaaagaaaaattacgaatcaagtacagcaggtcgttagcgagttgttgcatgaaaatgaacaaggtgtttttcatttgtttcacaagacatatcgtgatctttctggcgcatattacacacaaatttttgtgatcacagatcggaacttaatctttactactaactcaatcctgttagatcagaatcagggcgcagggtatggttcagcaatagaacactcaacatatatgtttaaggtgaacgctgatccacttgatctacatggcttggatggttttgatcaagaatgtgtcaagcagtcatttcaacagtttttatctagtcattcatatctctactatcagtcgaaagatatatcacctgacatcatcaccgtgaagtga

SEQ ID NO: 44844 - DNA, 1098 bp, Acinetobacter baumannii
atgaacaaagatactaaacagatcaatcttaagcattttgatgtcccaagacctgtcattttgaattatgaagagtttgtgatgcgtcagactgaagatggagctttagaggttcattctgatgtgcaagtacatgatgcaattaacggtatcaatatcattcaactcattgatcaaaataatgttgatatgttgtatgagatggatcgtaaaggtcagtatagacctttaaatacagcactacataagttgtttaactcgcttgaaagaccaagtgttttgaaggaacgatttgaaattcctgaattagaggtttttgatgaggctataaagatatacataccaacgcatatgctgactgctttagaagaaccaatattttggaaaatggatcaatcagctccaatcacttcacgtcgtgttggtatggtaaaagcaaatttcttaaataacttagtacgtggaatatttgagttgacgcaacagcctgcctataagcaggcattgcaaaatagattggagcgtagccaaaaccaataccaaaaagggatgaagctgattaatgaattgtttgatctgagatgtaaattactcattatcagagaagactttgcattgaaagctgagaccaatttatccctaactgatttgaagacgttgatgtccaaattcttgaagaaaatcttagtgaataaaggggagcttgaaggtattgaaggctatatctggaagctagagtacggagtacaaaagggttatcactatcactgcattttctttatggatggcagtaagcatattaaagattcttactatgctcaaaagctaggtgagctatggaaacaggttacagatgatcagggcatcttccacaactgtaatgcgagtaagtttaaatatcgtaaccttgcaattggttgcatttctcacgatgacgaagaggcaagaaaaaacttagagattgtcatgtcttatctatctaaaacggatcaatttttgatggaaaagacactcaagaaatatcgggtatttggtacgagtaccagaaagattgaaaagtctcaatcaggtcgacctagggacaaccttaaaaattag

SEQ ID NO: 44845 - DNA, 327 bp, Acinetobacter baumannii
atgttatatttgaaagttattgtaggaaaaaaatatctgattcaattcctatattcttattccaatattgtcatgtacttaacaagagggtgcaaagcacatatggaacaaatcgatagaaataaaatgcaaatcattcgaatgggtgaggttattaagctgagtggtctaagtcgttcaactttatatgaaaaattaaatgaaaagtctagtcgttatgacgagacttttcctaagcagcttaagttgagtcgtaatgctgtgggatggttagaacatgaggttttggaatggttagagagcaaagcgaatgagcgttttagctga

SEQ ID NO: 44846 - DNA, 1392 bp, Acinetobacter baumannii
atgaaatataaagattatttattattaaccctagaagattccgtgtactttttaactcaatccattgtaatgttagaatatgagagatttcatgctttagacaaatgcccatgcaattttgaaaaacttaaagaaataaacgaatatattttaggtaaaatcgacagacttcttaacgaagagaagcttaaaatttcagaatatcatctagtattagaaagtgattggcagtgcaaaaaagacaagtacgaaattcttcgatttgatttactacaagcattttggtcagaataccaaaataaaggcttcaccttgtttcaactcagcactgattattttgcaatctcatatcaatcattgaaaggcttttttttcatatggactcaagaagtcttcaggcaattcccccaacatgttcagcatctcaatattttagctacacagcacaatttaagatcaatgaacaagctgtactcaatcgaagattactttgtagagctatatatttgttatcatctaatctatcaaagggtttgtcaaaaaccccatgaaatttataaaatattaaataatattaatcatatagcaccactcaaagacctaatgtatggcgagaatgattttagtgtattaaagaaaaaatctagtgaagctgactatttgattgggctacaagtaccaataaaagctcgaagcaatatgatagatgtacttcataaagtttttctgcaaatgattagcatgttgcttctaaataaaaataacgatgtgccatcagaaacgcaattacagcaagcagttgaaattgcaacaagtctactcacgctccaaaagcgaaatcattatccattaacacagcgaaaatcacccctgaaagctttagaagctctactttatcaaagctataaaaaaaggcatccaacaaaaaattcaaatgaattcatgaaatatttagaacgactgtttatagaaaaagggttctctacctctcattctaaatctaaggcatacggttcggatagacaaactcccgtaaatgcgaatgacttgaccttaactataaatattcagaatttttcccttctaaatgaactaaaaaaaagcttagcatcaggacctcgtacatatgacatcgataaaatttttaaacatatcgaacaacagagtaaaattgagatctgctttggttctgtacggaaaaatgcagtaaatattttcactagattcaatgaatactttgcctccaagaacgaaggtgatattgtaaaagtctatcaaccaacatctaagaaagctcaaattacgacagtcagtttgcaaaatctttacgatgctgaagcaagtcactctatcgaacagatgcttaaaaacatcgaagagcgtagattataa

SEQ ID NO: 44847 - DNA, 1212 bp, Acinetobacter baumannii
atgccaatcgcaaaacacacaaaatcgcttgttgaacgtcttaatctagaaattcaatcttacaactctgtagtctttaaacctctcactgtatcgcaaggttatgacctacttgcatgtctagttggtttgaataaacataacttcgggaaagttggtttcatttcaagtagtctatttttaaatgttcctacctatcagccagtcggttgggatcaccatccaggtcttgataaagcacttgagcatgccatttgtaagaaaacaggtttaaatagcaaagaacattttttcattctaggtggcttagttgctgaattgactgttaatggcttcaaaagtcagggggaatgtattcgccaccctgatcaattaattgctatgcttcgcgaactctacaataccgacgaatctgtgatagaacatttggatagcattgttgagctaattgagaatcttgaatatgtcgaaaggaaaaaatccaaagatctaaagttacctcactattggattctgcactggtgctatgctgtacttcgtaaacatgaaattgcaatcaacaaagagattaaggcaaataataaaatcctcaccaaacaacaggctttacttaatgtatacaagccttatttcgaacaagggcaaacttccctagaaaaatactatcgcctgtgcgtagaccaaaattttgatcaagccgtagattttaatgatcaattcaaagcaatccgatttacaagtagttatgatcaaacacatgcctttgccattcctcaaaacagtgatgaactacctttaactgttcagagaaaaactagtaatcttttctatagcattgatggtattcatagtggtgaatatgagacatgggattctttttatcgcttgatgaatgaagctgatcgtgtagttgagactgatgaagagcagattgtacttattcttttacaaagacttttcagaaaagatactcttggcagagatgatactggatacgactttgttgtgattcataaataccaatatttgttttcaagtgaatttgagcaggaactaaagtcacgctaccccctattcaatgagattggcaaccaacaccagttaaaccgaagagcgctatctattttcagtcaaatgtatcgccattatctagagcataagaattttgatacttataaacttcctccattagctcaagcaatatctgcttaa

SEQ ID NO: 44848 - DNA, 285 bp, Acinetobacter baumannii
atgaggttgaaatgcccattttgccaatcagcagaaatcataatgattggaatgaatcagcagtctagtacggcacttgctcaagtggtgtctcctgcgaccttaggcgcacttggtgcgacagtagcaaagtcttttaacttacccccattggttggtggtgtagcaggaacagtcattggcggtctgattaatgcagttactgatcaaccaacacggtcacagcaatcattgtgttattgccaaagctgtgctcaaagatttccatctagccttcttcattaa

SEQ ID NO: 44849 - DNA, 1035 bp, Acinetobacter baumannii
atggcacatcaattagaacaaatggcttatgtcggagaaacaccttggcatggcttaggtaatcaactcacccctaatcaacctcttgaggtttgggcgcaacaagcaggaatggactggcggatcgaatcatcagatgtcaattacatggcacagaatgaacgtggtcagagcattattatgccttttgaagaacagcgtgtcttgtatcgatcagatacccatgcacctctatcggtggtcagtcagcgttatcaggaagttcagccaaaagagattttagaattctaccgtgatctgactgagcaatcaggttttgaattggaaacggctggcgtactgaagggtggtaagaagttttgggcattagcacgtacgggtcaaagtactgtattaaaaggcaaagatgtcagcaatggctacgtgctactcgcttccgcatgtgatggtacattggcaaccacagcacaatttacgaatattcgggtcgtgtgtaataacacgcttgccattgcacttaaaggtgcatcagcaagtacaggcgtagtcaaagtaccacacagtactagattcgatgcaaagaaggtaaaacagcaattaggtatttcagttcgtgcgtgggatgaacacatgtacgagatgaaacaactctcacagcgtaaagtcagtcagcaggaagccaaggcttactttgatgccgtgttcaacaatactacgatgtccattactaatcctgaagagaacatcattcagttttatcgtcaggtggcaagtaatccatcacagcaaaacaaaaccgagccaaatggaagagcaatgaccaaagctttggagatgtttaatggtcaagggcgtggagctgatctttcatctgctaaagatacagcctatggcttgctatgttcgatcactgaatttgttgaccatgaacgtcgtgccatgagtacagatcatcgtttggattcagcatggtttggagctggagctaaccttaaacaaagaggactagaacaagccttatctttaattgcctga

SEQ ID NO: 44850 - DNA, 1215 bp, Acinetobacter baumannii
atggttttattaagtgataatattaccattgaagatcgtatttcaaatttaaacaaagagtatttagaagctcagcaaaaagaaaatacagaaaataatattcctggtgaaattatacttaacaatatcgaggaaattactgatgaactcaaattacttatgattaaatttgacagaatcaatgatttaatatccagaaataaaatatcaattagtgattactctgaaattatccagcaagttaatcaagacctaaataaaaataaatctgccttaaaacttagaaatcttggggcaaatttcaatattaaagtttcaaaaaacacatgtcctacttgtttccagaacattgttgataatttattagcagaagatattaaaggccctcaaatggatttagaggaacaaattgagtatcttaaaagccaaaagaaaatgttagaaaaccaaattgaaggacttaatttagaaaatagtaatttaaccatgaagttaaataatacaaaaaaagaaattgatcgaaaaaatgaagttattagaagtctaaaaaagtccataacttccggtactgagctatcaaagctttatttaagacaacaaatatatattgaaaatgaaatccatcaacttcaggaacttaaaaaactaatacaggaaactaaaatcaaatttaatgaacttatagcagaatataaaaaagttaaatctgatttagataaattacctaaggatctatataatctatctgatagaaaaaaaattagttcttttgaaaaacactttcaaaataatgccaaaaaatttcaatataacagtgcaccaatttcagatataaccattaatatggataatttacttccctctctaaaccatatcgaattaagagagatccgtaaaagcaatattaaagttgactctagtgcaagtgattttgtaaggcttatttggagtttcttattaggcttacaacaaattgggcacgattatgcttgtaataacttaaatttaatacttcttgatgaacctggacaacattcaatggcattaagcagccaacgagctctattcgcagagttggcttctatttcgaatttacagagtatagttgcagcatcatttgacaattctgaagaaaattttcaggaaattaccaatggactcaaatttaaacttatttcatgggatggaaaattaatcaaacctttcagggaatga

SEQ ID NO: 44851 - DNA, 1371 bp, Acinetobacter baumannii
gtgagtgaaaaagaaactcaagcaactaaaaaagttgctctatctgctaaagcaatagagaaaatgaagaatgatagttataaagcagatataggtgagaatgaaggcttgcgcgtatataaagggaagacaggattaacatcttttatatatcgttatcgtagtcctattgataactcactaaaaaaaatgaagataggtaattttcctgaattatctttggctgaagcaaggatcaagttgcaaaagttaaaagctcaaaggcgttcaggcatttgcccgagtacttatgcaaaagaagaaaaattggaacggctaactaaacttcaagcagaaaaagagaaagaggaacttcataaattcacggttaaagatttaatcgagttatatcttacaaacgtaatcgaagacaggtatgtagaagatccaagatctgggctaaagaaactgattagagggtctcgtaagaaaaaggggcaagatgaaacaagaagaacattgtatggagatgctgtaaaagttttagggcatttacctgctgaaaaaattactcgtaaagatatcgtgcagttggtgtcagatatagtggcaagaggagccaatgttcaggcaggtagagttttgtctgaattaactttagcttatgagtacgctattgggcttgaaaagtttaaagaagattttgctaacccagctttgttggctaaggctagtgttaaacaagctagattaaagctgacttgtacgaaaggaactagagttttaagtgatgatgaattaagacgtgttttgcagtggttgccaacttcagggttttcagcaaaacataaacaagtcttgatgatcacactttggacaggatgccgaacaggtgaagtctgtgaagcaaaatgggcagatattaatttagagtcgagaacatggcatatcagacaaagtaaaaatggttcggaacgctatgttcaactatctcgtcagtgtgctgagtttattgcaaatcttcctaataagcatttggaatatgtttttcaaatggaaaaaagtggaaagccacttttgcaaaaaacgattactgaatgtaaatggagaatgaaacaccctgaaaagatggtgtataaacaaacatatagacctgaacagttgtggttgaatgacatgcctgattggaatccacatgacttaagaaggacggtacgtacagggttatctcgtttaagttgtccagcagaggtggcagaagcggtattgggacattcaaaaaaaggaatacaaggaacttatgatttacacacttatgaaaaagagtgtagtgagtggttacagaaatgggctgactatttagatgtgttaatacatagcagtcatttttag

SEQ ID NO: 44852 - DNA, 381 bp, Acinetobacter baumannii
atgactggatataaccaaagaagagtaagagggatatgtagaaagcaggctttcctgaaagggcttatgcttttaagtacactacatgtacctgtcgtgatatacgctgctaagccaagtgagcaataccacaccctgaaagagaacttgtcacaactttttgtccctaaaagtagtgatgactttaaagttgccaaaatgcacaagcttagtaattttaagctagaccgttctattgtgcaggaatttcctactgttcaacttaatgataatcgagcttcatctttttctaacttgccatcaagaacgatgacattgcaagatgcggtaaaaattgccattcagcgtagcccgatatttcacaatctattgcaactttag

SEQ ID NO: 44853 - DNA, 219 bp, Acinetobacter baumannii
atgtctataggtcaattcaaaattcgcattaaaaaacgctttatatttccattgcagtaccataaaatttggagtgttattatgcaaaagccggttaagcgcggagacgcgtggcgcatcactgtccgttatttgggtaaacgttatacagctactcgagatactgcgagtgagtgtaaacaatgggccgctaaaaaattattagaattacaatcttaa

SEQ ID NO: 44854 - DNA, 546 bp, Acinetobacter baumannii
atgaatattgaacaatatttagatgcactaataaaacgcgaaggtggctatgtaaatgatccacttgatcatgggcatgcgactaaatttggaattacacaagccgttgctcgtagttatggttatcaaggtgcaatggagaatttaacgttagagacagccagagaaatttataggaatcaatattggcttgagccgcgatttgatcaagttaatttgatcagtgcacttattgctgaagagttattcgacacgggtgtgaattgtggcattagtttcacaaaaccacttttacaacgtgcattaaatttattgaataggcagggcaaagaaggctgggtagaccttaaggtagacggtgaatatgggtcagccactttgcaggctttaataaaatatattaaaaaccgtggtaaggaaggtgaaaaagtgctggtacggcttcttaatattatgcaaggccaacgctatattgaaattacagaaataaatccgaagcatgagcaattcttttatggatggcttgctaatcgtatcagcttataa

SEQ ID NO: 44855 - DNA, 2736 bp, Acinetobacter baumannii
atggatattcgaccaagtttactcagctacatctttgcaggttctaagaaatggagaatcaactatacattttctgaactggtacttgaactggataccaaaacggtaagtcttaatcctgaacaagtgctagaaacacatattcagaaaggttggatatggtcatctttaacactcaagacccttaatcaaaactttcagttcaagggtatgttcaataaacaggctgaacagcttcaagctgaaatccgtaatgatgcggaattcctgagaaataaaagaaacgctgaaaaaatcaaggaaaacctaaaaccatacatacatgagtatcaagcctatattcaacaaaacatttacttatcctatcgcctaagcaacctgtttagatcagatttatcacaaagatcaaaagccttggtagaacagtttaataatctcattcaaagagatagttcttttgcatttgatccacccttacagaacctgtttgagcaattgcggcagtttattaaattgccaattgaggctaactacgccatcgatgcaaagaataagcgttttgttgaaagtgagttaaaggcatttcaaaagttttttgatcaggtggaaaatacaccactcaccgatgaacagcgcatttcctcgattatctttgaggaccgcaacttattggttgctgcggctggttcaggcaaaacatccacgattgttggaaaagtaggctatgctctcttaactggactctacaaacccgaagagattctggttctcgcgtttaataaaaatgcgggcgatgaactcactgaacgtataaactttcgattaaaagacattctcgcccagtttaatactcgtgttgaggctcttaatttccataagtttggtgtgagggtgattggtaaggccacaggaaaaagcccctctgtttccaatgatgcaggaaaaccgcagtccctgttgaataagattattcaacaactgatcgaaactgacccagacttccaggcaaaatatcttttatttaaaacggcctacctaagacctcccttatcaccatttgcatttaaaacacaaagtgaatgggaaaaggcacacagacgctcatttgacaggtttaaggatggttatgaaacctatcagggtgaaatcgttaaatcacatggtgaaaaagcgatagcgaattggttatacagtcagggtgttccctacaagtacgaaatgagctatgagtatgacaccgcgaatgaaaactatcgccaatataagcctgacttttatctgcctgaaataaatctgtatttggaacactacgctctagaccaacatggcaggccacctgcacactttggacaaaagtatttggatgacatgaagtggaaatcaggaattcatcaacaatataagacagatttaatcacaacaacctttcatgagtttattacaggttctatctttaaaaagctggaacaggagcttaaatcaaggggacaagtatttaaaccacgtagtcttcccgagatcaacgagaaagcaaaatctatctatgaatatgatgcaaatgaactttatgcaagttttttaagtcactacaaatcaaatcaagccaacattactagtctattagccaaaccatcactaagccaacgagagattctttttttacagctattttctaaggtttaccaacgttacgaccagttattaaaaaacagtaaagaatatgactttgacgacctactgattgagtctgctcaattaattaatgaaaacaggtacaagagccctttcaagctcattattgtggatgagtttcaggatacatcacaagctagggccagactaattttgtccttattgaaacaagtacccgaagcaaagctgttttgtgttggagacgactggcaggccatataccgtttcgcaggctcggacattagtatttttacacaatttgaaaaggtctttggctataccaaacaaactcagcttactcagacattccgttccaatcagggcattgccaatgtcgcgagtggctttatccagaaaaataagtcacagcttcaaaaagtagtcaatgccgttgataaaactaccaataaagtgattgagataagctttttaacaaggactcaggaaattcatgaatatctgtttaaaaccattatggaaatcaataatgctaatacaggatcaagtaagaagaaatccatttatattttaggacgctacaaacatcacaaaccaaatctggacaacattttgccctttcttagaaattgcagtgttgagtataaaaccattcactcctccaaaggcttacaagcagactatgtgattcttttaggcttaaatactggcggtagtgcattcccttctgaaaaagaagatgaccctcttatcaacttagtcttgccacaaccagaaacacatgcctatgctgaagagcgccgtctgttctatgtggcattgactcgtgcaaaagagaaagtctttctcattggtgaacgtaattctgtattcattgaagaaattactaaagactcaagctttaaggaatttattcatataccgcaagatgacaatacgtctattaaccatgatattcctgataaatggcgatgtccaaaatgtcagcaaggtcgcatgtggaaaaaaacagggccatatggtgaatttatggcttgtaaccgctatcctagttgtgaccataaaagaagcttaagatatcgataa

SEQ ID NO: 44856 - DNA, 1350 bp, Acinetobacter baumannii
atgcacgctacattagaaaacatattacagcaattagaagcagttaataatcaacttaataacgttattcaaaataatgagcctttagcacaaacacataatagttggggtagtcctaacttaaacaaaacagaactcatttctaaatcaaaacatattattgattttattaaaaattatgaaactgatgaactggatcagaatcaagatgctcttatatctaattatattaaacgcttagaatatcttgttagtcataccattccccaaatgtggtcatctaacgtcaatttagcaattccagcatatttattcactattgatagccttaaaaatttacttgagtctattttagttccatatgcaaataaacttgctgctgaccaagttgaagctttaacaaaattaaaaaaattaaatgctcgtattcgctctattgaagcaaaaatacatgaagtagaacctcgcacagactctttgacttcaatggttgaacgaattgaacaagcatcggaggcagctgaacaattaccgactgatttagcctctttaaaggaagcgagacaacaaattaataatttgttttcagattcaatgaaagaaaataaagaaattgagctattaaaacaaaattcgaaattacttgatgaagaaattaataattatgctttgaatgctaaaaatgtgttagaacgctgtgaaactgcatattcagcagcaacaagtgttggattggcagcggcatttactgaacgttcgaatatcttgtctaggtctataaaatggtgggttgcaggcctaatttttgctttaggagttggaggttattttggttctcaacgtttatcaagcctatctgagcttttaaaagatactcatagctcaacgatcattatttttattaatttacttctttctcttttatctttaggcgctccaatttggttttcttggttagcaacaaaacaaataggccagcgttttagattatctgaagattatgcatttaaagcttctgtatctcgtgcatatgaaggctatagtagagaggctgctagagttgataagaatatggaaacaagacttttggcatcggctttatcacgcctagatgagcagccactgagatttgtagagaatgaaaatcatggaagtccgtggcatgaattgttttcatcagatatagtaaaacaggcgacccaaacagtaccaggttttgcgggtcaagtggccgaacaaattaaagatgctgctagtaaagctgtaatagcaatcactccaaaagcaactgaaatagaatcaaagaatagtacttcatcaacatcgaaccctagtgaagatacaagataa

SEQ ID NO: 44857 - DNA, 1494 bp, Acinetobacter baumannii
atgagtgcagcagaaattgttgattggataaatagcataatctggagtaaaggacttatttacctgtgcttaggcgcgggtttatttttttctattttgacaagatttgttcaagtacgtcaaatgaaggaaatggctaggctgttaataaaaggtacttcttcagatcaggggatttcatcttttcaggccttagccgtttcattatcaggtcgagtgggtgtaggcaatattgcaggtgtcgcagcagcaattggttttggtggacccggtgctgttttttggatgtggttagttgcatttttaggagcaagcacagcatatgtggaatcaacgttaggtcaaatctataaggtcgagtaccaagggcaatatcgtggtgggcccgctttttattttgataaaggtttgggtcagcgttggttaggtgttgtatttgctattgcagcaattatttcttgtggtttgttcttgccgggtattcaagctaatgctgtaggtaaggcatttacgcaaattacaggtgaaggggcaattatttttggtgatattggtttatttaaacttgtagcacttgtggtgattgtgggtttacttgccatcattatttttggtggaatcaaacggattgctcgctttgctgaatttgttgttccttttatggcagcgggttatattttaatggccgttgttattgttattgctaatatccatgaattacctggagtaattaaattaatttttgaagatgctttttcgcctatggcgggtcttggtgcggcgatcggttggggggtaaaacgtggtgtttattcaaacgaagcagggcaaggaacaggccctcatgctgcagctgctgccgaagttcaacacccagctcaacaaggttttgttcaagcattctcaatttatgtagatactttatttgtttgctctgctacagcttttatgattctaattacaggtatgtataacgtacaaggtacattagaggcaggtcaatttattgttcaacatgttggagctagtgtagaaataggctcacctgcatttacacaaatggcggtcagcacaatgtttggtaattttggtcaaatctttgttgctttagctgtgttcttctttgcgttcactacgatagttgcttactactatattgcagaaactaatattacttatctaagttatattacaaaatctccatcgttattatttgtgactaaatgctttattattttatctgtatcttatggagtattaagcgcgactggttatatatgggggattggtgacattggtgtaggcttaatggcatggattaatattgttggtattattgtgacttattttgtatggaagccaacaattaaagcactaaaagattatgaagcacagcaaaaagctggagtaaaagaattcacatttgatcctgttaaattaggaattaaaaatgccacattctgggaagaaagattgaagaatagacaaaagtaa

SEQ ID NO: 44858 - DNA, 645 bp, Acinetobacter baumannii
atgtacaataattttttaatttcattactttataaaaatatgaataatttaattttcttacctggtgcatcaggaagtattagtttttggtatcccttaattgaaaaattacctcagcactaccggacaaaaattattggttaccccggtttcggcgatacagcagaatctcttgatgtgaagagttttaaagacttaacaaactatgttcttaatcaaattaatgaagaatctataattgtcgcgcaatctatggggggaatttttgcagttaccgcagcgttgcaaaaacctcaattagtaaaagggctggtcttgattgcaacttctggtggaatcaacctggaaccatttaatgtgcaagactggcgtgaagcataccgccaagcatttttaaaatatccagattggtttgttaccaccaatgccaattatgaagaatttttgtcagatataaatattgagactttattaatctggggtgataacgatccagtgagtccagttcaggtaggtcaatatttaaatcaaaagtttgaaaattcgagtttatatgttgtgaaaggtggtgaccatcaattagcagaaaaatatgcctatgaagttgcagttcaaatagaaaattacttaaaaggcctaatgtaa

SEQ ID NO: 44859 - DNA, 960 bp, Acinetobacter baumannii
atgattaaaaatgacaaaggattattccttgaagctccacaaggtaatgcctcagtttcaaatagtatattagtaggaaatactattaattgtcaggctagctcaactgataaagcaattattcaaagtaatctggttatatctgactgtaatcggaatgctacctcaaagcttcctaatatactctttcccgccaatgaaaaattaattgctggcaacaatgatgaaggtatatgtgatgtaactgaaaaagatggcttgttatgtccatttaatacaccaaaagatagctttcttggtttctttaagccacgactgcttgaaagctataacactttggccgactctttaattattaataaaggacatttatatagtgatgcttcttcagttggtctagctggctgtgaaaagtttgatcaaagaggaaaaaggcgtagtggttacgatgaactttgtgatttaggtgcaattgaatatattttaaatagtgaaatctcgccggttggtcaagatatccgttatggccaggttgcaaaatttagtattttaggttctttaagtgaatcagacttagttacacctgctacttgtaaacgtctatttggagaaaggtctgatggtaaggattggcagccaggatgtttgaaaattatacaaaataaagatactccaatttcaaaaggaactttaattcttgatcagagtggtaatgtcacttacacgccaaatggaaattggcatggtgccgatatttttagtattcaggttgtgacgagtgtaactcgttttaatggaggggttgattttcaatatatttctattcctacgactatttcacaagcacctttatctggaattgaagataaatctgtaagtactggtgggggcggtagtataggaggaggatttttattaagtttattttccttaattgcattgcgccgtttaaagtcataa

SEQ ID NO: 44860 - DNA, 126 bp, Acinetobacter baumannii
atgatgaaaaacaaaaatcacataagaacgatgtacacaagagataaaggttggcgcttatttggcttggcgcttgccctacaaatactttttattggagcaaattatttagcaatgatgagctga

SEQ ID NO: 44861 - DNA, 1818 bp, Acinetobacter baumannii
atggcgcaagctaaaaaatccgttgatatcaaaaatatccgaaatttctcgattatcgctcatattgatcatggtaagtctactttggctgaccgttttattcagatgtgtggtggcctgcaagatcgtgagatgcaagctcaggtcttggactcaatggagctcgagcgtgaacgtgggattaccattaaagctgcttcggtgacgttgtactatactcatccaaacgggcaggaatatcagcttaactttattgatactccgggacacgttgatttctcttatgaagtatctcgttcattagctgcttgtgaaggtgcgttattggttgttgatgctgcacaaggtgtagaagcacaatcagttgcaaactgttataccgctattgagcaaggtctcgaagttcttccaattttaaataaaattgatttaccgcaagcagagcctgagcgcgttattcacgaaattgaagaaattatcggtattgaagcaaccaatgcacctacatgttctgcaaaaacaggcttaggcgttgaaggtgttttagaaacattagttgatgttattcctgctccaacaggtgaccgtgaggctcctttacaggcattaatcattgactcatggtttgataactatttaggtgttgtctctttagttcgtattaaagatggtcgtatccgcaagggcgacaaaatgttggttaaatctactggtcagactcatattgttacatcggtaggtgtattcaaccctaaacatactgaaactggcgtgcttgaagctggtgaagtaggctttgttatcgcgggtattaaagatatttttggtgcgccggtaggtgataccatcacgctttcaacaacccctgaagtagcttcacttcctggttttaaaaaggttaaacctcaggtttacgcaggtcttttcccaattgatgcaagcgattttgaaccattccgcgaagccctacaaaaactacagatcaatgactcggctttattctttgaacctgagagttcagatgcgcttggttttggtttccgttgtggtttcttgggcatgttgcacatggaaatcgtacaagagcgtttagagcgcgagtatgaccttgatttgatcagctcagcgccaacggtagtgtatgaagctgtcactaaaaaaggcgatacgatctatattgatagtccatctaaaatgccggatggttctgttgttgaagatttgcgtgagccaattgcagagtgtcatattcttgtaccgcaagagtacttaggtaacgtcatgaccctatgtattgagcgccgtggtgtacaaaaagacatgaaattcttaggtaatcaagtttcaattacttttgaaattcctatggctgaagtggttatggacttctttgataagcttaaatcatgttcacgtggttttgcttcacttgactataactttattcgttttgagagttcatctttagttaaggttgacgtgttaattaatggtgagaaggtcgatgcgcttgcaatgatttgtcaccgtaatgatgctcgtcatcgtggtattgctttagttgagaaaatgaaagatttgattccacgtcaaatgttcgatgtcgcaattcaggctgctattggtgcacaaattattgctcgttcgaccgtgaaggcgatgcgtaaaaacgttttagcaaaatgttatggcggtgacgtgtctcgtaagaagaaactacttgcgaaacaaaaagaaggtaagaaacgtatgaaacaagtgggtagtgtagaaatcccacaagaagcgttcttagctgttttgaaagtagaaagataa

SEQ ID NO: 44862 - DNA, 969 bp, Acinetobacter baumannii
atgaatacatctatagctaaacacaattatgccccagatattttaggtgccggctatgaacagctaacgctcaactttccagatgattatgaaggtaaagttgtagccaccttagttcgtaaaaaagctactcaactgactcaaaaagccgtactttatattcatggttttttagattatttctttcaaaccgaaatggccgagcaatttaatgcccatggttatgacttctatgcactcgatttaagaaaatatggccgctcaaaactgcctcatcaaattttctataatgtgctcgatttaaatgaatatgatgccgaaattactcaagcattagagattattggccaagaaaaacatacacaagttttacttgcaggtcactcaacaggcggcttaacggcaacgctttatgctgcgcatcatcctgatcatcccctcattaaagcactctgggcgaatagtccgttttacgattttaatttaagcttagtcgaaaagaagtttggtattcccatgctcagtcgagtaggaaaatatctgccaaaagttaaatttccaagccaactgaacaaatggtacaccaccagtcttcataagcagcttaaaggtgaatgggatttcaacctcgattggaaaccaacctctgcccctacagttcaactcagctttgtacatgcaattcatactgcgcaaaaagaaattcaccgcggggttaaattgaatattccagccctgattatgcattcgcaccaaactaaaaacccacgcaaatggggacccgatgcaactcaaagcgatgtcattttagacgttaaagacattgctaaatttgggaaaaaaatgaaaggcgatgtctcggttgtctctattcacaatggtttacacgatttagtcctttcggcccagccagtacgggaacaagtctatcagcaactattccagtggctggatcaaaaagtcacctaa

SEQ ID NO: 44863 - DNA, 1191 bp, Acinetobacter baumannii
atgttcacaaaaaaggatttattgcagcaacggatgttgattgatcaactgcgcacgcaaaatagtctctctcctcagaacgctgccaaactcggccaaagtattgcaagctcgtgggaacgatcagcttctgctgcgattcctaaagaacgatttgcagcacctctactcgaaagaaaatctgcttcacaaaatgctttagatctggcactaagccagtgtgctgatgacttacgtcatattgcagagcaatcttctatggtcattgctgtgggtgacatcggtagtaccattatctggacagcctcaagtgctcaaatgcagagtgctgctgaacgtgtacattttgtacaaggtggtcaatggcgtgaagaatttgtaggtacgaatgcattagcgttatctttaaaaactcaacaatcaagttgtgttttttccaatgaacattatatggagtcgattcacgattgggtttgttatgcagcacccattatcgatccatactcaaagcaaaccttgggcgtggtagatttatcaaccacatggaaaaaccataataccttgggtattttggccgctgagcgttgtgcctccattattcaatctgccttgttagaacaacagcgtcagcacttacatatccgggcattttcgacgccgcaagttaaatttaacggcaaaagtttattattgacgccgcgtcaaattgaaattttaacgatattggcactatgtccacatggtttaaccttagagcatctctatcaggcactttacggtgagcgtaaagtaagcatgggtacgcttaaagctgaaatgtctcaattgcgagatatattgggaggtttgcttggttcacgtccatatcggttacttgtgcatgttgaggccgattttttacaagctgaacaagcgcttgatgctggatatgtcgcctctgcattgcagctttatacgggcgtatttctggcaaaaaccgaaagtccgtttctgtgtgcatggcgtgactgccttgagtcgcgcttaagtgacgcgatttttaaaacacaagaaacagatttattacttaagcatttagctcattttcccgaagcaatcgatgcggtcgaacgtcttatggagttattaccgagtgaacatcctgcgcatcaattgctagtgaaatatattgactcacctaagctaagttag

SEQ ID NO: 44864 - DNA, 1512 bp, Acinetobacter baumannii
atgcgctatatcgatccaaatcaaccaggctcaaaagttcaatttaaatcacaatatgaaaattttattggcggtgaatgggttgcacctctaaagggtgaatattttgataatgtgtcaccagtggatggaaaagctttcacacgcattccacgctctagtgctgaagatattgaacttgctttagatgcagcacacaaagcgaaagcttcatggaataaatcttcaccgactacacgttctaatatacttttaaaaattgctgatcgtttagaagcaaatcttgaaatgcttgcggttgcagaaacttgggacaacggtaaagcagttcgtgaaactttagcagctgaccttccacttgcaatcgaccatttccgttatttcgcaggatgtattcgtgctcaagaaggcggcatctctgaaattgatgaagataccattgcctaccatttccatgaaccactaggtgtggttggtcaaatcattccatggaacttcccgattttaatggctgcatggaagctcgctcccgctttggcggctggtaactgtgtggtgattaagccagctgagcaaactccggtaggtattttgttagttgccgaactcatccaagatatcttaccgccgggcgtacttaatattgtgaatggtttcggtgcagaagttggccgtccgttagcgacaagcccacgtattgccaaaattgcgttcacaggttcaactcaaactgggcaaatggtgatgcaatatgcgaccgaaaatattattccagtcacgctagagcttggcggcaagtcaccgaaccttttctttgaagacatcatggataaagaagatgacttcttagaaaaaacgctggaaggttttgccatgtttgccttaaaccaaggtgaagtatgtacttgcccttctcgtgctttagtacaagaaagtattgctgatcaatttttagagttggctgttgaacgtgtaaaacgtattaaaactggtcatcctctcgatactgaaaccatgattggtgctcaagcatctttgcaacaacaagagaaaatcttacgttgtattaatacgggccgagaagaaggtgcagaactcttacttggtggtagtggccgtaaagaagtaggtgatggtttctatgttgatccgactatttttaaaggccacaacagcatgcaagttttccaagaagaaatttttggtcctgtactggctgtgacaacatttaaagactttgacgatgcaataaaaattgccaacgacactatgtatggtttaggtgcaggtgtatggtcacgttcagcccatatttcttaccgcgctggtcgtgctattgaggcgggtcgtgtctggacaaactgctataacatctaccctgcgcatgctgcatttggtggttacaagaagtctggtattggtcgtgaaaaccataagatgatgctggatcactatcaacaaaccaaaaacttgttggtgagttattcaaccaaaccaatgggcttcttctaa

SEQ ID NO: 44865 - DNA, 1437 bp, Acinetobacter baumannii
atgaaccaaccagaaacagcttccgttatttcttcaagtgcagaagtctcatcagcagaatattttgctcagcgccaacttaaacaaggtaccgtgggttggttactcctgattggtttaggcgtagcttatgtgatatcaggtgattttgccggctggaacttcggtattgcccaaggtggttggggtggtatgtttattgccactgctcttgctgccttgatgtacctgtgtctatgtctttctatgtcagaaatgtccaccatgatgccgacagcaggtggcggttatagttttgcacgtgctgcctttggaccttttggtggttatttaacaggtacggcgattttaattgaatacgcaattgcgcctgccgctattgccgtatttattggtggttattgcgaatctctatttggtattaatggctggatgatttacctcgcctgttacgccatttttatgggtatacatctcaaaggtgccggcgaagctttaaaaatcatgtttgcgattacacttgtcgccgctgttgcccttgtcgtgtttattggggcaatgattccacactttaatgcacaaaatttatttgatattccagttagtacaggtgttggcgcaagtctttttttacctcatggctacttgggcatctgggccgcggttcctttcgctatctggttttttcttgcagtagaaggtgttccgttagcagcagaggaagcaaaagatccagccaaatctctgccacgcggtttaatcggtgcaatgctcatcttaacagcatttgccatgcttattttgttcttgggtgcaggcgcagcaggtgcaagtactttacaaaactcaggtgcccctctggtagatgctttagttaaagtttatggcaccaacacttggcttgcgacattcgtaaactttgtgggtttagctggtttaatcgcaagtttcttctcaattatctatgcctattcgcgtcaaatctttgcattgtcacgagctggttacttacctacttcactctctttaaccaataaaaataaagccccttatcttgcaattattattccgggcattattgggttcttactttcactcacaaaagaaggtgattcactcattttaatcgcggtttttggtgcaactatttcttatgtgctgattcttttatcccacatcaaactgcgcttatctaaacccgatatgcctcgcccttataaaactccaggaggaatcatcacttcaagcattgcactagttttagcagtcgctgctgtggtcgcaggttttgttgttaatccgaaagtgtggtttattgctgccggtatctatgtcgtatttattgcttactttttgttctacagccgctatcatttagtgaaaggaacaccagaagaagagtttgcaaatattaaaaccgcagaacaagaactataa

SEQ ID NO: 44866 - DNA, 1386 bp, Acinetobacter baumannii
atgagttatcgcaatattgtcgccaatcaacagtatcactttgctgacctaaaaacgttaatggccaaagctacaccgttacgttcaggcgatgagttagcaggtgtagctgccagagatgcaaccgaacatgttgcggcacaaatgactttggctgatgtgccattaaaaacctttttaaatgaagttgtaatcgattatgaaactgatgaaattacacgactgattattgatgaacatgatctggcagcctttgcccctatttcacactttacagtaggcgattttagaaattggctacttggagaagatgccactgcagaaagcttaaaagcattagcatcgggtttaacttcagaaatggtggctgctgtcagcaaaattatgcgcaatcaagatttgatttatgtcgccagcaaatgtgaagtggtcacccaatttcgcaacacaattggtttaaaaggccatctttctacccgtttacaacccaaccaccctaccgatgatgtgctcggtatttcagccagtattttagatggtttgatgtatggcaatggcgatgccgtaattggcattaatcccgccacggataacctgcataatttgtcagagctactgaaattgcttaatcatgtcattcaggaatatcaaattccaacgcaatcttgtgtacttacgcatatcagctcaggcattcaactggctgaaaaaaatgtaccgattgatttaatgttccaatcaattgccggcacccaactggctaatgaaggttttggaatctcactcgatttactacaagaaggatatgaagccaccctcgcacttaaacgcggaaccattggacaaaacgtcatgtactttgaaacgggtcaaggcagtgccctatcaagcaatgctcatcacggagtagaccaacaaacattagaaactcgtgcctatgcggtggcccgtaaatacaatccgcttttagtgaatacagtcgttggttttattggccccgaatatctctttaacggtaaacaaattatacgtgcgggactggaagatcacttctgcggtaagttacttggcgtgccaatgggctgcgacatttgttataccaaccatgccgatgccgaccaaaatgatatggatgtacttcttactctatttggcgccgcgggcattaactttattatggggattccgggttcagacgatgtcatgctcaactatcaaaccacttcctttcatgatgctctctatttaagacaactcttaggtttaaaacccgctcctgagttctccgcttggcttgaacaacaagggatttttaaacagcaaaactctcaaatttgttgggcagaccatatgcctgaccaattctctcgtctgcttatgaactag

SEQ ID NO: 44867 - DNA, 816 bp, Acinetobacter baumannii
atgaaacttaatcgtgatattcaatatccatcctctacccatcaggatcagtgggaaaagctcaaacagtttaccgatgcccgcattgctctgggtcgtgcaggttgtagtatcccaacacacgccttacttgagtttcagttgtctcatgcgcaagcaaaagatgcagtttatcaagagatggatgtttcctacctctcggagcaattagcacagcagcagctgcaaagttttcatatacaaagtaatgcacctaataaagaaatttatcttaagcgtccagatttgggacgccaactttcaaacccatcaaaagataccttaattaagaagtatgcagaaaacccgcaacagtatgatgtttgtattgtggtaggtgatggtctctctgcaagagcgattgaagcaaatgctatcgcatttattgcagcgctaagtgaacatattcagcaagaaaattggagccttgccccaattgtacttgcaacaggaagcagagttgctttaggcgatgaagttgcagaaatttttaaagcatccatgctagtcatgctgattggagaacgccctggtttaagctctcctgacagtatgggaatatactacacatggaatgcatattcaggctgtctcgattccaaacgcaactgtatttcaaatgttcgctcagcaggtttaagtattccggttgctgtacaacgtttaatggcattaatgagaaaatcaaaacagcttggcttttcaggagtgaatttaaaagatgaacatcaactttcaaatatcgaccataatgaaaacacaaagcttttattttaa

SEQ ID NO: 44868 - DNA, 510 bp, Acinetobacter baumannii
atgagttttcctcaagtcgaattaaacaccaacaaaggtcgtattgttcttgagcttaacactgaaaaagcaccgaaaacggctgctaattttctagaatacgtacgtgacggtttctatgatggcgtgattttccaccgcgttattgacggtttcatgatccaaggtggtggctttgacgaaaacttcaaagaaaaagcaactcgtgatgcgattgaaaatgaagctgacaacggtttaagcaacgatgtaggtaccattgcaatggcacgtactcaagctccacactctgcttctgcacaattcttcatcaacgtaaaaaataactctttcctgaaccatacttcaaaaactgcacaaggttggggttatgccgtattcggtaaagttgttgaaggtatggacgttgtagaagcaatcaaaggcgtacgtacaggtaaccgtggttatcacgctgacgttcctttagaaaacgttgttatcgaatctgctaaaattatttctgaataa

SEQ ID NO: 44869 - DNA, 720 bp, Acinetobacter baumannii
gtgacttatctgtttatttcagatttacacttgtcacctgaacaccctcgactcgttcgagggtttttagatttgttggtgcattatcaaaataaacaaacacagctttatattttaggtgattggtttaatgcttggattggtgatgactattcagcgccttggcttgaggaaattgtcgaggctttaaaagtatttaaccaaaaagggaatcgcgtttatttccaagtgggtaaccgagactttgctttaaatcaggttttcctagataagtttaatggtgtattacttcctgatatttattatctcaacattgcaggtcaccaataccgtttggaacatggcgatgcgttatgtactgatgatatttcctatcaaagatttaaaaaaattattcgaaatcccttcctagttgcttttttacgccgtacccccttgagtttccgtacaaaactggtcaagggttttcgcaaaagaagtcattcagacaaacagcaaaaaagttatgaaattatggatgtaaatgaacaagctgttctctctgccctcacagatgtagatatacttattcatggacacactcaccgtccagcaattcatcaattacaacataaacagcggattgttcttggcgattggcgtgaagatcaggcttatattttggaaattgatccatcttcaaatacgcaacacctcgaattgattgtctggaattattag

SEQ ID NO: 44870 - DNA, 858 bp, Acinetobacter baumannii
atggtattaatatttgctgcagcattgtgcagtgttctggtttctgtactacttaaaaatttaaagaaaaagggatatcaacccatgcaaatgattgcatggaattacgcaagtgccagcttgctatgttatctgtggtttaagccagatattcagcatatttctatacaacatacaccttggtggctaattgtggcgttaggcgtcattctaccgagtatttttttatgccttgctaaatctttagagtacgcaggtattgtcaaaaccgaaattgctcagcggctgtccgtggtactttctttattggcggcttatttctttttccaagagcagtttaattctcttaaattattagggataggtttgggaatttttgctgttctcttaattttattaggtcatttcaacgagtcttccggatctcaatcaaaaaaagcaatttttgctttgatgagtgtctggtttggatatgctgctgtagatatcttgttaaaatatacgagtagcttaggcctacagtttactttgactttaaatctaatttttataacggcctttgttttatcgattatttatttaatatttcaaaaaaattcagcatggcattttaaaaatacttttgctgggttaatgctaggcgtactaaatttttcaaacattgccctatacgttaaagcgcatattttactcaaagattctccggccattgtctttgcgagtatgaatattttggttgtgttacttggaatagttagtggcgtagttttatataaagaaaaattaaaactcccaacgattttaggaacgattttgggaataagcggactggtgagtttagccttagctatgaaatag

SEQ ID NO: 44871 - DNA, 945 bp, Acinetobacter baumannii
atgtcaaaccaattgcccgtcatcaatttaatgggaccgactgcaagcggaaaaaccgctttggcatgtgaactctatgaacgtggaaattttgaattaatttcagttgattctgtacttgtatataaagatatggatattggtacggctaagccaacacgtgaagagcaggagctatacccacatcatttaattgatattattactccacttgaggtctattcggctgctcagtttgttgaagatgcttgtgctttaattgatgagatgcattcacgtggcaaaactcctattttggtaggaggaaccatgctgtatttcaaagctctcttagaaggattatcaagtaacttgccaagtgcagatgcaaatgttcgcgcagaaattgaagaaaaagcagcaaatgaagggtggcaagctgtttatgatgagctggtggcagtagatccggcggctggagtgaagtttaaggtttctgataaacaaagaattattcgggcgttggaagtttaccgtattacaggtcaaccaattaccaaattgcaggcagaacaaccaaaaaatgtaccatatcgatacacatttcataactacgctttacttccagatcggttagaattacatcaacgcattgagcaaagattaagcaaaatgtgggatatcggttttttgagtgaagtcgagtctctaattgaaaaatacgatttagatgaaaatttaccctctatgcgttctgttggttatcgacaagctctagaatttctattaaaaagtgatatgagtctcaaaaaaaagcaggaaatggaggataaagccttatttgcaacacgacaacttgccaaacgtcaatatacgtggttacgttctttgcaagaaatacacgattttaaaacttacttgacgataaagcaggcgaaagaagacttgcgaaactcttatggataa

SEQ ID NO: 44872 - DNA, 1953 bp, Acinetobacter baumannii
atgactgatgaaaagctaacacaacgtcgtattcatacattagacgccgcgttagccaaccagattgctgccggtgaggtgattgaacgtccttcatcggtcgtaaaagaattattagaaaactcaattgatgcaggtgcaaccgaattaattgtgcggattgcacaaggcggctcaacattaatcgagattattgacaatggacatgggattcatcctgatgatttaccattggcagtgatgcgccatgcaaccagtaaaattaaaacagcagaagatttacacgcgattgttagcttaggtttccgtggtgaagcacttgcttctattgcagcagtttcacgattgactttaaccagtagccaagatgaaagcggaattggtcatcaggttgaggtgaatggtaccgcctttgatcatcaacaagtccaagctgttgctgcacaaaagggcactcatattcgagttcaggacttgttttttaatgtacctgctcgccgtaaatttttaaaaaagccaaccactgaatttgggcatattgaagaaattgtacgccgtttggctttaacgcattttgatatacgttttgtacttgagaataacgataatattcgaattaatttaccaatagcagatagtggtgaattaagatttcagcgtgtacagcaattattgggtcaacagtttgttcaaaatgcttactggatcgatgccgaaagtattaacatgcgtttgtcaggttggctagggcatccttcagatgcacgtgcccaagcagacttacaatatgtgtatgtaaatggccgaattgtgaaagataaaaccatttcacatgctttaagaatggcatatgacggtattttacatggccatcagcattcatcttatttacttttcttagaagttgatcctgaaaatattgatgttaacgttcacccgacaaaacatgagattcgttttctaaatcaacgtgaagtacatgagtttgtaagacattatgctaaagaaacattagcacaatttcagacagctagtactgatttagcacaagccatgaaagtggatgatattcaaaatctttcggtacaacctcagcctaaataccaagaacaatttacattgcaccgtacagcgcaagccgctgatacagcagtagacaaaccaaatgcttatcagccttctactgagcttttaactgattttaataatagtcgtccccaagctgttcattatgcggaacaaactccaaaatataatggttctgcgcagttaaataatgcattaaagacttacttggctccattacgtgatcaacctgctaatttttcagttgatgaaaatattgagcctgtcgctaaggtagatgaatttccattaggtatcgcaattgcccagcttcatggaatttatattttggcgcaaaatactgaaggcctgattattgttgatatgcatgcagcacatgagcgtattttgctgcaacaaatgaaaaatgcttgggataaacctgagttttggacatctcaacagttgcttatccctaaagtgatctcaattagtcgtatgcaagctgttcgtgttgaggatttaaaacctcagcttgaacgcttagggttagagattgatttatatggcgatgagcaagtcattgtgcgtggtgtgccggctattttgcaaaaagcggattttgaaaatcttattcccgaacttctcaatgacttagatccaaatgatgaagcacaaggtttattgcaaaagcgtgatgaactgttagctggtatggcgtgtcatggtgcagtacgtgctcatcgacaacttagtctctcagaaatgaatgctttacttcgccaaatggaacaaaccgaatttgcgagccaatgtaaccatggtcgcccaacttggcgtgcatttccattatctcaactagataaattatttgctcgaggagagtag

SEQ ID NO: 44873 - DNA, 456 bp, Acinetobacter baumannii; identical to SEQ ID NO: 43782

SEQ ID NO: 44874 - DNA, 909 bp, Acinetobacter baumannii
atgtctagcccgattgaatttttcccacctatgattgatggcgtaagcgcaagccaagtctatcttcctccacaaacgacagcacaaaccatctatcaatttctttgcgaaaattttcctcatataaaagcaacagagtggcagcagcgttttcaagatgggcttatttacgcggcaaatggcgaaaaattaacattaaacagcccttatatagcaaacacgcatattttttattaccgattccttgctaacgaagtacatgttccctttgagcatcagattttatttgaaaatgatgacttgcttgttgtagataaaccccattttttaacgattagcccaacagggcaatatgtacaagaaacattattagtccgactaaaaaagcaaactggcaatgagtttttaaccccgatccaccgattagatcgtgaaactgccggtgtcattttattttgcaaacgaccgcagtcacgtggaatttaccaacagttatttgcagatcgtcaagtcaataagatttaccatgcaatcgctccatataaagctgaattaaaatttcctcagagtttaaaactgtatttagataaaggtacacccttttatacaatgcaggtgattgcacatacaaaaaccaataccgaaactaaaattgagctgattgaacataatcactcatgggctaaatattgtttaacgccaaccaccggaaaacagcatcaactccgcgtccatttaaatcatttgggaattccgattaaaaatgatccgttttatccaatagttcaacataaagccgatgatgatttttctcagcccttacagcttctagctaagcaaatttcttttatagacccgctaacaaaacaggaaatggttttcaattcacagcttgaattgacactgtaa

SEQ ID NO: 44875 - DNA, 309 bp, Acinetobacter baumannii; identical to SEQ ID NO: 43784

SEQ ID NO: 44876 - DNA, 444 bp, Acinetobacter baumannii
atgattgtaagacgagcgacctatgaagatctaagccaactcgctgtcctatttgatgaataccgtcaattttatggtgcatcttctaatctagaagaatcccatcattttttaaaacaacgttttgagaataaagagagcgtattttttatccatattaaggacgaaaaaattactgggttcgtattgctttatttaggtttttcttcagttgcttgttcaacttactacatcttagatgatgtatatgttacccccctattccgtcgtcaaggctcggcaaaacagctcattgatacagcgattttatttgcaaaacaagaaaacgctttacgtattagtctagaaactcaatcgaataatcatgaatcacaccgcctctatgaaaaaatggggttcatccgagacagtgagtttcagacatttcattgttttcttaaataa

SEQ ID NO: 44877 - DNA, 705 bp, Acinetobacter baumannii
atgctgctggaaaaaattttacaatcacaagggtttggttcacgtaaatattgtcagcagttaataaaaaatggttcagtaagtattgatggggaggttgtgagtgatctcaaaaagcagttctccccagaaaattttgagttttccgtttttggtcaaaattatcaatatagagaaaaaatttatattgctctaagaaaacctcaaggttttgagtgttctcatcatcctcagcatcatcaaagtgtttttagcctactgcctgagaccatgattcatcgtggtgtgcaggcggttggacgcttggatcaagacacaacgggtctgcttttacttactgatgatggtaaatatctacaagctttaactcatcctcgtaaacatgtaccaaaggtttatcacgttacaacttacgaccccgtaacccctgagcaaattgaaatgcttactcaaggtgttaatttacaccaagaaaagggggtatttgctgccacagatgtagcactactaggaactcatcaattaacgatgactattcatcaaggtgtttatcatcaagttaaaagaatgattgcagccgtaggcaataaagtcgagaaattacatcgacatcaaattggacaattggttttacctgaaattgaggaagggaattgggtatatttgtcggagcaggaaaaacaactcgctcaaaatattatttaa

SEQ ID NO: 44878 - DNA, 1425 bp, Acinetobacter baumannii
atgagtacgcttatttacccaaatttaaacttaaaagattctcactttaaggcatttaaaatatcagatgattttattccaccaacacaagatcacactttcaacgcagaactttttttaaaagaagtcgatgaatatttaagtttatatcctcagactcagcacattgatatttgtctacatgacttaaacggacatattcgtggtaaacgaattgacattaaaagcctcaaaaatctctctcatggatgttattttccactttctgtttacgccatgagtctggatggaaaagtaattgaagaaacaggtctaggaaaatatattggtgaaccagatagactttgcctgcccattttaggcagcttgcaaccaagtgccttatccccagaattaaatgctcagctttacctatcaatgcaagaagaagatggtacagactgccgctatgaaccacgcaatatattaaaaaaaatattaaatcagttacatgcccataattactttcctgtcatggctgccgaattagagttttatcttttctcacctcagcatcaatccgagatatgttcagaaaaccaatgttttgatatagatgcgccaaataattatcagcaagttctggatgaagttgaaaaagcggccctactacaatcaattgaaattaccgctattgttgcagagtcatcccctggacaatatgaattaaaccttcaacacagccatgacattttaaaactctgcgatcaaattaatgccttaaaaagaattgttaaacaagttgcaagaaagcatgacttaaccgcttgtttcatggcgaaaccaaacttggcaaaggctggtagtggtatgcattttcatatgagcatgcttaatcaataccatgaaaatatatttagttcagaagtagaaaaagataaactttcagccaaattattgagcgcgattagcggactcattgagttaatgcctgcatctatggcgattttagcgcctaatattaattcttatagacgttttaaaattggtcatcacgtgccattagaagccaattgggataccaataatcgtaatgtcgcaatccgtattccatgctcagacgtacaaaatcaacgcttagaatatcgtgttgctggtgcggactgtaatccctatcttgtaacagcgactattttagcgggcgcatcttatggcttatctcataagttaccgctgccaaaacctgctcatcttttgaagtttcaagatgagcacattttattagccaacaaccaaccagaagccttaaaaatatttaaaggaagccttattttaaaaggatatttaggagctgaatttgtagagcattggtacacagttaaacaggctgaatatcaaagcatttacagccaaatgactgaagcagaacaacattgggatatataa

SEQ ID NO: 44879 - DNA, 1710 bp, Acinetobacter baumannii
atgctagaacttatacttgttttatttattgctatttttctagcatggtgcctcggtaaatatctatccaaagtgatggcaaatcagccgatgtggggtgatggattattccgctggattgaaaatcctgtatatcgcttattaggtgtatctccacaacaacaaatgaactggaaacagtattctctagtatttgttgtgagctgtatttttcttgcagtggctattcttgctatttttatgacgcaagcatggctaccattaaacccgaaccatgcaccaaatatgagttgggatttagcactacacactgttatttcatttttaactaataccaatcaacagcactattctggtcaggctcagttatcttatttgtcgcaaatgacaggtattgtgggcttgcaagtcattactccaatgatggggctggctttggttgttgcgacattaagagctttcttttatcagcgtccaagccatattgcggccgatgttgccgagcagccagatcaaattttaattggtaactattgggcagatgtaattcgtcctacagttcgctttttgcttccactctgttttgtctggtcattattgcttaacagccaaggcgtgccatcaactttccaaggtgggccagaagtacagcttattgataaagccaatagcgttgaaactcaaaaaattcctttagggccagttgcgccaatggtggcgattaagcaattaggtagtaacggtggtggttggtacggtccaaatagttctgtgcctttagaaaatccaacaccattttctaatttactagaaatgattgcgatcttacttattccaatcacagtcatttttatggtcgggcattttactcagcgtaaaaaatttgcctactttgtgtttggtagcatgcttttcatgtcgattatttctggtgcagctgctgtctggtctgagagtatgtcatcgacagcatctcagcttgccgtaatggaaggtaaagaacaacgatttggaccagctgcatcagcagtttgggcagctatcactacacaggtgaataacggctcggtcaatatgatgcatgattcttctgcgccgcttaccggtttagtcgaactcattaacatgctgattaatgcgatttggggtggtgtgggctgtggtctgcaacagtttatgatttatctgttactcgcagtatttattgcaggtttaatgacaggtcgtactccagagttgtttggacgcaagattgaagcagcagaaattaagttgctcgcgattattatcttgattcaacctcttgttattcttgcatttaccgcattaagcctcagcgttccaggcatatctggaattagtaatccaggaccacacggtattagccaagtgttctatgaatatgtttctgcgtttgctaataacggttcaggttttgaaggtcttggagacaacactgtatggtggaatgccacttgtagtatcgctctactgttaggacgtttccctacattaattttgccattaatgattgccacacgtttagcagcaaaaagaaaagcacccgaaacatcaggtagtcttcaggttgaaacaccaacctttgccttaacgctgattacgatagttgtgttgcttaccttattacaatttatgccagttcttgtccttgggcctattgccgaacaacttttgttggttaaaggctaa

SEQ ID NO: 44880 - DNA, 579 bp, Acinetobacter baumannii
atgtcccaatcatatattgcacctgtagagttagaaaaagcttatcgtttgttaaatcatggtccaactgtactagtctctgctcagcatggtgatgaccgtaacgtgatggctgccgcatgggcatgtgccttagagtttaaacctgccaaagtgaccgtcgttttagataaaagtactaaaacccgacagctggttgagcaaagtggttatttcacactacaagttccttgctatgcacagctcaatatgaccaagcaacttggtaccattagcaaattagatgactcacaaaaacttgaacactgcggggttgagctgttttatcaaaaagatctgaccagtccgcttgtatcaggttgtatcgcatggctggtatgtaaacttattcctgaaccacataatcagtcagctcatgacctatttattggttctgttgtaggtgcatgggcagatagtcgcgtttttagagatgggcactggcattttcaagatgcaccaaaagaacttcgtagcctgcactatattgctggtggcacattttatttaattggcgaggaagtgaaagccgatctttaa

SEQ ID NO: 44881 - DNA, 2439 bp, Acinetobacter baumannii
atgctaaagaaatgtgttttttcattggtctatctcttgccaattcatttatacgctgctcaggttgatgtattgcgtgagcaagctattcaaaattatagagtaggacaaactcaacaagctgtatctcaactagatcaattgctaaataaatacccgcatgatcaaaagctgcttgctgattatctgtttattatgtcaagtgaaaaaagggatcttacgaatttttcacggtttttggtaaatattaattatgtagactttccagaatatgcaaagttacctttaattcaaaatttccgtgattttaagcattttaaaactgcaattgactggtcaaataagttcaatattcaaaagtcagttgatgggcgtattttattatcggttttgtatgctgaagctcaagatgtagcgaatgctaaagatcagttatcgaagatcgatattaaaggtttaactgctgatcagttggtacgggttgcatatgcttatcgtttaataaatttacccgtagatgctttagctacagttgagcatgcttatcaacaacaaccaaaatcttcatccgttttacaagaatatgtttacgatctaattgctattggctcatataaaaaggcgcagcaattgctgcaagcgagcgaaaaaactgaacaaacagcgcaaatgttggagactttacaagttagtgagttttctcaacatatcaacaatgcaattgctcgatataaatatttaaatcgcgaaggtctatccgatgccgaaagctttgctgaattagataaagtgctggagcaaggacaaaaaatgcatcagcaaatgaatccttccgatcctaattacttacggttttattacgattatttatatggattagattttagagggcattcaaaagtagttatagagaatttcacccagttgaatattccactcgaaaaattaccggcatatgtacgtcatgcaattgctgatagttatttggcggagcaaaaaccgaaaaaggccgagtttgcttataaaacgcttttaaccgaaaagaattatccggatatgaccgtttatacgggactgtattattcttatattgaacaagaaaaatataaggaagctgaacaacttctcgctgaggttgatcggcttattccaacttataaatatagtcaggctaagggggtagataaaatcagccatcctgatcgtgatgattatattgctttacaaggaatgcatttagcctacgctaatcatctggatcaagctgaaaagcattttcaaaaaaaagtagagcaggcgcctgcgaatgagagcctgattaataatcttgcgcgtgtagaacggtggagagaaaaaccgctagaggcaaaaaaaacaatttcccggttaaatggtatagatccgattgctaaagacacccgcattaatgaaatgcaaaatgctcaagctttaggtgatattccgacatggcgaaaaacgactcaaagcttagtgcaatattaccctgatgatagtggggttattaaaagtcgaaaagaattagaagatcgtaatagagccacaatttcacactcaaccacttggggccaaagtaaggccgacggtcgcgatactgtaagtgggcagaatggtttaaaagaccgtgaaatggaaacgcgtcttaatagcccttggattaaggataattatcgtttattcgcttggcatcaagatcgttatggggagtaccgttttggcgatgtgcatgaccaacgttatggggtcggagcagaatggcaggcgaaccgtaaggcattgtcggcaattgtgtcgcaaagtacggatggtggacaagcaggagtccttcttgattggtcccaatggctaaatgaccattggcagtatcaattgcaatataacagtcaggctgacattcctttacaagcccttgatgcaggggaagatggtcaatcttaccgagctgctgttacatggcaaaaagatgaatctcgccagattggtgcgagttacggtttaactgatattagtgatggtaacaaacaacaagaatttttaacattttggcgtgaaaggctattcgacgcacctcatcatattacttatggcactgttcgaggtttctacggtactaacagccaagatcaaacagcttattttagcccaagttcacattacagcgctgagttgaacttaagtcatgattgggtgacttggcgtgaatatgagcgttcatttaaacagcattttgaagcgggtgtaggcctttataaacaggccgattactctgctaaacccacttactctttgcaatatcaacatcaatggcagctatcacggacatggcagctcaattatggaattggttggcaataccatccttacgatggtcatgatgaacaacatacctacggtatttttggatttgaagggcgtttttaa

SEQ ID NO: 44882 - DNA, 1356 bp, Acinetobacter baumannii
atgcaaagtaaaacgttgtttctattaggtctatgtacaattttcagtacaactgtgtccgctcttcctttggattccaaaggggccaaacagcggttaagtcaggcagcaaaacaaaaagtgttccaaggtaaaatagatttagatgccttggttagtaatgattcaaacgatttaattgtcgaatacaatattccttcatcgagcgtaccttccggtttggaacggcgaagttatattgctacaaataaaaagaatcttcagacaaggtttaatcgtgccggcggtgtacaagtacttcgggattacaataacctgcctttggctttttatcggattagtaaccgtgaggctttagtatctttattaaatgatccgaacattaaagcagtttatccaaaccgtattaaccgtactacaactactgaaagtttgtctttgattaatcaaccacaagccaataccaatggttttacgggggagggatctagtgttgctgtgctggatacaggggtaaattatctacattcagatttcggatgtaccgctgtgaatactccatcaagtacttgccgtgtggtttattcttttgatagtgcaccagatgatggcactttggatgatgatgggcatggtagtaacgtttccgctattgtgtcgaaagtcgctactaaaactaaaattattggtattgatgtatttagaaaggtcagatcgcaaggtaagtgggtaagcaccgcttatgatagtgatattctcgcggggattaactgggctgtaaacaatgcacaaacctataatattaaagcggtgaatttgagccttggtgtgccgggagtcaaatatacctctgagtgtagcgatagcagttatggaacagcatttgccaatgcgcgagctgctggcgtggttccggttgtagcctctggtaatgatgccttccctgacggaatttcatctcctgcttgtgtggcaggggcagtaagggtaggcgctgtttatgatagtaatattggtggtgtgtcatggggtaaccccgtgaaatgttctgaccctactacagcagcagataaggtagcctgctttagtaatgggggaaaccttgtgactttattggcgccgggtgcaatgattaccgcaggtggctataccattggcggtacctctcaagcgacaccacatgtggcaggcgcgattgctctattgagagcgaatagtgtgagtccaactgaaagtatcgatcaaaccattagtcggttaaaagctacgggtaaacctattactgactcaagaacgggcttggttttcccacggattgatttactggcggcaaccaatggtttaaccgttaactaa

SEQ ID NO: 44883 - DNA, 450 bp, Acinetobacter baumannii
atgaagaagaatattctattacttgttatttctatcttatcagttagccaaatgggctgttctataaatcctcatcggatcactttacctaacactacaaatgtacctgctatagaaaagattaatgtggtgggaatgtctcgaaatgaatttctaaataaattccatccccctgtagtaagtagactcgttggtgataaaagagtagatacgatcacttcatataaaatcaataataaacccaaagcatatggagtggctttatataatggcttaatagcgaatacaatcgtgtcgtcaatacatagtgtaatgccgagtaaattaccgctcgattccgtggaagaaactgtatcaatcccagactcagtaattggcagagagaaagtagtcattgcaattacatataattcttctgactatattgagaaagtagaaaggatagaatga

SEQ ID NO: 44884 - DNA, 285 bp, Acinetobacter baumannii
atgattgttgttaccttgacctataaaaaaccattgaccgaagttaatgctgtgctcaaagagcatattgcgtttttagatcattactatgagcaaaagaaatttctggcatcggggcgtcgagaaaatagagtaggtggtgtaattttagttctaagctcttcgattcaagaggctgaagagattatgaaaaatgatccgttttatagtcatgatgtggccgattatgattttatgtggtttgagccatcgaaaagtttagaagaaattaaagaatttgtttga

SEQ ID NO: 44885 - DNA, 423 bp, Acinetobacter baumannii
atgcttcaatataacaaaaaaatgattattcacgcacttgcgcttgcacccatcccattgctgagtttatctgtcttaggggtaataatattaaatgctgagttcaacctttattcgattggagttatttttctagcccacttcttattttatttacttttttatggtcttctggttattccttttgcatatatcatttcctattttctcgcccgtaaaaatcgtttaaatctgatgagtattttcatcagcgcaactgcgatttggattttgattggccctattacacgtttgatttttgtcggatcattcccttccccttggtggcatatttataagatctacagtttctatctgatgatcttatttacaggcttttgctattggttaggcttaaagtggctaagccagaaaaacaaatga

SEQ ID NO: 44886 - DNA, 417 bp, Acinetobacter baumannii
atgttgaaattttgctgcaaacttattgttttatccagtcttttctgtagtccgtggctttacgcgcaaacagaaactgatgagcaagatgaatacaaccaatgtgtagaccagaccattaaagaaatgaagcttgaaagtattaacaacatggttgtgcatagctgttctgaacaagctaaaaagacttatgaagaaaaaattgttgctctaattgatcaaattcgtacacaaagcgaagaatacaaacaaccagaacgttaccaagatattttaaaatctcagcgactctggaaagcctatgtagatcaggaatgtaataatgcaggttcatacataggctcgccgatgtattcgtattgcccaatgcaagagtatgccgagcgtgtaaagcaactagaagaatatgttaattaa

SEQ ID NO: 44887 - DNA, 249 bp, Acinetobacter baumannii
atgaatctggctttattcgattttgatggcacgatcacccataatgataccttcagtttattccttaaattttctttgagtaaaaaaactcaaatattaggtggcatccgtcttgcaccttatatagcgggttataagcttgggtgggtaacggataaaacgatccgtactaagctctgccaagtgggatatgtcggctatgatgcagcttctttgatatacaaaggacaagagtttgctaaaaaataa

SEQ ID NO: 44888 - DNA, 2700 bp, Acinetobacter baumannii
atgagcaccatcctgcctttagaaaaaaatattattgtaagtgttcctcatgaatacactactccacaaaaaggagcttattttgagaaattatgtgcccagatccttcgaaagcagtcttatgaaattactggttatgaagttagaagaacaggaatggagattgaccttgaagctattcataaaccatctcaaaaaaccgtatatatagaatgtaagttttttaatgacaaaagctcaattgattcaaaaatagttgatttgtgctttgcacagtcttttagaggagagtttgataaaattgctctattctctacagttaaattaggtaaagatgctcaaggtacatacgataattatttaaagagaggaatagatttttcttattatgatagtgaagaaattctttcagctttagaagtaagtggacaagttccaaatattgatacaattagattcaattcaaatgttacttctgcaactctacttattcatccagaacttgttcctgtatggcttttacaagaaagtgaaaacggttcacctactggattaatcgcatatgtttctccagataatgaagtaagtttagaacgtattagacaaattcttgataatgaaggaaagttagaagaattagatattaagctttttgagcaaaaaattacacttcctcaaactgaattatcaacaccttcgacgacaagggaggttgttagtggcattgttttagcggatgatattatggatcctaaaccatgccgaccaaaggattttatcggaagagatgatatacaaaaagaaatctgggattttttagagtcagttcgtactcaagaaacagattctagaattcttgcattaacaggactttctggtaatggaaaatcttcattagttgctaacctttcagatcgtttcacaaataaaaaatggaaaaacaaactttatctttatccagttgatgtacgctctgcaagaggttcacgttttgtcgctgaagctgtaggcaaagcattcaatactgctgtaagtcatggatttattgaatcggatacttcttttactattgaaaatattgacgaaattacaggtggaaaagcctttcaagaatacgcacaatttcttgaaaagaataataaagttatggtgattttctttgatcaattcgaagaagtttttatgaaagaagagctcttttccttatttcgtgcatttagaagatttgctcttgatatatcggctgaaaaaacaaatgtagtagtaggtttttcttggagaacgggtatctttttagggaatgataatcctgcttatggattatggtatgacttacgtgatcatagaacagaacgaaaattaaaaacatttgatgtaaaagactccaataaaatgatttctagtttcgaaatagaagcagaaattaatttaactaaaccattaaaagctaggttaattcaacaagcccaaggattcccttggtttctaaaaaagctttgtattcatttgtttaagaaaataaaagaaggtatttctcaagaagaacttttaattagtcaaatgcaaataaaaaatctcttcgatgaagatttagagcgaccttcaggcgaagttgaatgcttaaaatttgttgctaagaaatcacctgttgataggtatgaagcaactagagaatttggcgaaaatacggtttcgagattaatttcggatagactgcttattaagacaggagaaaaaatttcggtatattgggatgtttttagagattatctcatcactaatgaaactccagttatttcttgggcttttatgccaaactatagagctaacatgtctttaaagtttgttgaattgattaaagatcaagcagcctctatagatgaattagtggaaaaaactacctatagcagaggaacaattcaaaatattcttattgatttactgtcttttgcgttagtggttaaaactaaagatgacaagtacaaacttaattgcgaaattgatgagattccgttaaaagttcgcaatcaaatgttaggacattttatttaccaagaagctttagcagcatgtaaaaataatgaagagtcaataatactaattgaagatatgtctttaattattaataaagcttatgcctcagatgaggggaaaacagttggtcggtatatcgcaaaaatcttatcttggttaagatttgcaggtttaatgagccaattgcaggataaagttagagtatatgatgcagaaagctattccccagattttggtgaaattacaggtggcagtagaaaaactagtttatttttagctgcaagttcttttgaaaaagcagcaatactactggacaaaatcattttacataaaccaatcgatttagccgagtcaggaattcgtaatgtgattgctgatttagttgcattgggtatttgtagaagagttagcaataatagaatagagttaacaaagccaagtaatccagaagtttctgttgaaaaacaactagcgaacaaagttcttgaagctaatacaataattttattagaaaaactaatttctctttatggtgaggagttgaatgtattagtagaaaaaatgtctgttgaattaggtaaaaactggaaacaaacatcaggccaaagatatattaatgctcttctacgttatagaaatttagctcgtagtaacctacttcattaa

SEQ ID NO: 44889 - DNA, 771 bp, Acinetobacter baumannii
atggctgaatacatcaaaattcttaatgataataaagtgacaataattgacgatagctacagaaactttcaccttatcaataagtttgttagggaagtagcctcttcagatccactacctcctgcagtgctatctgtatctggttatgttaagtgtcatgttttgaatgtatcatctttacaaagaccaattgtggtgtttacaggtgtgtctgtgatgcaagtcagatatgaagaaacctcaacaaacaattggaaaataactgttatttttgacactttagacgatcaaggtggatttaaatataagaatacttatccttttacaaaggcgacatattatgtatttgggttaattactcttttagaaagcggccattcacctaaattattgattaagaatggtaaaggtgagattgtattttctaattctcataacccattgaaagttgttaaggctgagactttttatttaaagggtagtgcaaattactatagctcttggttatcagatatacctaactataatgctaataaaacatatggattagctttagcatgtcctgcacattatgaatattattggggggctggtggtttgagctcttatatgcattcatactgtgctataaaaactaactcttataatgatccaactttctcaggtaagatccttcgaggatatacggtactcgctaatggtatgaatacctctgctagtctttattctccattccatagtcacttaattgttgatattactggttattaa

SEQ ID NO: 44890 - DNA, 399 bp, Acinetobacter baumannii
atggctacattcttattaagggacctcggtggcaacgtggtccttgatctaacatctaatcttagtatgtatacagaaacgttaaatgtagtcctaccaaaaggttcagcaatggacgcaattgtacgtaaacttgatacagctgaaaatcatccaagatggtgggcttatgtagcatctggtgaagttttatcagcaaatagtgcagtggttgagtcttattcgaatggaatgggatgtgctattttgactaaagctatggctagtgaggctattctgggtgattctcttctcaatcaaatggatgatacatccacttatttattaatttatgattgtagagcttattacaacatagcttttcagcaaacaattagtattcatttaggtaaatgctaa

SEQ ID NO: 44891 - DNA, 10503 bp, Acinetobacter baumannii
atgaatggttataaacgtgcaaagattttaagttacaacgcaaaaggtcgtactgcacaagtacacattcatggtttaactgatggcgcgagtgaaggcattacggcaacttttgcctatccagtcggtgatagtgatttagatacagaaatacaaattgtggatggtgaagacgtctatgtcttctttgaaaacggcaatgaagaacgtccagtaatccatagttatgtcagtcacggagacggcgcaattgtaggtgtgcgccgtattcgacaagacaatattgaatttatctctaaagaaaatttaaaagtagattctggcacaactgtatccattaaaacgccgttgatgaatgtgcaagctaatacacaacaaactggtaatagcacattaacgggaaatagcactgtagtaggtaatacttcggttgcaggtaatagttctgttgcaggcagtatggccgttggtacaacgcttactgtagcaggtgtgcctattgaccctaaagctattgagggtgcatttaaagacgctcttgataagttagagagtttaaaagaagacttaaaagaacaaggcgaaaaaattgatgaaaacaaagatcagataagccaagaaattgatgaaaaaattaaagaagtagaagagttaatagataatattaaagattctgatgcctataaactgcttgaagaaggtattaatcacattgatgaagaagtgcaaaaaatacatgaccaagtaaaagaagtaggtcagattgcacaaaataaagttgatgaaattcgggcttatattgatcaagaaattgtcgataccaaactgattgttgaacagcatgcaaatgatgcaaataatcgcttagatgaagccaatcaacgtattgatcaatcaattcaggcaaatgaagcgttggtagctgatgctcaacaacgggctatccgcgctgagaaagaactcgatgacaaaattggtttcatcaaaagagaaacggattctattattgctgatgttagaagtgattctgatgaaattcgcttggtcgcagaaaatgcgaaaaaaattgcagatcaagaagttctagaccgtaaaaaacaagcagctgacactctaattgttattgatcaaactaaggccgctttaaaacaagatattgatcaaaacttagttaaagctggtcaaatgattgatgatgctaaattagcattgggtgaagaaactaatactctcattaatcaaaaaattgaaccaatagtaagccaaactgaagctgcagttaagaaagtagatcaagtagctgcacaatatgttgaacttgataagaaagtagattctggctttctggctgaagctgaagcacgtgcaaatgataaagaggctttaactcaaagttttgagcttaagtttgctgaaatgcaaaacgaattgggtaaatcaaacgccttaatttcagaagaatcaaaaactcgtgcagctcaagacaaagcaattactgaacaaattagtattgctcaatctcaaattggagataacaaagctgccattaatagtgttgaacgaactgtagttgaccttaccaaatctgttgctgaaaaaactgatcaaatacaagccagtttagacaccacaaatgcaagtttattaagtgcgaatgagttagcgcggatgcaatcacttggtaaacctttacgtgatgatccgacgtttctatcggggaatgggggattaagtgcctatgcggtaccagcaggctcaacactaactcgacaagccaaatcaacggataaccccgtaaatagtacccatgagatgcttttaagatctacagcatctttaggtggtggttggtatccaactgttcctacacttgtagctgcgcctaataaaacttttttaataaaacaaattattaaaatgccaaaaggaacttatttattaccagttggcaatgctacaggtacgggggggtatttacgagtacttggaaataaagaaggtacaggcaagtttgaggtttattactctgttgttcagtgtggctatgatgcaccagcagctatccatgggcatttccgtgttattgctggcactaatccacctttgccaagcgctacaagcccagttgatgtaatccttgctgattatgaggtctgggacattacagcactaaatgacaccattcctaaagcatggcgtgatcaaattactggtaatgcctcatatatcgaaaaggttgaatcatctgtaaaacttgttgatgagaaacttgtttcagaagcaaaaaaacttgaagaactaaagactgactataattcaaataagactaaaacaacgtcagatttagcgacaattactcagtcagtttctgatggagataaagccttatcattacgtatcgaccaaacaaaagctgctctcgaagaagcagatcgtcagtctaattcaaatattctagaagttactgagtcactagctgaatttgaacagtctaccacgacgaaatttacagaacttgatacaagtatctcgaaagaaaatttgaaggtacaaggtcagattgtagatgtccaaaaaagtgtatctaccttagaaagtaatacaaacactaaaatatctggcctttcttcttcacttaaaactactgatgatattgctaaactagctttcgataatgcagccgaagcgcagcaaactggtacaacagcggtaaaagcaactgaagcactttctcaaaacttattaagtctcaagtctcaaactcaagtaactactggtgtgagggcagtagtaacagcaaaaggaattgatgactggtcaacttggcgagctacaggtgaagctaaagtacttcaagattctgatgcatttggcggttatattcttgagcttggtaataatgctggcaatgatgaagcttgggttcattggaaagaattagtaaaaattaatccagatacgctttatcgggtgcgtgcacgtttccgtcgtgttgctggtgaaaatggaagtatttatttaggtgttgcatgtaaaacagcagatcaaactaagtatgtaacaactacaaataatcttgctgcagatatgggctcatcaaattacttgttgtctgcaattaaaccaaatttaggtgaatggcaagaagttgtactttatctgaaaggaaaatctacaggtgcagctacgggacttggaacaattgataatccgcgtactttcccagcacaagctgaattttatgccccaatgtttattggtaactatgcagctcaaccaggtataagtcagcttaactacattatcgttgaagataacaactctttagcttcagcaaatgatgcaacagcaaccgcaaatgatttattcaaaactgctactaatagaactgaggctgaagcagaacggacaagtaagcttgaatcaagaatgcagaatgctgaaacaggtattcagagcaacgctcaagcattattgaaaacagctacaaagagtgatcttgatagcgccatgggacgtgtggctactgatatcacagctgcagtagataatattaaaattggtggggttaatgcggtagctaattcagaagcgccaagaagctcaacagcatcaactagtcgtgaatacttaatgtatgaacgaagtaaagagctcaaagctttttatgacgaaaatttagataagccggttactatttcttttgacgtgagtgtgcccgttgctggaacagtacaagtttactcttcaaatggatctgctcattactttacaacatcagttactgtaacaaaagcaaatgagtttcaaagatttgctgttacagtatcccctaaagtacacactggaagtactatcgaatcaacaattgagttttatggaacatatggttctggtcgaattccaacgattcaaaaattacagatcgaagcaggcaataaggctactgcttggagcccaagcccacgtgatactcaaagctctttaaatgctaatgcggaagcaattaaaatcactcaggcggaagtgaagaagaatggtgatactttatcttctcaaagtatagatatttctaagcttagaaatgatctaactttgactaacactgaagtagggaaaaaagcctcaagtgaagcacttgaaacaacaaattcaaaagtaactgaacaagctggacatattaaggctgttactgaacaggctaatactttatctgcaaatcttaacaagtcggccccagctggtacgaacctgttgattaactctaacgtagctggaggctacgatggcgtttcatatcctcatttacgttataaacttggtgaagactgggaagtaggagcaaagtacactcttctttggtgtgctgagcatacacgtggtgctggtgacacaaactcaaatctagctgtatatgctggaggaggaagtcagtttttacagcaggttattaacacatcaggtaaagtgatcagcaaaattacctttacgaagacttcagctgggacagcaaaagaagtccacttctacatgctaaataaaccaactgcagataagaacagtgtaggtacggtttattgggctgttttagttaaaggggaattcataactacagataattggattacaagtccttacgacttcaatgctgcattcgatcaagtttctgcgaatctaaatgagtttaagcaaacatatgttacggaaagggatgcattagcacagcgcacatctaagcttgaagttggtatgacagatgtagagaagaatatctttaacactgctcaagctctaaataactacgctacaaatgcaaaattagatgaagttacagcttcacaaacaaagacgtttaatacatcactgactaaattggatgaagcactgaaatcggcaaatgacagtgattcattggcaggcgattataactgtaagaatcctgacatgtggtatagccattacggttatgacatgtctcagtattttaaaactacgacaactgggaaaattggtaatacagttttcagaaaggatacttcaaatccagttaactgttttaattacaataaacaatcactaccaaatacacgaacatatattgtgagttttgttgttcgtcgtagctccgattcaaacggtctttgttacattccaattggtcgtgcaaaaaatgatggggtattttcaacagcaaattatactagtgtaagtgttccaattgctgaaatcccagcaaatgaaacttggactcttatttcaaaagtcatcaacatgacttcagttgctgatacatatccccaaattcagttaggtattgctttaggtcatactggaaatgcagggtggtgggaagcgcaagcatatagaattacaccagttctaaatgaatcagatgtagacagcactattgttaagtcttctattcttgttgattattcaagtaagtctgatacaaccaaagcaatttcagcagctactgaatcactagaagccaaattccgtcagaaatttggtgatttatggactagcagttcagccactcttgatagtactcgttacacaaaaactgaaacgaaccaagcgattgcagaggaaagtaaaatcatcaaagccgctatttctactagcgggggcgataatattattaaaaatggtgatttttctaagcctcttgaaacttcaaattggcgtcaaaattcagcagtagcaggtagcttattagaagtttataaggactcaaatgggattacttgggggcattttaaatcaaccaatacagctacatattttaaaggttttattgagacgattactttagctgaaggtctagaagggaaccagaaatacacgttgtcattcaaggcaaaatcattgacagctgcacaatcacaaatactcctaatcattcatcgtcgtgatgctgcaggtagtaacaatcaaattggaacctcttggaataatatttctacagataaagaagttttatgtacttatacatttgatactaatcttgttgatttacaatatattaatgtaattttatatgctcaaattggatttgcacctgattttttaattcgtgaagtacaaattgaaaaaggtgagttagcaactggttttagaaaaaatcctcgtgaacttgaaaaaggattagaggctaatgcgactgcaattgaaggtaccaaggcagatgttaaaaagaatggtgaacaaattgcatccatttctgaaaattatgtaactttaaaatctgcggtcgataataataaattatctgctgacggtaagtttcaagaaattaactcaacaattagcgacaaccagcaaaatacaacacagtcaatttcgaacttagagtcaaattataaacaacttaatcaagatcttggtcaagttttcaattatcgtgtctactcatgtggttggaatggctttttcacagggataaaaaaccttaaaggtgaaatcaaatccgtagcttcagctcgcggattctcagttcatgttttagctgctgatgggtcaattgcttcttcaactcgatacgatacatatgctgctatcgcgaatgcaacggcgatgagtaatgctatcgccgcgattccgaatgacacatttgttattgtgaccaactacgacagtatcggagtaaatattgctacttttaaaaatgccttaatctctcttggggcaaacccatttacaattgatcaaattactggccgtgatgcatacatattagtaggtcaaaaaggaattggctcggggagaggtatcgaattacattcaacacctgatacgggcccaaatggagccaaacaaatcatgcttgcagttcaggtcgtaagtggtattccgattggtttggcaaataacagtggtaacttacaaaaggtgttagaaaaccacgctcaaatacttcaagaaaaaattactcgatctgatgctaaagaagtctttgcagaagaaattaaagtcttcaaagcacaattagataccttacgttattcagaagaaaactggattttactaggtgatgatactaaaaatttaagtatcaccactggtaccaatagaacagttgctgtttgggaacttcaatacaaacataaagaaattcccatagataaaggtgatccagttgttgcaagaatcaaatataccgctgcagctggtttggttggagcgacttgtagcattcaattccatggagcaacttatagcattggattaccttcatttatagttgctgctagtggtgaaattgaattgactggtattttcccttctgatgtaaaagcaactgcatttgaagcaattccattagggctgcgctttgataatgcaccgtcaggtggaacttttacgataactaatatgtttatcagccgtggtaattctgcaccgaattttaaaggcggttttagatcctctcttaagcaaaatgcacagtttgtagaagatacctttatcaaagcagatgcaaacaaaggtgttattgcccagcaaattcaacaatatgatgctggtgtacctggtggattatctacagtagtgaaaacaacaaaagctacagctgatcaaacttcacaagatcttgcaactcttaaaaatactgaaatttcgcagttacaaacaagtactaacaatcttggctcggcattagaaaacacaacaatgctggcaatgatgatcactaacggcaagttggtgcaaggagacgtgaactttaagaagggtaataatgcagtaggtgtatataacaatgctggcaatgggaatgttgctgttacacgtgttgcaaaaagtgcggataacccgactacatcaacacatgagctggaaatcaaaaccattggagctgctaatcctacatggggtggtttttatcaggccgtgaatggccgagcaaatgcggtcttcgttattaaatacctcattaaattgccgattggatataagctagtgaatgctggtaacgctatgggtactggtgcaattgatagatttattggaagtactgagggtacaggaaaattcgaaacttatattcggatgattaaatgcggtgccacaggttcaattacttactcaggacatgtttatgtagctggcggatctacaccaactgtaactgcacctttagtgtggaccttagctcaaattgagcaatatgacgttactgattacgcttcagctgacccgacattacaagatcttgtttctacagctacagactctatttcaacattaaccaatttcaaagaaacatgggcggccaaactttcggagatgtcttcaaagttagacagtaaaaacggcgcttatattctgaatgcggatatgacaaatactaatgttgagcgcgctattgctgcatcatcacagaaaattacctcagaatatactaatgcaatgagcgttcagccactgggttcaggtggaggcaaaattttcgtgaagcctttgacttggcgtcaaccaatcacgactacgggaactcttgtaattaagacaccaattacaattggtgccttcatgactaaagttaaaatctcaggttataactacaacaacaaagaagacaatatttttgatttggacttggcgttctatgcatatacgtcaacagtaccattttatccaaatatgacttcgcgttcttttggtatcaccttagatgaaagtaatactacgactaaaggtttggctttagctttagatagcaataataaagtgtgcatcttaattaccaaaaaagatgcttggtcttatccagccattactgttgagtccgccactattactcatagtaacccaccagattattttaaagatggttggacagcggctattgaaacggatttatcggtttataagtcggtaacgccgtttactgtcacttcaatgatggaaaccactgcaggttctcaagccaaagttgatattccaatggctcagttaagtgatattgcagctgataataaacttacacccgttgagaaaaaacaggcgaagttggtgtgggatactctttatcaaactgatactagcttacgagctgaggctgtcacttatggtatatcttcagctgcttatgcaacggcttttagtactttaaatacatatttggcttctttgtttgccaatatgaatacaaccagtacgattgatcgaaatcagtttattactaactttgcgaatgttcacaatgcacgtcaagcattggtaagagcaatatctgaaaaggcaaaagagatagccgattctgcaaaagacttagcatcaactacaaaagcgacattagagcgtgattacatgacgtctaccaagacgaatgaagcaattgcatcttcaactgaaagaatgtctgcactgtattctgcgaatggtcaaaagatcatggcttcagtactagatacctggcaaaaagattggttagtaaaaactccaagtggaaataaacctgagcttaatttagtggccgatgcaacttgccgtgggggatatgcactaagaataggtaataacgttggaaatgatgaagcttggttaaattggtttgcttctttgccaatcgatgacaacaaatactatcgagtgaagtatagattccgccgtgttagtggtacgggggttgtatacgtaggtgcaacttgtcagaacgccactaaaactaaatatgtggctcaagacaacaccgaaattaatgatattggatcgagtcattatcttgttgctggtaccgcaccagcgctgggaacttggataactggaactgcatatttcaaaggtagatctgctggtgcaagtgcaggtgccggcactctactaagtccaaaaacatttgcaaataaagctgctttctttactccaatgatcatcggtaactattcaggaaaagctggtgaggtggatctagactttattgatattgaagatgcagacaatattgcagattttgaaaacttcaaaaccacctatacaactgatgtgggtgcatatgctggcgcattacaaaccttagtttctgtttacggccaaaatgctatcaagcttaaatcacaagctgacttaattgatggtgtgaaaggtaaatacgtaatgggcatggataataacggtgtgttttctggcatgtctatggtcagtgagcaaacgaatggaaccgttatcagttcaataggttttcaagcggataaaattttcttcacaactggtacatcttctactaagtacatgccgttcataatccaagacaatcaagtcattatgaatagtgatgtatttattaagaatttaaccgctgcaaactttaaagttaagtctcttacagcggaattatttaatgtagacaaattaagcgccataacgggtgaactcgggactttaattacttacaaagattcaagtcaacctcaaaaggcaagaatggtcatttcaggtaccgctttccagatatttgacgataacaatgttgagagaatttatattggattataa

SEQ ID NO: 44892 - DNA, 894 bp, Acinetobacter baumannii
atgcaaatcaccatagtgtctgctggaaaaattattccagcttctgagcttattagtgcaactttaagaactgatctcatacctattccagcatcgattgagtttacagttcaatcaaccactgaattagacgcccttttaaaagaaggggagcaacttacagtaaatgatatatctcatcctttcgaacttatcaaagtcacccctctaaaaactcagactattaaacaagatcgccgtgtaggtggtatctcttgtattggcattttggctggctgtaaaagacttatcgaaaattcaaagcaagctgttattagtaatgaaacctcctttaattcagtgataagagcttgtggagcaactatcagtctaggtggtgatttacctttgccaaaattcgtatgcctaaagggaagcttgcctacacaacgtttggctcattatctgcagcaagaagcggcagtcatttgttttcaaaacaataaggtgtcagctcaaaaaattgattcttttttcaaaaaggaaccagtcacaaaactagatcctagcagtgtcgtttggatatccagtaaacctttggaactgatgcaaaaatcatctttcgtgaccgtggagaataacggttcaacggttgttggtgatgactcaataaccccaggccacactgttacgcaaagagctggtttagatgcccgacaagttaaaaacttagaaaaagttttgatcttgcggggaaccataatcaggccgctaaatgtgaattggaatgcgggcgatatattcgaaattgatagtaagaagtatgtcgttttaacagctgcacatcatatagatacaggcgcaatcgggggatcaatggggacttcatcaaagttctggattgctaatttgtag

SEQ ID NO: 44893 - DNA, 444 bp, Acinetobacter baumannii
atggctatgaagttattacctgaatcagaagggtatgctctagttgctggttctatccagcaactttcggaagaactctataaagaatatcaattaactggttactcaattttgcttgaggatatcgttaaggcatttattgaagagacaaaatcttatgcgggttgggcgacattagattgtcaaactaaggcaattaccagtattgaactgaatgaatccatagaacttaatggggatgagtatgtaatcattttgcctttagtaaaagcgcattgtgatcttttgcaagctcgattagttgaagctacccgtgggctaggtgtcgaaagttacgggctttcagtctcagaagctcagcaaaactataatgagaagaaagaagctttaccaaaacttgcatttttaatggtcccgatgagttttaacatggggaacagttaa

SEQ ID NO: 44894 - DNA, 1020 bp, Acinetobacter baumannii
atgtcagcattcaagccagatgatttacgccgtgctcagctgcaattaaaccaatctttgcaaaatggtggagttcgtagagatcaacagagtcgccagcgtgcagatagagaacatcgggcatttgccgaaaaagaaattgaatatgatgattggggaagaaagatccctaagcctatgttcttgcggccacaagatattgcactaggcgaaaaatatgatgtagagagagtgctttttacaaccttaggtcagcgaaatggggaagtgccacggcgtattacccgtgatgatattttggcatttcaagaaaacattcagttattaaaagatcagtatagtaagggcattacccctcaaaacatcattaatttaagccgacaagacgatattgaccgtgcaaatgagcaaatatatttggcggtaccagtccaacttgggtcccccttattagcgtgtcaaggaatgtttgtacctcgtggcatggaagaccttcgctttttatttaaaagttgcccacggccgattgtgagtaatgaagatccagcagaagttcaatatgcgggtggttttactggaattgttgctggtccaccgaaaacccattacacaggcaaccttcaaatcctagtaactgaagctgggcatgatcaactattagctgaatatgtcgtagctagtggtggaatcatccatggtgattactacgatggccgattaggaagttttacccgctcatatgcacttgaaaactgtgctattcgttttgaatcagctgaatacgattctgatagccgatcacaagtaatgacagtttcttgtccaattgattacaactactttggtagtttcgcaaacattggtaccaacggtagtattcagccaggtaaaaaagaaattgatggtacagctgagcttgttaatcgagttcagcaagtgatcaatactgctcaacaagcaactaatcttgcaaatgctgtgcaaggcgttggtcgtcaactgggcaatctatttgggtaa

SEQ ID NO: 44895 - DNA, 279 bp, Acinetobacter baumannii
atgagaaatgactatcgaaatgctatcagagatttaattcaccgaaatcttcaacagaataatattcagaacttgattgtatgggagattaaagaggatgaatcgcaagatccatcactcttaagctacaagctttatggttcaagaaatcatattgatgcggttttagtagcctgtagtgccaacggtatttgggaaaaactaccactacaaaaggtagcatttccaaggctcgttgatcttttaagacttcaaaaagaatacttgcaggataattaa

SEQ ID NO: 44896 - DNA, 1539 bp, Acinetobacter baumannii
atggctattaacttctttttaactgacgcaggtcggaatgcattaaataaagtgggtgatgtcgctggttttggtggggaactgacacatcttgctataggtagtagtaaatttgatgcatcagttgaagcaaagaacttaacttcacttaaaaatgaattagccagattttctcttaacggtggtggtgtagatactgaaacagccactttgcgttttgtgatgagtattgagccaactttgacaatggaagtgtttgagatgggtatatacctatcagatggcactttacttgcggtggcctcgactacagctgctcaatcaatcatgtctttacatgcaaacgtagtagccattgtaacatttggatttgttttaactgacgttaatttaaaaaacgtaactatcaagattgatccaaacacaccaattgctgtgatgttgatgaatcagcatagtgcagatgaagacccacacccacaatacggtgcgttaatccgtaagctcatgactgaacacaatcagcatgaggatcctcacccacaatatgcatttgagaaggacgtaaaagccaaagacgatgatttacaacatcagattgatgatctagatcttagttccaaaaacttattacagcagctaatcgattttaagaaaaacttagatgctcaatatccaaaattgattggagcaggtgtaaatattggtagcaatgcaacaattgaattaggtggcaaagttactgatttacgtgattcaaagtatgcaatctatttaacaccagaaagcacacatgaagcatggaagcttacccgtgctgaaaagggtttttcatatgaagtttgggaccgctcaggtcaaaaccggattgggtattcaggtactgtgaattggtccgttgttcaagtagctgcagaaacactaaacgatggaaacggcgattacacagtaccaggtgtttatatcattccaattcaaccaaaagaacaaaaagaattcatattggttggtgctggtggtgctggtggtggcagtgtctgggagttaggagcattggcacatgggaccagtggtacagatacacgcttacgtttaaatgaacttgatttggcggttgttggtggcggtaagggcggtaccagtggtcagtggtcgaatggtagtgctttctcaaatggtgctggtggtttagcaggtgtaatcactgtgacatcaaacataaccgaaatttcacgcaagcttggtaacgctggtacagctgcaaaccaaacaaaccacaaaggcggcgcatcagtaagtccagtatcaaactggggtgcaggtggtgatggtgctaatggtgtaggagatgatggctgggcacttggtggtggtggtgcaagtggtggtttactcatttgccgatatgtgaattcaaccgaaaaaactcagtatatgactttagttgttggcgaagctggtcacactactgaaagtaatggcaacagcggtaaagccggtattggtggctttgctcgtgtaagtactgttaaagcttaa

SEQ ID NO: 44897 - DNA, 1992 bp, Acinetobacter baumannii
atggctttggcaccattaaaagaaattcccgaatggtgggaactttgtgaacgttatcgatacgacatctatgctttcgccgtagaagcattaggtgtcgaacctacatggcaacaagaattactttttgaatctattgcatttgatggtagtcgtacatccgtagcttcaggtcacggttgttttggtaaagggacattaatcaaattagccaatggggactttatcccagttgagcggattaatctaaatcacaagatcctagctgcagatggtaaaacagaactagaggtaattaaaacagtaaccggttatcaggaaatgtaccggtttgaatatgagaatggtaaagctcataccttcaataaatcccacatactttgcttaatttctttatacgatggtaacggctggtcgaagggcgacaagattgaattacttgtttctcaatacctgaacttaaagccagaaaatagagaacagtttgcatcttataggcttatagatggtgaacataagcctttaaaaattaaatcggttgccgagcttggtgaaggcaaatattacggttttgtactcgatccagatccatttttcttaggtgaagatgacttagtactacataacactggtaaaacagccagtgccggtattgttgccttatggcatctcttgttttttgatgaatcaatcatgatgtttactgctccgcagattgggcagttaaagaaacaagtctggaaagaaatcagtatcaatctagcacgattgaagcaaggccctttggcttggcttgctgattatgttgggtaccagtctgaactcgtttacatcaaaggctacaaagaaaaatggtatgtctttgctaagacagcaccaaaacatcaacccacgaacttagctggtaaccacggcgacaactatatggtctgggtcgatgaggccagcggtgtagatgatgctgtacttgatgtagcatttggtgcattaactcacgaagataaccgtgctgtaatgacgtcgcaacctacccgtaatgcgggtatgttctatgagactcatcacaagttaagtcatcgagctggtggtgtttggattgctctaacatttaacggggaagagtcaccacttgttagtaagcaatctttagaagaacaacggcaaaagtatggaagccgagaagatgctcagtacaagatccgtgttctaggtgaattcccagacttatctgatgagttcttaattactaaacgtcaaacagaagaaatgtatgttggcgcgagtatttttgaggatcatcaatttggttatgtcattacggtagacgttggtggtggtgttggccgagacgattctgtaattgttgtttctaaagtttggggtgaaacccaatggggagaacgtgcacgccgtgtagaggttgtagatatacctttgtgcaaaaacagagatgatatcttagaactatttgcaaagattaatgagctacttttacagtatccaaatgctaacttggtagtagatgacaacggtgcaggtaaaggtttaggtcagtatcttaaaaagcaaggtattttctacgttcctgtttattggggctcacaatgttttagtaatgacaatagaaaagagtttacgaataaacggtcgttagcttatgtgggcttagctcgagcaatcgctagtggtcgttttaaaatgaaaacgaagaaacacaacgtgaaaattaaagaccaattaattcacgttccataccgttttgatgactttgcacgttacaaaatcttgagtaaagatgaaatgaaacgaatgggaattaagtcgccagacttgggtgatgcttttgctttcttattcttggaaaacgttcactacactgaagcttacgaaactgtaaatgtcactgacgatacaccggaaggccgtgaacaagctgaacgtaagtcaagattcagtgctttaagagaagcagctgaaaaagaaaatgattag

SEQ ID NO: 44898 - DNA, 513 bp, Acinetobacter baumannii
atgtctggaattattcgtatagacagccgtgttgctgggttttctgatcaaccaattcgtctcattggagccgcatttgcagatacgggtgagcttgttattcaaaaaacagccgtttattcaaatttacctgtaccaagtgatttaagagatcaaacggttgttgttactgactcacctgaccaagtacagaactggcaattaagtttcaatgctaaagagcatttagaagaagtgatttcaatttaccaagctcgttacagagcaaagttaattgaaattgagccgaagttaaaccagtacaatcctaagaacgtacttgaaatccgtaaggtcgataaaaacggccttcagcaggaatttgatagcagcagcttaaacaacggccacattgcaatcctgttagcagtttgggctagtacaaaaattgctaaaggcttttcgattactgaagggaatcagtttgaagaagatgctgtagatccaacaatgcttcctttttcaatcttttaa

SEQ ID NO: 44899 - DNA, 201 bp, Acinetobacter baumannii
atgactgacttaatcgataaggcacaagaaagtgctgattatttattgcagcaagaaattgcaaatcgatgccgttttgacggcgaatctgaaaaagaatgtgttgaatgtggtgaagaaataccagagcgccgccgtgctttaggtggcgtgaaattctgcattgaatgccaaaccaagatagaacgcaaacggcgctaa

SEQ ID NO: 44900 - DNA, 804 bp, Acinetobacter baumannii
atgaattatcccaacgattcgcttaaatgcatccaaaacgcttggtataagcagcttgtcaattttcgtgcttcgtatatgccagagacacaattaacggctgactggaaattgagagctattggcaatgctataaaagcatgtccctcacggatgatggacgattcagaagcaatgctatctgaatacagaaaaagccaaaagcatgatgaagtgtcgaaagtacttttacccgtaatgctcactgcaacagcgttaacagatcaacctcctgatgttaatcaattactgccagtaccagattttgttgaaacggtcattgatgagaagcgggtaaaagtacgtcttgtacctacaactgtaagagctcaaatcgctttctttgccaccaatcccaacgatctacgttcagtcattgggcaattttgcgcgtacatgtctagcaatgataaccgtcgttttaatgtgccatttcagcaatggaatgatcatgtagttaattcaacattcactgtttttgaaaatgaactttttccatcaccagtcccaagcgaagcaatcaatctttctatctcaactgtagatattcagctcgtgggttatacacctaacgtcattggtttcggtggtccattcgaccaaaacacaggtaatggctatgaacctgacggctcagcaacggaacagcccgcaatcaacgacaaagttgtagtgcaagctgatcagtacacatcactcgagcaccagcgtgtgaagggtgatagagaaacaggtgaaattacagttgagcgtatagatgactga

SEQ ID NO: 44901 - DNA, 906 bp, Acinetobacter baumannii
atggctagcaaaaatagaaagacaaaagttctatcttacaacttacatgaccgatgccgtaaatatactggtgttgatcgaagtaatgtcgatgttgatgcaatggtcaacttgatcaacagtgaccatgtacaagaaatggttgctactaattcattacaaggtttttacggtcatcaaattcgacagcgctatggtatggtgccgcctgaaacggtgatcattaaaggtaaagttgtatatctttcacgggcgtttaaaacaattgaattacgtgcttcaaagaatggaacagttgaacaccgagaagagttttatgataacgagcctggtgagattgcattacaagattataaagcccaagcgggtggttttagcacatcagtcaattacaagaacgtcggtggccgtttaattccaacgggtttttttggttttgatttcgttgcacaaccaaattatgcaagcaatgtaggtgatggtcagttatttgatggattatttgttcctgaagagccagaaggtgttgtttcttgctttgatagcgcaacagatatttcacagttatcacagcccgaaattattattgcccaattacttgaagatcaaattttacagacatacgacaatatcaatagtcagctgcatttattaaccgagttaggaaatgctcaaggattagtcggtgaattatcagaagtagttgataagcaaaaacgtgtacaacaacttagagaagaacgaaaaaaagaactctatacgggtatggtcaatcctgtgaagagttttgattcagtacaacaacaagctgaacaaatcattcaaagtttggacaatccaaacgtaaaagagaaagttaaaaagccgaaaaagtcttttggcaatatctttagtgtatgggggtaa

SEQ ID NO: 44902 - DNA, 228 bp, Acinetobacter baumannii
atgcgattaaaaatcttttgtagaaaacgtgcttgttctcaattaattgacttatctcaaatggattgtttgcaagtctccgaaagtgaacatcgaggaggcatgatccatgagcgcttttatgatgtttttatttctcttaaaagtgggtacatctttgatgcaaccattgaagataaacagcatgacaagctattggaattaattgagtttgatcaaaagatttga

SEQ ID NO: 44903 - DNA, 459 bp, Acinetobacter baumannii
atgcaacaagctcaagacaatgttttagtaggaatcgcagaacctatcaatggtcagggagaaaacttattaattgatcatttcttaggatatgcaagccatgaattagaaccacaagaaattgataaagttattaaaggggaagtggttgaaggcatcacggaatatgctcagggccattactataagatttcagcaaatcctgaaaaccaaaatgcaaaagattttgaaatcagtattcattttcaggatggcccaattccagaacatggggtgaatggggttactagtgaagcattgttaaaagtacttattcaccgtactaaaaccttggatgaaaaatttccgagtgagttcaacaaacaagccattagttatatggaaagtgcgctagaagaatttaataaacgtacagctgagcgccgtgctcgtggtgttgaaggcactcttgttaagtaa

SEQ ID NO: 44904 - DNA, 615 bp, Acinetobacter baumannii
atggaccctataagctttactcggcctatcgatgaacactatgtgagtacgggcttgcaaaccgcacttgctaaagcatttaaacaagtatttgcacaaaactttgagcagtccattcaagatttattggattacggttgtcctcatatcggtagtaaaacagttgtagaacggttctctaaacaaaacggacttgttgtattacgccgaaataacacctctgacacgttaatgcgaattatctatgccaattggagcagcatgggtaataaaagaggattagcgtttttagagtttgttttacgaatgttgtgggggaaagatcattttcagattatccggctatggcatagcttggaaaagctaaaagaatatccagcctatttgtctgattatgaaaagccaaattacttcttaacaagtcggattagaattgttttagataaaactgttgatgcaaatgaagtggtagagctgtcaccgatattacggcgtttagtaccagccaatattgtcgttaaagttcactcaatggcatttgatagagatttaggcacaacaagctttgcagcggcaatagcagctaagccatatgcagtctataacttcctttaa

SEQ ID NO: 44905 - DNA, 1446 bp, Acinetobacter baumannii
atgacattaacgcaagctgattttgaagcccagctccaagcagcgatagatgattatgagattcaggaacgctataaagctcaagatccacttgtcgttcaccagctgcgttctatggctagttttttgactgcatttggtccagaaatcgatattgcttcaattgaaccatttaccaaaacacgtgaccgctcaattattgcggatgctacaaataaaggtattttgcctataggtacgccgtgtcagcacttaattgaaatcattaaccggtcaacaaatgctgtgagcttaagtcaagggcgaatgattgaggaccatagcggcggtagagtgtggcggttgcttcaatcaattactgttaaagctggtgagacggcggaagtaatagccgaacaaagtgaataccgtgaaattaaatatgttgtaccagttactgaagggttccataaatatcgaatagaccttttagaggacctttcacttgcaaatatttcggttaagcagggcaataataactatgtaattaagccgcgctggatgaatgttgaaccaggtgaatatgctgtaactgttattacagataatctaagaagattgtttattgagtttggcgattctgagagagctggtcgtactctgcaagccaatgaaacggtaataattggaattcttgagacatacggggaagttgatgttaatcgtttaaaagatgctgctttacttgatgtactttctaatgatgaacaacgcatatcagtacgttttaaagctggtggagtgattagagagggcgtagatccgttagctatatctgaattacgtttattatcaagctatccatcgctttacgatgaagatgctgtatttctgggcaactttgactatgcggtccgtaaaaaattcatgaaacgggcacagtttatttctgtttggaatgaaactttgcaagagcaacactttgccattacataccgcgacattaatcatttaaaccttgtggtggttgccaagaacccagctgaacaagcaacgttagaacaagatatctgtcggtatattggttattgcgataacttgtatgaaggtaaagtgaatgtacatgaagttgtagaaaagccaattgaagtaaaaattaaaggctctttggcttctgtacataacacagatatggttaagacacagatcaaagaattacttgtagaacgatacgggcgtgaatcattgagctcaagtcgttggctggttaatggctttaatacgcaagaaatggggaagctgattaatgacaatattgtggctttccaagaccggatgagtgactttaccattatgctttcaaatgagttaaataagcctaatgagtgggtgtatgtgacaaaagacagcattactgttgagttggaacgcaccgctgatatttcgggggctacatggaccctataa

SEQ ID NO: 44906 - DNA, 339 bp, Acinetobacter baumannii
atgatcacatctaaaacaattttagacatggttgagtactggcttaatcatccggtcaatgggaagtatggttctgactttggtgcacctctttatgatttgctaatggcacctttagactctagggtggcagatagttttcttattaagatgaaaaaggatctaccaatattatctgagcttaactctgaccaattagcactgtattcacaaaccgaaggatttgagacggttcatattcatttaagcatcatgaatgtgaatatagatcttaaccaagtagcagaccgattgggtaaatcagtaacaggtgagacatatgacattaacgcaagctga

SEQ ID NO: 44907 - DNA, 591 bp, Acinetobacter baumannii
atgcatggctgcttacagcttttgaagtgcattaaaaaaagcccggtagttagagatgggttgcgacatcttctaacctacacttatgaccctatacgttctcgtgtcataagtggagcgggctttgtatatataataatccatgcttttcctattttcaaatatggaaccattcacgcttacatatatacaaaagcaatacccttaatacagttcttattaagggtgttttttatgcaaattcaaatcggtattgatattgtcttaattcttgcatttttagcttatctttccgttgttacaggatggaatagcaagaataaagctgcgtatattaaacaattccgtcatgtgcctataagcctcttatttaaagaaatcaaatatatgtatttcataagtatggcatgtgtattgatcactattattcttgttgattggcgaatctataacgttgcttcatattttgatgcattaagcgtttcattatggatattcataatctatttcaccattttttcaacttatcagattggcaccgcaatactagtaaagcttttgatgattttcagtaatagagcaacttcttaa

SEQ ID NO: 44908 - DNA, 942 bp, Acinetobacter baumannii
atgggcagtcttaatcttgcagctataacagctactactccatacattaaaaagatccaatcggctttagaaaaagcaacaggccaaacgattgttacaccagaatttcgcaaaattaagcgcgttgctggtgttagcgttttaccagttgcatttttcttttcaggtggcgctacgcttacactttatattcgtgcattagcggatgtagtgaaggccgaactgaatgataaagtaattgttctatctggcgattttagtgatgactataagccaacatttgaaaacgccgtaagttgtgttgctaaacttatccgtgaagcacaatctaaaatccaagaacaaaataagcgtgaaaaagttagcttaccgctgcgccgtacttctgtagatcagaaaattaaagaagtcgaagtacaagagcaaaagcttgatgaggatttagctaagcaaatagctcaccgtgaccagcttaaggaacaaattgaacaagcaaagcagcaacttggtataagttcggaggcaggtcaatccgaactgggaaagcctgaatttgatagtgcgagtccaatcaaatcagttacagcaaatatcacacgtggtaaagctgcaatgaacaaagccattatggaaaaaaccacagtgcatagagctatgtatcgtaatgatctaggctgggtggattttgagtatggcagtgataaacagggcattaagcatattatcaagcgccgtatggaaagtgatggcatgacatatgatgaagttgtgcatatgcttgtggatactattgtgcaaacaatcgcccaaggtagtacccaacggcgtacagaacgtggattatctacaagaataaatattgtatttaattcgcatgaagcgtcattgattaagcgagaaggtagtaatgcatggctgcttacagcttttgaagtgcattaa

SEQ ID NO: 44909 - DNA, 1722 bp, Acinetobacter baumannii
atgctacaaatatgtacaggtaaattattttctaaagatattgaatatagaaataatttgaagggaattatttatacaaatttaaaattatttcgagatgaaaaaattcaaactaaagctggctcaatagtttacgctgagaatgcaagtagtccaaatacagtaatctatgaaatagaagaactaattgaagaaagtgaaagtaaacctggccttcttatttctcacggtatcaattctttaatattagatttttcagccattctttcctttgctctaaattgtacagcttcgccaagtcattcattaacagaaagattacttagtgagcaagaaggtgtttctactcaaagatcaccaaataaaatgattaaaacagtttttgacaaaaatattttttgttctgaagaaagccaaaagttttttatcaactttacaaatcacttaattggccttgaacgcaaaacttatataggtgtaatgagctctattcgtacctatgttacaggtatgcatagaatcgcagatgactttgaattagcatacactctacttgttgcatctattgaatcacttgcacaaaattttgatggtcaccaatcaacttgggaggactatgatcagaataaaaagaagataattgatgaagctttaaagggatgtgatgaagatatttctgaaaaggttagagaggctattttaagtatagaacatacctctttacgaaaaagattccaagcttttgcacttgaacatgtttctcccactttttttagagaggaagcggattttgcaattaatcctatctctagattagatttacccactgctctcaataatgcatatcaagctagatctaaatatgtccataatttaataaaattaccaaaacaattaactttggctgaatattcggaattttgcataattaaagataaaagatggttgacccttcaaggtttatcaagacttgcaagacatgtaattattcaattcgttatgaagcaagagactgttgaaaatgaaccctatgattattcattagagcgatcaaatattttacaagtacatttagcacctcaatattggattgctgcaccagactttagtgaaggtgcgggaattcaaaagctagaagggtttctttctcagttaaaagaatgtttaacaaatactcctaatgcgagtgtaactgatttaacgaatgttttagatgagttcgaatcaagaattgatacattaaagcaagtggataaaaaggcttttcttgccctctatattctttataacgcttatttaaataaatcttttgaaaatagagaagtacgcgtaaaaaaagtaaaacgatttattgctaaacatgagaataagatatctaatccttgcgtagagggtctaattgttacatctttactaacactcccttttgaatggaatattgaagtacacgataaatatttaaaacaatattttagagaaagagataaaaaattaaaaataagatgtccagatatttttgaatccggaatgatacttcaattagctgaacgttatagagaagcaggtaatgcaaaaaaagcacttgaattaatagaaatggcggttgaaaacttaccatctcatcagggattacgccactttgaattagaatacaaacaacaaccacaacccattgatagcaaggaaattctatttccacaaaatgaagaaataattacttaa

SEQ ID NO: 44910 - DNA, 360 bp, Acinetobacter baumannii
gtggtgagtccgaaaactacaaataccgcacttactaaagtatttgcatttggatatgcctcaattgctttatcaaatgagcaagtatattcaaggaattacactaaagctttatctgaaatgaagagcacagaacataaatatttaaatgcaggggtctctaacattaaagaatataccgattatttatcacagcatgtaaatgaatgtgttcctaaatctactaaaacagttgaagctatgcaggtagagcttacctcctttatgcaaactatgaaacgacctgaaaatcagcctttgatgaaaggaattcaagcaactttagctaagacgaatcaagatcacattaatgcaaattaa

SEQ ID NO: 44911 - DNA, 621 bp, Acinetobacter baumannii
atggcaagatctagaaatattaagccctcattctttatgaatgaagacattattgaattaccttttgaagctcgtttgttatttatcgggctatggatactagcagaccgtgaaggtcgtttagaaaatcgacctaagaaaatcaaaatgtctttatttcctgcagacgatataaacgttgcagaacagttagagaacatttcgaagttcggttttatcgagttatacaacgcggatggtattgatgttatccaaatcgttaactttgttaagcatcaaaacccacacggcctagagaaagatagtgaactaccaaaccgtaatggtatctatactgtgtactatcgtaatcccaaaaacaaaacgattgtaggaaagccaattcagttaaataagaatgatttgaagcatttttacgataaaacaggtccatttgcccctcaaaatactggttctgctgttgaaaacagttatcaagataacgaatcgaatcaatcaaacactaatgggaacgcacaagaacagttagataacggttctaacactgtttctacctcagaccagagtttccaaaaaatgcacaaaacgctcagtatcttgcttcatgctcagcatatataa

SEQ ID NO: 44912 - DNA, 1560 bp, Acinetobacter baumannii
atgaacaataaggtactttttgaaacttcacggttatttaaaacccaatatggtttgaatttttccgagaaaattattgttgatttttttgctggtggaggcggagccagtacaggtctagaaatggggcttaaccgtccggtctatgtagctgtaaaccataatcctaaagctgttgcaatgcatgaagtaaatcatcctcatacgatccattatgttcaggatgtttttgcagttgaccccgttgagatttgtgacggttatcaagttggttggtttcacgcgagcccggattgtacccaccattcacaagcagctggtggtcaaccgcggaaaaaagaaattagagatcttgcatgggttatcccaagatttgcagggaaagtaaaaccggatgttattagcatggaaaatgttcgccagatgcttaattggggaccattaattgcaaaacgtgacaaagcaacaggccgtgttgtaacccttgaaaaaattgaagtaaatggaaagctggtaaatcgtattgcagagcctgctgaagttgtaccaagaaatttacagtttttgatcccagatccaaaacgtattggtcaaacttggaaacgatttattaagacattaaagggtcttgggtacattgttgaatggcgtgcaaatattgttgctgctgattttggagcgggaacaattcgttcacgattatttttaatcgcccgttgtgatggcaatccaattgtttggcctgaacagtattttgcaaaacaacctaaggctaaacagagtaagtggattcctacggcatattctattgattggtctgatttaggtaattccatttttaatcgtccgaaaggaccacttgttccagctacacttaaacgtttagcgaaaggtttgaagcgatttgtgattgatgctgaaaatccatatttcgtcaattcttcaactccatttatttgccgtgattttaatacaagcataggtcataacattactgagcctcttgcaaccacaactgcaagctatggtgggcatagtcaacttgtgtgtccaattttagccccgtttctaactgaatttgccaattcatctcaacagcgtaattggactatagatcaaccactatcaacgatttgtgcacaagttaaaggcggccatcatggtttagtaactgcaaaactaagtaaagacgatttcgagggtgctttacgagtggcggccttcttgattaattattacggcaatggtgatgcaagagacatcactgcacctatggataccttaacgaccaaagatcgacttgcattagtcactgtatggatcaaaggagagccttgggtaattgttgatatacgtttgcgaatgcttaagccaagagagctttataaagcgcaaggttttccagattcttacatcatcgatccgatttattgcggcaaaccgttgtcaaaaaaagaccaagtacatatgtgtggcaatagcgtttcacctttgcctatggctgcaattgctcgagcgaataatcccttttcaaatacaaacaaaaatgaggcagcttaa

SEQ ID NO: 44913 - DNA, 642 bp, Acinetobacter baumannii
atgagagatcgtttttacatcgcatgctttagggataatgtcggtcctaatgtaagttttcatcgtcatcaatttgcaggctatcacactgatattgatcaagcatatgtttgtacatttgacgaagcacaacgtcatttcaatcaagccagagagttcgaacgtcctatttctgctgatcatgttgatgcattagctgtatggaaagttgatcatcaaactttgcctaatagcactcaaattattgatggtgtttttggttatgctgttttcgttcaaggaaaatattcgggaaatgatgtctattggttaaataaaggtacttatgacatagctactgattttgaaaaagcatcttatttttccaaagacgaagtaaatcaactaggtggaaagtatgttgctattcctttttctttagctgagaaagcaaaacgtagaacttttgattttgagcaatataacccacgaatcatgactcagggcgcgggcttaaaaatgcctgagcaccttaaaagagccaagagaaaagtcaaaaatcctcaaacacgatttaactgtccaagttgtggaaaaatcgtttggcaatacaacccctatgactttgatcactgtgatcattgtgggcaagtgggggactaa

SEQ ID NO: 44914 - DNA, 456 bp, Acinetobacter baumannii
gtgatttttgaattaataaaccctagtgataaatgtacatttgaagcaccaaatttaaaaattgctgcgatagttacgtgtgtacttggaaacggacaatattctgcgaagggaatgcagcatgatttagatgttccattctttcttttcggaggacatgaagagtggtttgtctctagatttggaactaattttgaagaaacacttatacaagttcgaaatgcagaaaaaaaagatttagtagatagctttaatagcgttttattaggttcctaccttgaccggactgcttttttcaaagcttacaacttaattaaagatccagctgaacaaaacaaatggcgtagacaatggttagatgaacgccgctcatcttttaacaacatctgtgaacgtgcttggaattatgctgaacagatgagcttgtataagccagctcaggaaggtgaagcatga

SEQ ID NO: 44915 - DNA, 183 bp, Acinetobacter baumannii
atgacttctaaaaaggtttggccgttaggaactaaccatacagattctgaaggtacaccgtggaaacgggacgatcagaacaattggtggttttggcaagaaaactttggctggtcacgttacgtggggctggtgaataaagctttcttagattctcgttttgaagtgggtacagatcagtga

SEQ ID NO: 44916 - DNA, 1209 bp, Acinetobacter baumannii
atggctttaagtgatacctggttaaaatcaaataatggaaagttgagagaagctactcaagtagttaatgacagagacggtttatcagttcgcatttctccaaaagggaaaattgtttttcaaatgcgttatagatttaacaacgcttcaaaacgtatggacattggcacttacccaatgatgtccttgaaagaggcgagagctgaagttctcgaaaataaaaaggaattagataaaggaagagatccattacaactaaaattaaaaaaagagacagcatatttagcgcaaccaaccgttcggcaaatatgtctagaattcttcgagaccgcagccgcacataaagcagcatgtaaagatgataaaagagcttttgaattacatgtatttcctagattaggtaaacgtatttgtgatgaagttactttacaagaatggtcgcagcttctatttacaatcgttagttatgcaaaaacagttgcaataaaggtattaggtaatttgaagctaatcatgaagtggggttgtattcatggaaaattaaaagagcagactttattacatataagagcaattgatttaaatgttcgtaaaaaccctaggactagatatttaacagaacaagaaattttctgggtaatccatgcaacatttttatcaactggaatatcacctaaaaacaaattaatgatactgatgttattaatttttggttgtcgagtaggtgagttgagaacagctaaaaagagtgactttgactttcaaaatcatacttggacaattcctcctgagcagcataaaacaggtgcaagatctagaaaagcaattgttaggcctttgattcctcaggtagaagttttaattaaacaagcttttgaactttctccaccggattgtgagtgggctttcccaattattagggctcaaaaatataaacctacacaaaaaggatttcaaacaactattcctacttatattaatgaaaacgtcaaacgatattttgatgtagaaatgaaccattggacaacacatgatttgagaagaacaatgcgtacacacattgctgaatttgctcctccgcacatttgtgaaatcatgctggggcatgctttaccacaagtatggggaacttatgattgggcagaaaaatcacggcattcaaatgcatgtgacaaatcagtccagctggatcttcttagctggaaataa

SEQ ID NO: 44917 - DNA, 1395 bp, Acinetobacter baumannii
atgcaaacacgaattgaacatgacacaatgggtgagattgaagttccgaatgaagcgctgtggggtgcacaaacccaacgtagcttacagaactttaaaatcgggcaggagcgtttaccccgtgccatgattcgagcgatgggcttggtaaaaaaagcagcggcaataaccaatgcagagttaggccagttaccacaagatttgagccaatatattgtgggggcagctgaggaagtgattgcagggaaatgggactctcagtttccacttgtggtttggcaaacaggttctggtacgcaaagtaatatgaactgtaatgaggtgattgcaaatattgcaaatcaaaagctaggccaagcgctcggagcacaaaagccggtacatccaaacgaccatgttaaccgcgcacaatctactaatgactcattcccaacggctattcatgttgcggcaagtttgcaaattaatgaattactgattccagccgtagaacagcttaaagcgactttgcaaaaaaagtcggacgaatttcaagatattgttaaaattggccgtacccatttacaagacgcgacgccactgacacttggccaagagtttagcggttatgtttctcagctcgagcatggtttagtacgtttacaacaagctttaagtggcctgtatgagttgccattaggtggcacagcggtaggaactgggttaaatgctcatcctgactatgctgttaaggcggcagctcagcttgcagctttaacgggtttgccatttgttaccgctcctaataaatttgaagcacttgcaggacgtgatgctgctgtttttgcatcaggtgcattaaaaacactagcggtaagcttaaacaagattgccaatgatattcgttggttagcaagtggtccacgttgcggcttcggcgaaatccgtattcctgaaaatgaacctggttctagcattatgccaggtaaagtgaacccgactcaaagtgaagcaatgaccatggttgttgctcaagtgcttggcaacgatactactattaatgtcgctggtgcttcgggtaatttcgagctcaatgtatttatgccagtaattgcttataacttactgcaatctattcagttgcttggtgatgcatgtaatagttttaatgatcactgtgcagtagggattgagccaaatcgtgagaaaattgatcatttcttgcataattctcttatgttagtcacggctttaaatccggttattggttatgaaaactcggcaaaagtggcgaaaactgcttataaagagaataaaactttaaaacaagttgctgtagagctaggacttgttacagcagagcaatttgatgaagtggttaaacctgaaaaaatggtttcgccaaatagtaaataa

SEQ ID NO: 44918 - DNA, 426 bp, Acinetobacter baumannii
atgttctcaactacacttatggatttatcaaaactaagaaagcatctttgtgtgcctttatttttatgtgcaattttgactgaattggcattgtcaaaggatccatggttcttagctttaagcacacttggggattccttgtttactaaaattatagtctatatagtaggatgtattggtcttgtttttataatttacttcttcgtagctttgattgaacaattactatttcagcttgacaattatctacctcatactttgttcttttgtagttatgcttttattggtttagggttacttgtaattggaaattttgtaagcggtctacccagtagtgtttttaatatttattggcattttggctttctcgcctttggcattgatcttctttcatcagacatttccttcaatgataaaagcccttag

SEQ ID NO: 44919 - DNA, 936 bp, Acinetobacter baumannii
atgaaaattaattttaatattgctgaagatcttgaaaacatttcaaaagaatttttcttacaaagctcatttaaagtaactccagagaaaagctattttcatcaacattgtttattacaacataaattaatctatccaaccccaagaaaagtgattttttccaaaaaattctgtgttcccttagaactagaaaaaggattagaaaacttagttaagaagttacggttaggtgaagacgtaaattattatttaagtaaaggtagtctcgatttgacaagagaagatggcctactaaatgattttggaatttatcattttcacctaggatcaaattatgaagataacttcgtaaagcgaactaaagaagtagcttttgtttatatcaacaatactacagcattctttatagaagctcctgctcatggaaattctaacgatgtagataagttattatggtttaggactcggtatataaaaattattcataatgaacagccacacctaattgaaaattttagaattaatggcattccatttattgatattgatgatatagcacgtaaaaaactacgaaaagaaaatgtgaacacaccaatccaagtagatgataaaacaagttatatgagtatggggcaaggttttgttacttcaggaagcagtgcaagagcaataatgctagctaacaaaattaataatgaaatagtgacctatgctttagcaattaagaagcatttcgaagagaattcgccctctaacattaagtctgatgaccaagaaattattcttagattaataaatttttacggtacaccaggcagtttaaacacagaatttgaattatggaaagatgacaaagcaatatataaaataacctatttatataaaaatgagtcttcaagcactttaataatttcagaaataaggaaagacatatag

SEQ ID NO: 44920 - DNA, 615 bp, Acinetobacter baumannii
atggatacggagttactaaataaaatacttgctattcttactataacaggttgggttgtaggtattgtatctttctactatgcctataggtctgggaaaaaatatgaagacttaatgtcaaagctttttaataagcttgcttcacaaccttttgaattgattggcatgcttggaatagatgctcaaactaccgtaaagcatttgtatgactttcaggagcatgtacattcaccttatacagttacaaaactagatattgatcaagatggtgaggaagaacttcttgttcaatctggatgtgggccttatagttgcaagttagagatatataaatttaacagagctgatgatgagccaactttaaccttaatagattcaacagtagtgagcacaatggctggatatgtatttaatgatattgatggggatggcaagatcgaaataataactgaagataactcactaaaggctgaaaaaccatatgtaatgggattaagagatagagttatttatagattcgaaaacaaaaaattaaaagaaatctctcgtattgaactatatagcgatgaagatctaaaagaagtaatacaacattttaagtcttatcatagttaa

SEQ ID NO: 44921 - DNA, 645 bp, Acinetobacter baumannii
atgtgctcaaactacgaaccaatcgcaaaagatagaattcacttgctggatctgtttgagccaacatttgaatatgaatctcacatataccctaactacgaagctccccttctattctctaaaaaagaacagatagaatggagattggctaggtttgggttagtcgctccatgggttaaagagcttaaaaaggtacacaacacttacaatgcaagaactgagacagttcacgaaaaacctagcttccgcaatgcttggaagaaaaaccaattctgtttaatacctgccgatgtgatttttgaaccgaagtatattaacaataagccggaatggtggggaatttatcgcaaagatgatctgcctttcactatcgccggcatttacgaatatgcagtagtgaacggtgaagaaatcaggtctatgagcatgctcaccattaattctgaccaccaccctttcatgaagcaattccacgcgcctactgatgaaaagcgctctattattgttattccaccagaattaaggcaagactggcttcactgtaaacatgaggaagcaaaggactttttcctagatatgccagttgatgaattcaccgctcaacctcgatcagaactgaagaatttccgaccaaatacacaatga

SEQ ID NO: 44922 - DNA, 495 bp, Acinetobacter baumannii
atgagcgaaattgcaccatccattatccagataaagccataccttcaaaaaggttttgttttatcagaggttatgtctatcaagctagttgtaccatcaactcacatgcttgtcccttatgctttagaaaagatttccgctggtttcccctctccagcacaagattatgtcgataaagcgctcgatatgaatgagcacttaatcaaaaatgcaacttcaacatttattgttaaagttgcatcactatcaatgctcaatgcgggtatagatattgatgacgaattgattgtagatcgtagtcttgatgcaaagcacggcgatatcgttattgcactaattgacaatgaattcacagttaaacgattaatgatcgatgaaaaaggccaatggcttaaagcagagaatccggattataaaaatatttatttagcagacggccaagaactgattatctggggcgttgtcactcatatcattaaaatgacacggcattaa

SEQ ID NO: 44923 - DNA, 1299 bp, Acinetobacter baumannii
atgaaacatgagaacaaagtattttttctcatcgatgtaaataacatgtacgtttcatgtgagagagtctttgacccgtatttgaatgataaacctgttattgttttgtcaaataacgatgggtgcgccgtggcgcgtagcaacgaggcaaaatccttaaatataaaaatgggtgtgccgctttttcaaattaaagacattgttcagcaacataacgtaatcgttctatcaagcaactatgcaatgtatgctgaaatgtcacggcgctttcattccatccttgcgtcttacgtaactgcagaagaagttgaaccgtactcgattgatgagtgctttgttgatttctcagcttatgaaaagaattttgatttagaaaaagtcgggcaacaaatgcgccagcaaatatggaaatggctgggtttacctgtctgtgtaggtattggtagaagtaaaacagaagcaaagatcgcaaatcatattgcaaagaaaaacctcggctttaacagcgtttgcgatttggtgaatatggatccttgtaacaaagaatactactttgctcaaattgatgtttcagaagtttggggcgttggccgtaagcatgcgaaaaaattgcaaggtatgggtatcaacactgttttagaccttgcatgtgctgaaccacgcgagatgcaaaaacgtttttctatcgtcatggccagaaccatttacgaactgcaaggtatctcatgcattgagattgaacatactcccccatctaaaaagcaaatcgttgcaagccggtctttcggtggtcgcgtaactgaattaacggatctaaaagaagctatctctatgtatgctcaagatgcttgtaagagattgcgcgatgaagggttactatgcggatgtatgattgcttttgtacagtcaaatccttttgacccaaatgtgccatttttcaataaatctattacaggctctttttcagaaccgactgactgtgctgtagattttgttagagcagcgacaaagatgttgaatgatatctacaaagaaggaattaaatataagaagtgcggtgttgtgctgacaggtttagagccgaagtctggccatacttatgacttgcttactgactttaaacaaatagagaaaaaggaatgtttaatgcaggctatggatggtatccatagtaagtttggaaagaaaaagattggagtcggagcttgttttgttcctggtcgaaactggtcaatgagcagggataagttgagcaagaacccatttagatgggatgagttactatctattaaaaattga

SEQ ID NO: 44924 - DNA, 819 bp, Acinetobacter baumannii
atgcatattaaagatcttatacaaacagtttttcttatttgtagtgtagtttcaattattctttttggttttatttattatttaatggtcggtgaaagtaatgcatctattgcacagataaaagactcattaaccttaacagctagctttttcggaggtatcgcaacattagctacagcatatgttgcagcgagcttatttaatgattggagacatcaagcttcttttgaactaaaaaaagaacatgttaatgaaatatgttatttgctagccttaagttacgatgaactccataaagttaaagaaatactgatcaatctaaaaaaagttaataaatataaaattctttctgaagacttttgcacgtttatagctaatgacttaagagatgaattttatagaaaacaactgaatgtcaaaatattagatagattgaatcataattcgaattcaatatttagtatttattctatctatcaaactcattttacatatttaatcaaaaattttagtcgcatccaagaatcatatactaaatattacgataagtttaatagtgaaatcagcaattctgaacgtacacatatcatgaacactcgaacatttccggaatatgtcaacccaaaagaaaaaaacaatgtagaggttggtcttttaaatgttcatattaattttcccgttaagtttataggtaataatgaactatataaatttgaaagtatttatgaattaatagaacgaatggataatatatacaaagaacttgagaatcatctacttgattcaatagatcttacaaagatgaaaaagcccttttaa

SEQ ID NO: 44925 - DNA, 546 bp, Acinetobacter baumannii
atgaatattgagcaatatcttgatgatttgattaagcgcgaaggcggttatgtaaataacccagcagatcgaggcggcgcaacaaaatacggtattactgaagcagtagcacgtactaacggctttaagggcaacatgaaagatttaccgcttgatgtggctaaatcaatttataagcaacaatattggacagctccacgttttgaccaggtgaatgccgtttcttctgcagtagctgaagagcttctagacactggtgtgaattgtggtaccggctttgctaaacctcttttacaacgtgctttgaatttgcttaataaccaaggtaaatcaggttggccagatcttgtggtcgacggaatttatggtccagctactttaaatgctctcaaaacttacctatcaaaaagaggtaaggaaggcgaggcagttctggtacgtgttcttaatatcatgcaaggccaacgttacattgaaatctgtgagcgcaataaaagccaagaacaatttttctatggttggatcgccaatcgagttgttatatga

SEQ ID NO: 44926 - DNA, 390 bp, Acinetobacter baumannii
atggaaccagtttccacaagcggttttacagcactactaaaattgtacgggattgcaatcatggtgactttagcggtcggtttggttgcagcagtggtattaatgactcgtatgccacgttcaccacaagagtgggcagtgggcttgatctgtacggttgtttcaagtttggctggtggctcgttcatcattgtgaagtgggggcttcatgaatgggttactgatgtatgggggatgatagcacttggtggattcttctttgtttgtggattacccggttgggctttggtccgatggatctttaacttcattgataagcaggaaggtaaaacgatcgttgaagtgatcaaagagtttaaaaaagccagaaaagacattgaaaacagttaa

SEQ ID NO: 44927 - DNA, 3447 bp, Acinetobacter baumannii
atgattaagattatttataaacaagaccctttatccgaagacaaaacaattgaacacgccgaaactttgggtcaatggcttacttcaaaatatgaccatatgcctgagcatgtccgtatttttcataccataagcaatatggatcatgcggaaatttcatttgcgaatgaagtcacaccgaagaatgcatatgaattaaagcagctcgatttcttgccaggcactttcattgtaattgagaatcccaagggtatagaccccataactctagcttggatagcggttgcttctatagttatgggtgtggctgttgcattattaatgcctgtgccctcaattacccaaaccaaccagaataacaatcaatcctcgtctgcaaataacgaattatcaaaccgtgaaaataaaactcgcgtaaatggtcgtatcgcagatatttatggtgccgctcacgatacccctgatctgattactgtgccttacaaggtatatgaaaacaatgtcgaagtagagcatgttgtcggttgtattggtcgtggtcactataaaattaacggtgcatatgacggtgaaaccaacattgttgatattgccggcgcatcggtagaagtctttcgaccaggtgtagatattgtttcaggtgagccatatttctcgcttggtaccgaaattaccacgccgccactaacggttcagcatcaaacttctgttaatggccaagttctccgtccagcagatacgcaatctttagagggtaccaactatcttcattttgcatatccaaacgagatccttcgggcatctgcaaacaatacggatttaaccactaagtttgtaagtaatgaccgcgtagaaatcaccaatgcttcattcacgtttaacggccagacttatgatttaaacggcacttacagtgttctatcggtagctgatgatcgaatgacgttatcaaatccggcggccgttaatgcaaactggttaaagcttaaagagttaagtacccagcaaacagcagctttgtcaccaaagatcagttcaataggtgaaaagtggattggtccattcattctagacaatgtcgaacgaagtcgggtgctgtgtaattttgtggccacaaatggactttataccgtttcttcaggtggaaatcagggggctgtaaacgtcacgattgaagtagaagtaacgccggtaaatgaatctggtgcagctattggtaatccaatgctgaagcagatcattttgaaaggctcggcaaagtcacgtcagaccgttggtgcaacgctggatatggtgacatttcagggacgctgtagtgtccgtgcacgccgtttaactccaactccggcagttaccactgttgttgatgaagtaaagtggcaggcgctttacggtgcttatcctttacaaagcacagtgtatgaacatgaaacagtttttcgtgcacgtacttatgcaaccactggagctttatctgttaagtcccgcaagatcaattttgatcttcagcgaatgttgccgacttataaaaacggggcaatgacaacagagctatatccaacgtctagctttgctgatgctttggtatctatggcactcgatgacaagattggccgccgttcgatcgatgagattgatctggaaaacatctatcggacctataatgatgtagttgattattttggtacgccgctagcggctgagttctgtactaccattgatgatacgaatctatcttttgaagagctggttaccaatctttgtgatgcggtgttttgtaccgcatatcggcaaaacaataagctcaagctttattttgaacggccaactgataactcggtaatgctgtttaacttcaggaatatcattccggatagttacaagcatgacctgacctttggagtgatggatgactacgacggactgatctatgaatacacggatccgaccgacgatagccgtatcaatatctatttaccggataaaggagccaaaaaccctaaagaagtgaaatctgttggtgttcgaaacaagtggcaagcgcatttcaatgcgtaccggctttggaacaagcttcggtttcaacgtaaatccatcacctttgatgcggcgcctgagtctgaattgcttgtgctacgtgaccgtattgccgtagcggattaccgcaatggcatccatcaaagcggggaagtggtacagcaagagggtttaattctcaccttaagccatgatgttgatttcatagcaggcaagagctatgtgatttatctgcaaatgggtgatggtaccgtggacttaattcctgttacaccgggttcagccaaaaacaaggtggttttagggcggttgccgaacggggccttaaagctaagtcctgatgattttgtaaataccatctatacagtagttaatgatgataccaaaggctcactgccttatctggttgcaaaaagagaaccggctgaccagttctctaataccattactgcaattaattacgatgaacgttattacctcaatgacaaggactttattgatgtaccagtagatgattcaccgatttacattcgatatgaccagcttgatattaatctggcacgtttgtatcagatgcaaagaggggatttgccaacgactggagaaatcagttttgtagttgaagcaggtgcactggtttcaagttcaagttcttatcgaccggaaaccagatttgtctataaattcgactataagtctagtcctgcaaaacgagagtatatcgttccggctgcaactgaattaccagcgatagatacaggggagttcccacctgatctggtggtgaatctaacgattaaaggttcagttgttggacgtggtggagatggcgggttgccacatctagcttacggagattgggaaaaagattctgacttcaattttaccaaaacccgccgtgatggttttcagggtgcaccaggtttattgaatcgacacagcaaactaaacctgattatcgatggagggacgttagctcgaggcggttcaggtggtggagcaacaccaagtggtatttacactggatcatcttatggggttcagggaattcccggtggtgctggagcaccatttggtcgggtcatgactggacagccgatttcaaatgactcacaagattatcgcctctatctggagagttatttattggttatgaaaatcactgatgctgaagcttcggtgcccggtaaaggttaccgaacccaaaatgaacgctatggctcaccactttctggagatggtggaaattggggcgaacgtggcaccaaatccaccaatgatggaacgtggaactggcaataccatggcacaactgaaggtcagccggggccgggtggacctgcaattgttggggtggcaccgcttacaactcaattgattaacggagggaaaatcttacaaaccctttaa

SEQ ID NO: 44928 - DNA, 507 bp, Acinetobacter baumannii
atggataacgaatatgccaaattctttttcaatcgaaaagtagatgtttatcaactggaatgtattgaactatcacacccttcttttatgaatacttaccgggtggtacgtaatgatgaccgtggagtgtatgttcagcacaatgaaggcgcggggcaagtattttacgaatacctaccaatgacaattcaaagatccggaatgctcggtgatttggaccaaactttgaccgtttcaatttctggacttggtgacattttgccggatgagtttgaacgggtaatcgaaggtcaatttccgaatgtaaaaccaacagttaattatcggctttatagttcagataatttaaatacaccgatgcattatctgcttggcttacaactcgccggtgtttcaatgaaccataaagctgtgacgttcaaagctgaatctccacgattaaataccgctaaaactggagatatctttgcactagaccgctttactggtctcaagggggctatatga

SEQ ID NO: 44929 - DNA, 399 bp, Acinetobacter baumannii
atgtacaagttaaagctaaatcctcagaccagcggctatggcgtaacaccgggtgatgatgtgaaacgtcagcagatggatggcggtcgtggtcgctattacatcgatgtaaaacgtaatagccacattgttgatgtgaactggaatttaagtaaaaccgatttcaataaaatgatggcgttctggcgggtctaccagaataaaccagcctcattttatgcggatctggtgattgatcagggaacacgtcagcaatacctgtgtaacttcattccgaactcgttcaagaccaatgaagtgaatggcaacctttaccgggtaaatgcacagctcgaagttgttcaaaaccagcctaaccttatcgctgatcaggcacttatcaaagattgggaggtctaa

SEQ ID NO: 44930 - DNA, 393 bp, Acinetobacter baumannii
atggctactacagatactctaaattactgttatgagctattaggtaattccacaaaatatgatgaatgccacaaaaggaatattatagggcgtgcttattaccatgctttttatgaagtccggcatcatttagaacaacgactattatggccagtaacaaacacaaaatgtggagctcatgaaaaagtctatagcagacttagtggttaccctgcgggttcaacgtctgtaatgattcagaaaagagctgctgaaatcaaaaatcgaatacaaaaattaaagaggtttagaacaacagctgactatcatcttcacctaacgatttcaaataaattaataaactatattttacatgaatctagtcagatatctgaagaaatatcaagactttag

SEQ ID NO: 44931 - DNA, 753 bp, Acinetobacter baumannii
atgcttcctccagttcctaaaactaagtcatcagaagtaaccgatattattaactctgctgttcctactggatcgataagtgaatttcagtattttagatgtaaacggttgcttaatgatattaaagaaactgagccactagattggtttttattaagcaatagtattattgaaatgtattttgataatcctgttcttgcgcatcaatacgctcgagaagtactgaaaattagcaatagtgtatcgattttatcgaatctttattttgtttttcttagctcagtagatttttctggcgctaatgaaaatattgataaaattattagtttgtgtagtaaacaaaatttacccttagaaagttttattcctatagacttcaaacctataacttattttctagacggaattttaaaagatgatttaaattattataaaagatttaaaaaggaagactttaatgaatttattcagctttttgaaattaaaaataaactagaaattgattctagtgtcttgaaacatatcggttcaattctttttaaatgctttaactctaggaatgttaggtgccgaaaatatgaatatagttttattgatgatgaatttttgatattgctttatgtcgatagaagttttgatgagattgatgccatgaattcagaaatatttagtaaatgctatgatgagggcttaattgatgaactgaataaactttcatattttattattccttatgaagtgggcgtggattga

SEQ ID NO: 44932 - DNA, 4896 bp, Acinetobacter baumannii
atggcacaagaatcccgtttggtcattgttattgattcgcaaaatgctgaacgtaatgcgcgtaatctaggcaatgagctcaatagcattgagcgtaaaggtgaatttgcatctaagtctatggacagcttgtctgtagccaccagagctttagctggacacatggctggtttattaacagtaggttcagccatttcaaagatggatacatatactggactacaaaaccgtcttaagttggtcactaataatcaagttgagctaaacaaggcaactgaagatacattccgaattgctcaaaaaacctattcagcatgggattctgttctacaggtctaccagcgttttagtgataatgccaaaactttaaacctcacaatggatgacacagcacgtttaactgaaacagtttctaaagctgtagcaattagtggtgcaagcgcagaagctgctgatgcagctttagtccaatttgggcaggctttagcaagcggcacattacgtggtgaagagcttaactcggtaatggagcaaaccccagcactagcaaaggctattgctaaaggtatgggtattactgtaggtgaattacgttcagtagctgctgaaggaaaaatcacttcacaggaaatcgttaaagcacttaaaaatgtccaagatgaagttgatactctttttgctaaaactgacattacaattggtcaatcattaactttacttaataatgaaattactaaatttgtaggagaggctggtaaaggaagcggggcagcacaggctttatcaggatcgattcagttattagcaaataatttgaatttaattgcagacagtgcatttgccattggtattggcttaatgacaaaagctgttttaacaaaaacggttgctgtacaagcgagtattgctgcatcaaccaaacaagtgtttgccacaattgctgaacgtaatgcgaatattgcagcagcaaaagctgaagtggaatctgcgcttgccgaagcacaaagtacgcaggtgacactaacgaacatcaaagctactcatgctcagatcatggcagaaatagaactcgaaaaagttcgtttaaaagcccaaatcactgaacaaggtcgcacggctaccatcacacgaatggctcagctaggacgattacaagctcaagttgcgttagaggttgctgccgcagaaacagctcaatcagcatcatctgcaagattatcagcagccttaacagcgcaatctgttgctacaagtcgtttagctttggcaaagtcagcgcttatggcgatttttagcccaatgggtttagcaattgcagcaacagccgcatctttctatttactaagcagcagttcggatgaagtcaaagagtctcttgcaacacaatctgactcggttagtgatttaacagataagtacataaagttaaatactgtgcaagcattaacagagggtgtgcggttacgcaaagagattgagcagcaaaatgatgcaattgatgatgctagtggagctatcaaacgttttgcttatatccaaaaggaattatttaaattatctggcagtgattatgaagattatcaaaatgccattaagtctattgctacaggtgcaagcgatgcaggtgatctcttaaaaaagatgatttcatctggtcgttttagtcagactcaaattgataaacttattgagttctctagtgcagtagcagaatcaaaaaataagattgagcagggtaatactgctctaaaactcttaaatgctacttctggacaacatgttgaggtaacggccgaatcaattaagcaattaactattcaaaccaacttaacaaaagtcgctactcaaaatttcactgacatgaaaacacaaatgcttgattcattacgagcacaagtggaattcattcggttaaatggtggtagtgaagaacaagttaaatcgttgaataaggtaattcaggcatattctttaaatcaaatttcagcaactgatgctgtgagtaagttcaacagtaccgccaaagttcctgctgaaaatatcaaggggttacaggattatgctactaaaacggatcagtctaaaattgcgttgaatcaggctaatgccgagctgaagaaacagaatgacttgcgtaatgagtatctaaagcaacatcaaactgtacttggtgctcaacaaggagaaacaaatgaattaaataaccaagtcgctgcacaagaaaagttaaataagttacgagacaacgccaacaaagatattctgaaaaatgattttcttataaaaaacactaaggcatttggtggtggcgaaaagggtcttgataaggcgcgtgcggcatcagagttttataccgacaataaaattccgatgactagaagtttaactagtcaggaagctgcaatttttgaggcttggtataagaagcagaaggaagccaaggacttacaagaaagtattaccgaatctagcagaaagcaaacaaaagaggttgaaaaacaaaccaaagagtctgccaaacaagctgttctacttgctggaaatgatgagcgagtgagaaatatgctacgagtgtatctggcatttcgaaatgcaggcttaggcgataaacaagctcgtgtaatgacagctcaagttggacgagagactgattttagaaatgaggcaatgtttggtagccataaggatgaaaataatggttatacaaatactggatttttatcatggcaaaaaagtcgctcaactaaattaatgcagtctttacaagggcaaggagtcttggataaaaacggtaaaatccagcaaactcaagatgcattggatgcaatggctaaacatgctgtgcaagaggcgatgaccgataaaagttatagtaaatctaaagcagctcttcttaatgacgatttagactatcgaagtttagagagaattgttgccaaaaattttgttggctgggactatgacgggaaaaagcttggcaaagctaaagcttcacagcatttagccaaacaagactcttactataatcagcttagtaaaattttaggggataaccccgaagcagcctcaaaagcaattagtgatctttcgaaattcgaagatgaagcatataaggcacgtgcaaaaactcttgaggaaattaagcagctccaagcaacatatgattcagaaacagttgctagaagcaaaaaacgtgaggaggaaatcaacaaagcaaccattttaggtcaatcaaatttaatcccaaaaattaatgagcgttatgatgctgaagataagttagctcagaagcaatttgattttgaagtaaatggttataagtggactgagaagcaaaagcttgagtacacatatgaaatcaattctttgcgattagttgctgaaggcaaactctctgaagatcaaagaaaggttgctttagatggcctggaattgcaaaagcagcaagagttaggattactaaaacttgctcaggaacagcggttgtttcaggctgagcaattcatgctgggagaaatggagcgtataaaaaaacgttatgcgcttgagtatgatgaaatatcaaaaatcactgatcttgaagagcgtagaaggaagatgagtgcatttcaggctgattttattcgtaatggtgtggggaatccaacaattgatcagtatgatacctctagtcagtttcttaaatcgacaaactacaccaagcccaagcaaaccaatatgcaagtattggatgaagattacgctcaaacttatcaaaagttgaaagataatcttgcagctgttttggagtctgaaaaagctagttatcaggaacgattggaggcggagcgcgtattcaaagaagcaagacagcaaatggataatgagtaccacctgaaggcgattgatgcaagaaaagcagatcacgacagtcaattgcaattatacagtcagatgatttcatctgcttcaagcacatggggaggtttaactcaaattgttaaggatgcgcgtggtgaaaattcacgctctttcaaggcaatgtttatagctcaacaatcctttgctattgcttctgcgattatctctgctcatttggcagctacacaagtagctgctgatgcaacgatcccattttttggggcaaaaattgcggcttcaaccgccatgcttgctatgggatatgcaaatgctggtttgattgctgggcaaacaatagctggattctcagatggtggttacactggatctggtagaaaatatgaacctgcaggtattgtccataaaggagaggtggtctggtcccaagaagacattaaaagatggggcggagttggtttagttgagaaaatgcgtaagagtgcaaaccctgaagcttttctcaataacaatgcctcggctgatagtgtcatgcgccgtgcaatgatgagttctaatgcctttatagaaagccaaaagcaagctgacatctttaatcaaccggttcaagatactcagattatctataaaggtaatagagacacacctaagttggcgtcttcggcaaattctgacttattccatgatggcaaggtctacttctcatcaaatggtttagttcaggatcgttcaaatctggatgatgttcaggattttactttaggacgtacttcacgccctcaagctgagattatgccttcaattgagccttctacaccgacaatcaatttcaaaattgaagtgattaatcaggtgagtggagcgacagttgaagctgaacaactggatgagcaaacagtccggatcattgttacagatgaactggataagcagcttccaagaaaggtaccgaaacttgttagtgatcaaatcggtaatccaaactcaactattagtcggtctttgactgagaatacgacagcaagacggaatcgttaa

SEQ ID NO: 44933 - DNA, 510 bp, Acinetobacter baumannii
atgaaaaagtttttattagcgggatttcttggattgggcttggtggggtgtgcgacaacatctgggttggcacctaaagtaactacaagtggatttgatggatcaaaaagagtttttattgatgggcatagtgttgcatgtgatcaaatggtttgtcctttaataggcgcgatttggttaagcaataacccgaatcttgtagggttaaagatatcagttataaattcaatcgtttctataaactctgttgatttgaatattgatggagaaataatcaaattaagagaaaacactttaacggatttttcaactggtactttattggagtctagcaaagtatttgttactgatttaaccgtagtggataaaattcttaattcaaaaagagcttggattcgagttaatactagcaagggactaatcgaaaatccgattattgatggttctaaagatagtaaggcttaccacgcattaaaacgttttaaagatcaagtaaatactgttaagtaa

SEQ ID NO: 44934 - DNA, 1143 bp, Acinetobacter baumannii
atgttaaatttaaaatcttctcatagtactgcatttactccgtcttccccagcagagcgctatgctgaggcattggcttcaggccagtttatggcagatgaggcacaagcacaggcagtgcaagaattagatcgtgtatggaaagaacttttaaatcgttataaggcttctaaaaaagctttccgtcgtttccgccgccaaacttctccaaaaggtgtatatatgtggggcggtgtaggacgtggcaaaacttggcttatggaccaattttatgagtctgtaccatttcgccgtaaaacacgtatgcattttcatcactttatgcaacatgttcataaagagttaaataaactttcgggtcaacgtaatccactcgatatcgtagctgatcaaatttataaagatgctgtcgttatttgtttcgatgagttttttgtctcgaacgtaactgatgcaatgattttgagtgacttattccaaaagttatttgttcgtggtgtaacactcattgcaacctcaaacattgcaccagacggtttatataaaaacgggattcaccgtgatcgttttattcctacaattgaaatggttaaaaagaactgtgtcgttttaaatgtagatgcaggagtggattatcgtttacgtgttttaaaacaggctcaattgtttaaatcaccattaggtaatgaagctcaaagctggatatcagagcgttatactgctttaactcatactcaaaccaattctcatgaaccgattgtgatcaataaccgtgttgttgaaacactagggcatacggaagatgttttatggtgtgagttttctgaactttgcttaaagccgcgtagtccagcagactttattgaaattgccaatatttataatacggttttagttagtaatgttcctcacttaacagacttcctttctgaaggcacacgtcgttttatttatctagtcgatgaattttatgatcgtggagtgaaactacttttaacctctcaagatagtattattgatatctatcaaggcgagaaattggcttttgaaattgagcgtactcgttcacgtttattagaaatgcagtcagatgagtatttgcattctgaacatagacatattgatgcgactaaaacttcttaa

SEQ ID NO: 44935 - DNA, 1509 bp, Acinetobacter baumannii
atgctaaacgcaaaacaacatgctattcaaaaaactaaaatcgcaattattggtgctggattcggtggccttgccatggctattcgtctgttacaaagccaacaatcagatttttttattttagaaaaatctaatgatgtcggtggaacttggcgtgaaaaccgctatccaggagctgcgtgtgatgttcaatcacatatgtactctttgtcttttgcacctaaaactgactggtcaaaacgttatgcagaagctcctgaaattttcgattatatccaagatataaccgatcaatatcaaattaaaaactactgtaagtttaaccatgaggttactcatgtacagtatgatgaaatgcgccatgtatggtcactagattttgcaaaccaaccttctctcgaagcacaatttgtagtttttgcatcaggtccgctacatattccacaaatccctcatattcaaggtattgaaaagttcaagggtaaagtttttcactcttcccaatgggaacatgactacagtctagaaggtaaatcagttgcttccatcggtactggtggtagtgcaattcaatatattccagaaatcgcaaaagacgttaagcaattatatgtattccaacgtacagcagcttgggttatcccacgagatgagcgtaaatactctaatttgagcaaagctctatttaaaaaatcaaacttatatcgacaaattcatcgcagccgcctttattggagtaatgaatctcgcgttgttcctatagttcagccgcaaatcatgaaatatgggcaaaaattagctgaggcatttatacgtttccaagttaaagataaagatttagccaagaaacttacaccagactttgtgatgggctgtaaacgcattcttatttcaaataaatacttccctacttttaaccgtaaaaatgttgaattagtgactgagggtattcaagaaattaaagagaacagtattattacaaaggatggaaaagaaagaccaattgactgtttaatctatggaactggttttgttaccgatccacgtatttatttaaaacattttacatgtattggtcgcaatcaaattgaattgaaacaggcttggaaaaacggtgcagaaacttattatggaattatgaccaagaattttcctaacctatttcaactggtcgggccaaataccgttttaggtcataactcgattatatttatgattgagtcacaagttaattatattttacagcttattgatctagttgaaaaatctggacagcacgctatagaaattaaaccggaagttcaggattccttcaatgaaagaatacaaacacaacttcaaggtactgtatggcaagctggcggatgtagcagctggtatcaagctgccgatggaaagaacttttctttatggccaacttatacatggaaatattggctagacactcgtaaagttaatcctaaagattatttgttattaaataaatgctcacagagctatgcagcataa

SEQ ID NO: 44936 - DNA, 699 bp, Acinetobacter baumannii
atggaagaaagtctcttgagtatcattgttgcgttggacgctaaaagccaatatgacgctttaaaaattgttgaacaacttgatcctactttatgtcgcgtaaaagtaggtaaagagctttttactcatgaaggcccatctgttgtaaaaaaacttcaagaagaaaatttcgaagttttcctagatttaaaattccatgatattccaaatacgacggctcaagctgtatgtgctgccgcagacttaggtgtatggatggttaacgtacatgcatcaggtggccgtaaaatgatggaaacctgtgtggagcgtttaaaagcaggtaattatcaaacacaattaattgcggtaacagttttaacttcaatgggccgtgaagatttaaaagatatcgggttagatattgaacctgtagaacaagttaaaagattggcgaaacttactaaagaaagtggtttagatggtgtagtttgttctgctcaagaagctaaaattcttcgtgagttaatcggacaagatttctctttagttactccgggaatacgtcctgagggtagtaatgcagatgaccaaaaacgtattgtaactccgaaacaggcaatgcttgatgggtctacacatttagttattggtcgtccgattactaaagcagaaaatccaactgaaatgttgaaatcaattcttgcttcaattgcttaa

SEQ ID NO: 44937 - DNA, 747 bp, Acinetobacter baumannii
atgaaaatactagtactgtgtatcgtgaacttcataatctttacacaatccgctttagcactagagtatcgacagattagaaatactactgatgatcagtttgaggtaattgaaatttctaatttagaacaattacgcttatttttgaaaaatccgcaaactcatcaatattataaaagtttcgacaatattcaatatcaacttaaagcatgtgaacagcttacttttgcgatgaatggaggcatgttccattccggtttttctccagtaggactatatattgaaaacggacgagagaaccaacctttaaatgaagataaaggctggggaaacttctttttgcagcctaatggagttttagcatggaatgacaaacaagccgttatattgacaactgaacaatataaagcaaaagtttttcaacccgattatgctacgcagtccggccctatgttagtgattaatggcaaaataaatcccttattcctagcaaatagtgattcaaagaaaatacgtaatggggtaggtataaaaaataataaattgtattttgtgatatctaaaaatagagtgaatttctatagttttgctcagttcttccaaaaaaatcttgaagtcgagcaagctctataccttgacggttctatctctagtttatatttgcacaagaataatcgaaatgataaaagatttaatatggggcctattattggatgggtggatcaggcagattgtagacctaagtaa

SEQ ID NO: 44938 - DNA, 1989 bp, Acinetobacter baumannii
atgacgacccctttaaacgaacgtcgtattgcaaacgcaattcgtgtattggcaatggatgctgtgcaacaggcaaactcagggcatccgggtgctccaatggggatggcagatattgctgatgtcgtctggcgcgagtttttaaatcacaacccaaataatccacaatgggcaaaccgtgaccgttttgttttatcaaatggccatggttcaatgttgcaatatgctttgcttcatttaacaggttatgatctttcaattgaagatttaaaacaattccgtcaattgcactcaaaaactcctggtcatcctgaatatggttacgctccagggattgaaacaacgacaggtcctttgggtcaaggtattgcgaacgctgttggttttgcattagcagaaaaaactttagctgctcagttcaataaagatgacttaaaagtagttgatcactttacctattgtttcttaggtgatggctgtttaatggaaggtatttctcatgaagtatgttctttagcaggtactttacagcttggtaaattgattgcttattatgatgacaacggcatttcgattgatggtgaagtagaaggctggttcagtgatgacactgaagagcgtttcaagtcttatggttggcaagttcttcgtgtagatggccacgatgctgatgcgattcgtcaagcaacagttgaagctaaagcagaaactcaaaaaccaacgattattatttgtaaaacaattattggcttaggttctccaaacaagcaaggtaaagaagactgtcacggtgcaccactgggtaaagatgaaattaccttaactcgtgaagctttaggttggactgaagaagcatttgttattcctgctgatgtatatgctgcatgggatgctaaagcaaaaggtaatgaagctgaagcagcttggaatgaagtatttgctcaataccaagcaaaatatccaacggaagcggctgagttacttcgtcgtattagcggtgacttaccagcagaattttcagctcaagcagatgcatttattcgtgaaacaaatgctaaagctgagactgtagcaactcgtaaagcgagccaaaacacattacaagcatttggtcctttattacctgaattattaggtggttctgcggacttggcaggttctaacttaacactttggaaaggttgccaaggcgttcaagaaaacccggctggtaactacgtgtattatggtgtacgcgagttcggtatgactgcaatcgctaacggtgttgcattgcatggtggcttcattccttacgttgcaacgttcttaatgtttatggaatatgcacgtaatgcagtacgtatgtctgcattaatgaagcaacgcgtgattcatgtatatacacatgactcaatcggtttaggtgaagatggtccaacacaccaaccaattgaacaaattgcttctttacgtggcacaccaaacttaaatacttggcgtcctgctgatactgtagaaacagcaattgcgtggaaatctgctttagagcgtaaagatggccctacagcacttattttctctcgtcaaaacttaccattccaaacgcgtactgaagagcaaatccaaaatgcggcaaaaggtggttatgttcttgctcaagagaaaggtgagttgaaagcaattattattgctactggttcagaagtttctttagcaatggaagcttatgctcaacttgaaggtgttcgtgttgtttctatgccatgtgcagaagagttcatgaaacaagatgctgcatatcgtgaagcagtattaccagctcatattcgtgcacgtgttgctgtagaagctgctcatgttgactactggtggaagtttgttggtcttgatggcaaagtaattggtatgacaacttatggtgagtcagcaccagcaaaagacttgttccaattcttcggtattacaactgaggctgtagttgctgcggtaaaagagttaactgcttaa

SEQ ID NO: 44939 - DNA, 561 bp, Acinetobacter baumannii
atgaatttacttctgattgtggttctgggcgcgattgttgaaattgccgtatggattggcgtagcacagttcatcagtggatggtatgtgtttttctggttcattattgctttctttattggtctaacgcttattcgtaatagtacggctggtattatgccgcaattacaacaaatgcagatgactggacaattgggtaatgatccgactgtgactaaaaaattagcttatgcttttgctggttttttattaatgttgccaggtttggtatcggatgtattagcgctcttaattcttattccgggcgtacaaactgcgtttcgtaatattgcaatgagaacactggcaaaacgtcagcaagccatgatgaacaaaatgatgggcggcatgggtggtgcaggtgctggtcaaaacccatttgcagatttaatgcgtcaaatgcaggatatgcagaatcaacaaggtggtggtagccaatatcatgattctagtattattgatggcgaagcgagagaagttactccagaccacaagaaaattgagcataaaaataaagattaa

SEQ ID NO: 44940 - DNA, 774 bp, Acinetobacter baumannii
atgaacgacttaactgttccagaaaaactagcgaaacttcgtgaactcttgaccaatcaaagtattgatgctctggttgtcatgagtgcagacccccatatgtctgaatatttaccagactattggaaagcaaggcagtggttaagcggttttagtggctctgttggcactttagttgtgacccaaaactttgcaggactctgggccgatgggcgctattgggtacaagccgaacaacaactcgctggaactggctttcaattacaaaaactgaccagtgatgaatcttctacacatctcgcatggattgagaaaaatctatcggctggttcggttatttcagtaaatgggcaaacactttcaatccagcaatttaaagcgttggaaaatacagcaaagcaacgtggctttaagcttgaaacacagcaagatttaattgattcgatctggtctaatcgtccagaacttcctttagagcagattcatttaatgcctgaagggttaaatgccctatctcgtaaagaaaaaattcaggcaatacgcgaaacattagaaactaaagcgattgaaggacatttcatttcatctttagatgatattgcttgggtcttaaatgcacgtggacaagatgtagaatacaaccctgtattcctttcgcatttatatatcagtactcaacaggctgttttattcattgatagcaacaaagttgatttaaccactcaacaggctttcaaagctgatggcattgagattcgtgactatcaagattaa

SEQ ID NO: 44941 - DNA, 2733 bp, Acinetobacter baumannii
atgtatttaaataacttgaaatatgtaggggctttaaaaaataagcgctcatttatttttgtatttgttgcactgtttcatccattaaaaagctatgcgcaagaaaccgtagagcaaacacaaaaccaagctaaaccagataaagtagtccgtgttgcggtgacaggttctcggatttcaaaagcacaaaaagatggcccgactagtgtgaccgtcattaccgcagccgatattgaaaaacaaggttttagtaacgcatttgatgcactcaataacctgacgcaaaacactggttttgtgcaaggtgccgattatggaaatacttttacacctgcggctaatgccattagcttacgaggcttaggacctaatcatactttaactttaattaatggacatcgggttgcagactatcctgtaccgtacgacggttctgtcaattttgtaaatttagccaatattccaactgctattattgaccgtattgaaatattaaacggtggcgcttctgcaatttatggttcagatgcaattgcaggcgtggtaaatattattctaaaaaagaaaacagatggcacacaatttaatattaaggcaggtggaaccaaagaaggtggtgaaaatttacgtttacaactaagtggtagtaaaactttagacaagcttagtctcgtttatggggttgaactcagcggccgtgaaccgatatgggcagccgatcgggattttatgaagagccgaactcgtttgggagaaaaaccagacacgattgtgggccgtaaaaatgctgatactggtaaatacctttctattggtggatgtcaggcctttaatggtttatttaacggatcagtaaataatattggacaagcaggggcggacaattgtgccagtggtttggcacggccaacttattggacggtacaaacccaaaaccgcagccaaaatggttatctcggtttagattatgagttaaatgataaaactcaattatttgcagattttttgattggggcaaaccaaattgaaaataatacccgtagtccgatatggacttctttagctgcaacgagtggttatttcctaaatcaagattcgggaaattatgaaatttggaattgccgttttgcacctgaagaattaggtggggtagaacgaataaataaaaagtggaaagaactttcttcgaacttaaacttcggaattcgaggggatattggagaaacgagctggagttatgaagcagcctataatggttccatttatactagtcagctacgccgccaaggcttattacgttcgaatgttgatgaatatttcttaggtcagcaacttggtacagatgcagatggtattcctatttattcacctcacttagatcgtttaagtcgaccattaacagcaagtgaatttgaaagtatttcggggacaacaaaagaaaaagataagtcgtgggcgcaaagtttgaccctaagtgcgaatggtgacgtatttaagctacctgcaggaactgccaaacttgcgactgtggccgaaattgggcgtcaaggtttttcgattaagccagatcaggcagttgaaaatggtgagttttataatacgagttctagtggagaatatagtggtacccgtacacgccaagcacttggtgcagaattattcttacctttagcaaagccattaaatttaaccttgtccggacgttatgaccgttatgctttgtcagataacagtattgataagctaactttcggttcaggccttgagtttaggccacatccgactttattggtgcgcggtaactacgcaactagttttcgtgcaccagatatgaactatctgttcttaaataagcaaaaaggttatttcgcaagtacgactgactatttacgttgtagccaaacgggacaacctttagataaatgtagctttaaagattacgcacctggggcgaactacactttaaccggaaacaaagagctgaaacctgaagagggtaaatcttatggtgcagggtttgtttggtcgccaaccaataaatttgatatcagcgtcgattactgggatatcaaaattgataatcttgtgaccaacttaagtgcggacaaaattctacgtttggaagcagattgtcgtttaggcaaccaagatattaactctgcagcctgtattgatgcattagcacgtgtggagcgtaaccctgcaaatgcagttgtcgacccaaatgtgattaagaatataaatatcgttccgattaatgctgcatccgaccatacccgcgggattgatttcactagcagatggcgctggaaaacagacagctttggtaactttctctggacgatcaattatagccgtgtactagaacatgaatatcaacaatcaaaagatggcgagaaagatgactatttaaaagatttaagtattccggattggcgtgaccgttttaatactagtctcagctggagctttggtgattgggcatcaacagtattagttaatcgttatggcaaaattccaaacggcgaccaaactgcttacctaagtccaacgtatttggtgaattggagtggtacttatcaaatctctccaaaagcttctgcttcaatcattatcaataacttgtttgacaaagtgaaacgagatgacacaggcggttggccttattatccagtaggatcatattcaccattcggccgtcaaggttggttggagtttaactataaattctaa

SEQ ID NO: 44942 - DNA, 2376 bp, Acinetobacter baumannii
atgaatcaaaccattgacttaagggtttctaaaaaatcagctaaagcaggcgactcgattccacacgaaagtgcacatttacatgtgactgggcaggcaacttatattgatgatttacccgagcttgaaaatacactgcatttggcagttggattttcaaattgtgccaaaggcaaaatcagtaagtttgatttagatgcagtacgtcaggctgagggtgtttatgcagttttttcggcaaaggatatagaggttgaaaataattgggggccaattgtaaaagatgacccaatttttgccgaagagcaggtcgaattttatggacaagccttatttgtggtcgttgccgagagttatcagcaagcccgtcaggcagttcgcttagcaaaaattgagtatgtgctcgaaactccaattttaacgattcaagatgcaattgaaaaagaatcgtgggtgttgccgcctgttgaatttagccatggtgaagttgagcaagcatttcaaaatgcagcccatcaactttcaggtgctattgagctgggtgggcaagagcatttttatcttgaagggcaaatttcctatgcgattccacaagaaaatcagagtttaaaagtctattgctcgacacaacatccaaccgaaatgcagttactgatttgtcatgcattaggcatgaatatgcatcaggtcagcgtggaaagtcgccgtatgggtggcggttttggtggtaaagagtcacagtcagcgcagtgggcatgtattgcctctttggcagcacaaaaaacgggccgtccgtgtaaattacgcttagatcgtgatgatgacatgagtgctacaggcaaacgtcacggttttgcttatgagtggtctgtggcttttgatgacagtggtgttttgcaaggcttaaaggtacaactggcttcaaactgtggttttttggctgatctttctgggccagtgaatgaacgtgcgatttgccatattggcaatgcctattatctaaatgcagttgagctacgtaacttgcgttgtaaaactaatactgtttccaatacggcatatcgtggttttggtggaccgcaaggtatgtttgtcattgaaaatattattgatgacattgcgcgttatttaggttgtgatccagttgaaattcgtcagcgcaatttctttgccgagcagcccagtgccggacgtgaccgtatgcactatggggcagaagtccgtgataatgttgcgccaaaattggtagccgaactattgcaaagtagtgattacgcgaagcgtagacagactattcatgcctttaatcagaacaatgacatcattaagcgtggtattgcgttaacaccattaatgttcggtatttcatttaacgccgtgcattacaatcaggcaggtgcactggtctatgtgtacatggatggtactgtctctattactcatggcggtacagaaatgggacaggggctatataccaaagtacggcaggttgctgcacatgagttgggtttaccaatcgatagcgttcgtttaattgcaaccgatacttctcgtgtgccaaatacttcggcaactgcagcatcgagtggcgcagatctaaacggtaaagctgttcaaaatgcctgtattaaaattcgtgagcgtctggcaaaacttgcagccgaaataagtcaaagtgaagctgaccaagtccagtttgaagatagtatggtttcaacagcgaatggtcattcatggacatttcctgacttggttcaacgggcatatatggcacgtgtacaactatgggatagtggtttttataaaacgccagaaattcactatgatcaggtcaaccatttggggcgtccatttttctattatgcctatggtgcagcggttagtgaggtcgcaatagataccttaactggggaaatgaaagtattacgtgccgacattttgcatgacgtcgggcggtcaattaaccctgcaattgatattgggcaaattgaaggcgggtttgttcaagggatgggatggctcacgacagaagagttgtattggcagccgcagggtccacacgcaggccgattatttacccatgcaccttcaacttacaaaatcccgaccagtgtggacattcctcatatttttaatgtcaaactgtttaataatcaaaaccaggcagacaccatctatcgctctaaagcggtaggtgaaccgccatttatgttggcattatcggttttctctgcaattcgtcaggcagtacaggcggctattccagaaaatgcaccgctcgtactcaatgctccggcaactgccgaggaaattttacgtgcaattgcgattggacgaggacaagatttggctgttcgcccacaggctaaaatgtag

SEQ ID NO: 44943 - DNA, 564 bp, Acinetobacter baumannii
atgcgaaatgtagttctcccaacacgtgccttatacgttgtaaataaagcgattgatctgtttcaccatcgtggatttcaccttattggggtcgacagaatagtgagagaatcagagattacaaaagcgactttctataattattttcactctaaagaacgacttattgaaatttgcctgatggtgcaaaaagaaaagctccaagagcaagtagtcgcaatggtcgagtatgacttaagcactcccgcaatcgataaacttaaaaagctttattatttacataccgatatagaagggccgtattacttattatttaaagccgtttttgaaattaaaaatagctatcccaacgcttatcaatccgcagtgcgctatagaacatggctcaaaaatgaaatttatagccagcttagattgcttaaacccgatgtctcttttaccgatgccaaactatttttatatatggtggaaggcacaatcattcagcttttaagctctggtggggtaagcgagcgggagggtttgtttgagtgttttttaagaggtctaactacatgcaaatga

SEQ ID NO: 44944 - DNA, 1404 bp, Acinetobacter baumannii
atgcaaaaaaaactgccaataccagataacttaccaaatcatttaacggatattttttatcacatcaatataagcttgcctaaaggcgatttaaaagaaactgtaaagttagatgaagctataaatcaacttaacgcaagggatgtatatgctttacaggattatcctctgcataatttatctgaatatgcgggttgggctattaattcagaaataactcaaactgcgagtatagaaagccctttattcattgccaattggtactactgggggcaacagctttatagatctattaatccgtataaattagacctaaaaacttcaagtttgttagaaattcctgcttatacaaaattaccagagtctttagattcagtcattgctgaacaagatgaaagacttgatctttctgacaccgatgccaaaaagattactggccctatctttgccatgcatggtgttattcctaagggcagcatatttaaacaaggcgatgtgattctaaaaaaagatgagaggttaactcctgaaaaactaattatcttaagacgggcagggatcaaagaattaactatttataaaaaaccaaaaattcttattgtaagtatgcattcttttgataaagaagaaatgagtgaggaaagtctgtatgttaaagatgttttgaaaacatggggctatgagcaggtagaaatcaaatcacttaaacctgaacgttacgatgctgcatttaatagtcttaaaaaagataataattcggctttagatgagtcattaacgacaagcagggacgattatataaagttctttgaagaacagactatgaattttgatgtcattctttgttgtacatatcaaaatagtcgttccgctttatttcagcttgagaaacttccgatctttgatcaaagcagtatgtcagcggctttgaatactcgttgtatgcctggtaatgaaattaaaattctcaagggtaaagatagaacgccacctagtcgtgagacagttcagatttatgatgagaacggtaatcacaaaggtatgcgtgtagtcgttacagaagacaaagcgactattattaacttaccgggtgatatccaagatattgtgattctgatgcatgcttttgtgaaatatattttaaataaacacatctcagacttttttgatcatgcttatttcaaaggtaaaacggacatagagattgttcctgatgcaacaaatagaaaattgttatggggtcattacaaggctcacgaaagtggggaatatatattagaaattattgaacagcagccatatcaaatagagccacctcttagtgcaaattgtattgtaatggttccgtttcaagaaaaagtaattgccaaaggcaatgatttatattttatgaaaatagattga

SEQ ID NO: 44945 - DNA, 627 bp, Acinetobacter baumannii
atgaatacaatcactataaatgatattgccaattggacaattatttttggttactcctctatcacaataattgcttttattatgacttttgtaggcaaaggagagagtaaaaagaagagagctttttttaaagaaagtattttaaataagcacaaaaacaacattaatattgatgctgatgaatttatgagaatgattgagtcttctaagataggtaaattgacagctgaacaagtcctatcagagctattattagaagcctctacaccagaagaccataattattattcacaactggtacggaaacttgaaaagattgaaccatttggaactctatctaaagatatgcgtactattttagagcgtctttacctaataactgaaaattcaagctcagagtcagataagcatttattaattcctattcgaaatgctcttgaaaaagctgatcaaatagaaaccgaacagaaaagaactaaaaagattaatttcatgttaactgtagtaggactaataagctttgctttgagtattggaggcttatatgtttcattaaaaagtccttctaaagaagatatagcttctataatgaaaaatgaacttcaaaatattaaaaaagtgcaatga

SEQ ID NO: 44946 - DNA, 468 bp, Acinetobacter baumannii
atggtagtaggattagccgatgtcatagcatttttagccttattagtttctatatttgctctttatcaaaatcataagactaatcagcgtcaagctagattaatggagatggagataaagttgaatcaattcttaattcaaaaagaggaagatgattttatttctaaacaaacagcggatattaaagcccgttactttaaaattggcagtaataattatcgcttaagaatatggaatgatggattaggtgaggcaagaaatgtatcactttcatttgcgaatacttatttggtcccgttactacaagatgatgttgatagtaaatttcccttaaatcttgattctaagcaatcagttactctcttagcttcagtatcgtttgatacgcctactaaacattcgattcaggttagttgggatgatgatgttaagaatggaaactctaaagaattaacgttaactctataa

SEQ ID NO: 44947 - DNA, 270 bp, Acinetobacter baumannii
atgaaaatgaaaaaaatgagacggacgatagttatgaattgtcctgtttgtgctgatactttacttaaacataatgaattaacagacttattcatttgtaattcttgttctgcagaatttggtagagaagaactactagaagctaattctgaaagtattgatgcacatactaatgaaatagcaaataaggctattaaagaagcaaagcaacatcttcaaaaagaaattaaaaatatttttaaaaatagtaaagtttttaaggtgaaataa

SEQ ID NO: 44948 - DNA, 636 bp, Acinetobacter baumannii
atgatcgaaaaagaattcaaagttaaacactatattgcacttggcctgctttttattgctattatcatttcaggtattcaaccacttgagtttgaggcctatttgcttcatcaagctggcactgtttttatggtgattctgctttttattattttcaaaaaaattggactcgatttcttaagttttactttttatctactgtttttattaatccatattattggtgctcactatctctactcctacgttccatacaatgactggatacaacaggtgttccatttcaacctagatcaatatatgggctggtcccgcaatatgtatgatcgtttagttcatcttgcctatggtgttttgctctacccacttatttatcgtgtattccaagtatggttacccactgcacgtcctttttctttattcttacttgtagtccagtttgtgatggcgtctagtgttttttatgaactgatcgaatgggtaattgcaatcgggctatcacctgaacaagctgaaaattataatgggcaacaaggtgatatgtgggatgcacataaagacatgttactcgctacaattggtgcaatcctctatgggctaatcgctcttctcacaacaccaaaaatcaaacaataa

SEQ ID NO: 44949 - DNA, 171 bp, Acinetobacter baumannii
atgtcttctttatattttatgcaaacaaactattcatactttattgttatatatataaataattatttagaagatttttatttttcgctttgtataagttttttagtctctaaattaatgaagtgtagcgataccaaatatgaacttggcacagcaattgctaaagcttaa

SEQ ID NO: 44950 - DNA, 1275 bp, Acinetobacter baumannii
atgctaaaagcacaaaaacttacattagcagttctcatttctgcggcaataatttcctcagctcaggcaagcgagcaaagtgaggcaaaaggatttgttgaagatgcgaacggttctattctcttccgtaccggttatatcagtcgtgataaaaaagatggaagggctgacaatagctcatttgctcaaacggcaattgtaaatatcgactctggctttactcctggtattgttggtttcggtgttggcgttgttggtgacggctcatttaaaatcggcgaaaataaaaacgctggtaataacatgattccacaacataacgatggttcagcttacgatcattgggcgcgtggtggtgctaacgtaaaagcacgtttctcaaatacaacagtacgttatggtactcaagtgctcgatttgcctgtgcttgcaagcaacacggctcgtttagtgcctgaatatttcactggtactttgttaactagtcatgaaattaaagacttagaagtggttgctggtaaatttactaaaaaccaatattctgaccaaattgcaactgaccaaaatggtttagaccgcgctgtggtttggggtgcaaaatataagtttgacgatcaaatcagtggttcttactacggtgttgatgtaaaagataaacttgatcgtcattatgttaatgtgaactacaagcaaccccttgctaatgacagctcacttacttatgacttcagtggttatcatactaaatttgataaaggtgctaatctttcgtacgcgactggcccagctgatgaagacaaaaccaataatatttgggctatttcaggaacttatgcgactggtccacatagtgtgatgttagcgtaccaacagaacagcggtaatattggttataactatggtgtaaaccaagatggcggtcaaagtgtttacttgccaaactcttatttgtctgacttcattggtaatgatgaaaaatctgcacaaatccaatatagcctcgactttggtaagttaggcgtattacctggtttaaactggaccacagcttatgtgtacggttgggatatcaaaacatctaacggtgcagacgactcaaacgaaagcgaattcttcaaccaagtaaaatacacagttcaaagtggttttgctaaaggttcaagcttacgtctacgtaattcgatctaccgtgcagataatgcttatactacagactatatgcctgacactaatgaatggcgtatcttccttgatattcctgtgactttgttctaa

SEQ ID NO: 44951 - DNA, 2838 bp, Acinetobacter baumannii
gtggaaaaattgcagcagtatgctattggtcaacgttggctatcagatacagagactgagctcggtttaggcgttcttattgatgtagatgaaagatctgtcagcattttattccccaagagcgatgaaacgcgtgtttatgcacgcaacaatgcaccgctttctcgcatcatctttaacgcaaatgatgaagttcaagaccaagaaggcaataagtggaatgtcgagtctattgaagaccgtcatggtgttttgcgttataacgtggttcgtactttagaaaatggcgagcaagaacgtaaagcgctaaacgaaacgcgtattggtgcacaaattcaattatcaaaacctttagatcgtttgctggcaagccagattgattataaagagtggtatgacctacgcattgaagcaatgctgatgcaggcgcaaatgcaaaccagcccattacgcggcttggttggggcgcgtgtgggtttaattccgcatcagctctatattgcacatgaagtcggtaaacgtttcgcaccgcgtgttttacttgctgatgaagtaggtttaggtaaaacaattgaagctggtttaattatccaccaacagcttaaaaccggccgttctgaacgtatcctgattttagtccctgattctcttcagtatcagtggatgattgaaatgcgtcgccgtttcaatttgcaattttctctgtttgatttaacccgtactgcatctattaaagaacatgatccagaacttaacccgttcttaactgagcaatgcattattgccagcgtcgacttgatggtggaccatgacgatttgcgtgagcaagcattagaagctggtttcgatttactcgtcgtcgatgaagcacatcacttgatgtggagcgaagaagagggtggtaacgatcgttacgacttagttgaagagcttgctgaaaatacggcaggtgtattgttgcttactgcaacgcctgaacagctgggtgtggaaagtcactttgcgcgtttacgtttgttagatccacagcgctttagcagtttagagcgtttcttggatgaagaagcccaatatcagcaaactgcgcaagttgcagaagtgcttatgtcggatgagcctttaactcaagagcatttatctgctttagaaggtttgttggggcattcaattgaagaccaacctgagcaacgtttcagagcgattcacgagttgttagaccgtcacggtacaggtcgtattttattccgtaatacgcgtgaagcgattcaaggcttccctggccgtgattgccaacctgcacctttacctgcgccagcagattggtcaaaagacggtaaattacgcgagcaaatgtggccagaagaagcacaaattgatggctcatggatgcaaaatgatccgcgtgtaccgtggttaatggaaattctacgtaaagaacttaagcataaaaaagttcttttaattgcccgtagtggtcctgttgtcgagtctttagaaagtgcgcttcgtttgcatgcaggtattcgtacagccatgttccatgaaggtatgagtttgcttgagcgtgaccaagcggctgcttactttgcagaagaaagctacggtgctcaaatcttactttgttcagaaattggttcagaaggccgtaacttccagtttgcgagtgatttaattttatttgatttgcctgcaaaccctgacgttttagaacaacgtattggtcgcttagaccgtattggtcaagaaaaccgtatccagattcatgtaccttacttaatgggcaccgctcaagagcgtatgttccgttggtataatgaagcattaaatattttcagcaatatttctccaacagctcaaacgctacaagaaaactttattgttgaattaaaagattgcttgcttgccgaccaaggtcaaacatttgaagatttactcgaagaagttaatgttcaacgccaagctttagaagcagagttacaagctggtcgagatcgtctgcttgagtacaactcatgtcgtcctatcgttgcacaagaaattgttcaagcgttagaagactatgatgacaacacaacgctgcctatgtttgtgaagcgtttcatgtcttcaactaatattgactttgatgagcaaagtaacggtacagtcattattcgtccaaccgaccagatgcaagtgcaaggtttggcattagatgaagaaggtatgactgcgactttctatcgtgaccaagcgcaaatgcgtgaagacgctcagtatctaactttagaacatccatttattgaaagtgtcatggaaatgatccgtacacaatcatttggtagtaccaatgttgctgtgcttaagtccaatgcattaaagcaaggttcggttttacttgaagtctggtttaaagttgatgtggtggcaccaaaatccttgaacttgccatcaagcttaccaaaacaacttattcgcgtattgttaagtgaaaatggtcaggacttatctgaaaagattgatccaaccattttaaaaccgtatttgcatcatttagatggcaatagctgccgccaagtggttaaagcccgccgtgaagtgattgaagagcgttataaacaagcgcttgatattgctaaagaaggtttacctcagcttcaacagcaagcaaaagagcattatggtaataaatggcaatatgagattgatcgtttaacttacttaaaacagttcaacccgagcattcgccaagacgaaattgagcgcttacagaagttgcaaaaagaaggtttaagcttgcttgacggcttaaccgtaacacctgaagcgattcaagtgcttgtagtagttaaaccataa

SEQ ID NO: 44952 - DNA, 465 bp, Acinetobacter baumannii
atggcaaccacattagaactctggaataaagtaacggcttttcctaaaggcaagtggactttctctcgtatgctgtgcttaaaagcaccttatttcggcagtatttcccctctttttattgagttaaaaccgaattattgcgaaatttctattaagaagaagcgttctgtgcttaaccacattggaacagtccatgcgattgcgatgtgtaatatggctgaactggccggtggaacaatgacagaagttactgtcccatctacccattgttggattccaaaaggaatgactgttgaatatttaaaaaaagctgaaacagacttaattgcaattgctacaccagtggaagctgattataactgggaaaaagctggagaatatttagtcaacgtagatatttacgacactcacaaagataaagtatttcatgccacaattaccatgtggatttctaaaaagaaataa

SEQ ID NO: 44953 - DNA, 633 bp, Acinetobacter baumannii
atggtatctgctcaaaatttattagaacgcttatatcctggaagaagagctgctttaaaacgacaaatattattagatgctttagactgttttttagagcagggcattgaaacgactagtattgaaatgattcgtgccaaatcagaaagtagcgttggggcgatttatcatcattttaaaaataaagagggtatagttgcggccttatttttttcagctttagatgatcaaacagctctgagagatgaatatttaaaacagtccaaaacattaaaagatgttgtagaagctctaatttatagttatgtggactgggtaagtgagcaaccggaatttgcaaaattcttaattactgcacgttttaacattatagagggggaggaacagcagcaacttgcacaaaaaaataagagtagaaaccaaaagatatttagcttgatttcaaactttgaagaatttaaagcatttagtttaattccacatgaacttttgctttcattagtgattggttctacagagagctattgccgtgcgtggttatcacaacgtgtaaaagctgaccctaaagactatagagaaattctggcaaaagcggcttggaattcattacaggatttgcgtttagaacattaa

SEQ ID NO: 44954 - DNA, 1431 bp, Acinetobacter baumannii
atgcaacaagcgaatatgcttaatgaatttaaacttattattggcggtcaactttgttcaggtgaacaaggtgaactggaaattattaatcctgctactggcttaactgcggcacgttgtgcaaaagcatcagttgcacaagtgaatcaagctgttagtgcagctaaacaggcttctaaagcttggcagcttgtcccgcatgatgagcgtaaatcaattttaaacaagattgcagacggtattgaaaagcacgctgaaatgcttgcagagctggtggtgcttgaacaaggtaaaccactagcactggcacaaatggaagtgcaaggtgcaattggctggacgcgttatgcggcttctatggatttaccggtagaagtaattgaagacagtgaaactaagcgtattgagcgccatcgccaaccattgggtgtagtggcttcaattacgccatggaactggccactcatgattgcagtttggcatatcatgcctgctttacgtgcaggtaacgttgtcattagcaaaccttcggaatacacaccattatcgactttacgtttatgtgaaatcattcagcaagaagttccagcaggtgtgatctcaattgtggtgggtgctggtgagattggtgaagcattatcttctcatccagatgtgcaaaaagtcgtgtttacgggatcaactcgaacagggcagcacattatggctggggcagctcagcagctaaaacacttaactttagagcttggtggtaatgatgccggtattgtattaccagatgcaaatatcaatgaaattgcagctaagatttttaatatggcgttcttgaatgctggtcaaacatgtgcggcgttaaagcgtttatatgtgcatgaaagccaatatgaagctttatctcaaaagttagctgatattgccaacgctcaagttgtgggggatggtatggcatcttctacaacatttggaccattacaaaaccagatgcaatataacaaagtgaaagctcttattgctgaagcgattgcacaaggtgcaaaagcactttctggacaacaacagctaccagagcagggctactttattgcaccaactattttgactgaagtttctgactcttgccgtgtggtgcaagaagagcaatttggtccagtgttgcctgttttaaaatataccgatatcaacgatgctattgctcgtgccaatgacagtgagtttggtttgggtggttcaatttggtcttctgatcttaaagctgcacagacctatgctacacagcttcaatgtggaacagtttggattaatacccatgcagaagtactgcctcatgcacctttcggaggctggaaaatgtctggcttaggcgctgagtttggtttggaaggtttgcttgaaaatacgattggacaaacggtccatattagtaaagtctaa

SEQ ID NO: 44955 - DNA, 1380 bp, Acinetobacter baumannii
atgaatctgctacttatcggtgtgttgttagcccttgtggcaattgcatatcaacttgggctgagaaagagccgccacctagcaggtaagggaagcaactcggcgacattacattctcgtcctggttattatggcgcactggttgggctttggtgcggtatccctgcttttttaattttgatcatttggaacttggttgagccaagtattttaaatcatattatctttaacaacgtacctgcttctgtgacagcttctctagatgaagcagcaagaagtgtacttgttgatcgagttcaagcgatcgcttctggttttggggtaagtgatcatcccgcggcttatgagttggctgctgctcagcaatatgcaaaatttcaaactattggctcttttgccaaatttgctgttgttgtctgtgccgctttgttgggcttagtgtgggcaaagaagaaaatcagccaagaatatcgcgcacgtaaccaagttgagcgtgcaattaatgttggtttgatcttatgttctggtgttgcaattttaaccacgatcggcattgtaatgtcgatgtttggtgaggcaatgcacttcttccattttgtaagtccaatcgactttttctttggtacagaatggaaccccggctttagtacttcaggtaatgcagagggtagttatggtttattaccattactatggggcacgctcatggtcagtggtattgccttattagttgctgtacctgttggcttaatgattgctatttatttagctgagtatgcttcgccgtggttacgctcatgggcaaaacctaccattgaagttttagcgggtattccaacaatcgtttatggtgtttttgccatgatgattattgggccattctttaaagctgctggtgcgtatgtcggtattgaaattaatgcaactagtgctttgactgccggttttgtaatgggaattatgattatcccattcgtttcatctttgtctgatgacattattactcaagttcctcgtgcacttcgtgacggttcgttaggacttggcgcaaccaaatcagaaacgattcgccaagtggttttaccggcagctttaccgggtattacaggggcatttttattggctgtttcgcgtgccgtaggggaaaccatgattgtggttttggcagcagggaacagcccacttctacatgcaaatccgtttgaagctgtttcgacagttaccgtaaccattgtaaaacagttaacgggtgatactgattttgcgagcccacaggccttggtggcatttgcactgggattaacactctttgtgatcactttaggattaaacattgttgcactgtacattgtgcgtaaataccgtgagcaatacgaatga

SEQ ID NO: 44956 - DNA, 219 bp, Acinetobacter baumannii
atgacaagaataattgtagcatccaaagagggtttggacgttctgcaagatggtcagctcaataaggtggttttaaaccaacctactattattcaaattggtgtaagtcaaaaagatatcgcatcgatggaaaagcagggtggaagtctagtcatccatttaaaaaatggagaaagagcctgtaaattattttgtgtaagttccattttttataaatga

SEQ ID NO: 44957 - DNA, 381 bp, Acinetobacter baumannii
atgaaaaaaataattttagcgagcgcaatgagcggtgttgttttattactaggtgcttgtgcaaccacgcctaaaaacactttagcgattcaaaaagaaaataatcagtttgaagtgactggaattggcaaaaccaatttaattgcaaaaaataatgcggttactgcggcacaaaaaacatgctctaagagcacaacaccagttattgttgatgaaaaaacgtcttatcacggggttttaaaagatgtggtaagtgaaaagactggtcaaatggtagaagctgctgcgggtgtcatcggtactttaactggtaaaaatgcatctttagcaaaagatgatgactatcaaacaacgcttaccttctattgtaaaataaattaa

SEQ ID NO: 44958 - DNA, 1002 bp, Acinetobacter baumannii
atgaaattacctaaacctattaagcgtgggcaaacgtaccgtattactgtgacctacgaaaacaaaagatattcatgcaccagagacacagaaaaagaatgtgaacaatgggcagcaatgaagttgcttgagttgaaatctggaaaagttcaagaagaaaaggggataaagacaccttatccttttaagatgctttgcgaaaaatactatgcagaaaagggaattaaattaagatcaaagcatgtcattagaaataagctggacaatctggaacgtattgttggtgaattggcatctaaatcaatatatgacttcaagccaagcgatatagctaggtggcgaaataaaagggtacttgaagtaaaaaatggaaccgtcttatatgagttctctattttttcctcaatatttacctatgctcaaaaggaattatttttaattgaatctaatgtctggcaaaacgtaattaaacctgaaaaggggaagagccgaagccagcgtattacttttgaagatcaggaaaaaattctacagcaagctaagtgggataagaataaccctccaagattcgtaaagcattatgtatgctgggcaatgctgtttgcacttgaaacagcaatgaggcaaggcgaaatacttggtatgcggagagaggacattaaagatggctttgtccaccttcctatgacgaagaatggcgaggctaggaatgtgcccttgtctaaagaagcaaaaagacttttatcgttactgccgtcaaacactgatattttactgccggttaaagctgaaacttttaaacggacatggataaaaattcgtgatgctgctgatttgaagcatattaactttcatgacacacggcatgaagcaattacaagaatggtaagggaaagaaaattaccggttgaagtactagctaaaataacagggcataagactattggtattttaattaacacttactacaaccctaacgcccaagaccttgtaggggcgtag

SEQ ID NO: 44959 - DNA, 2526 bp, Acinetobacter baumannii
atgaaagaacaatgcaaacaagcggttgctaaagcacttggcaagcaaaccttatcagctcaagaagctactgatatcgaagcacgtattaatgaaacgatgcgaaatcttgcacgcaaagatattaataactggcgcaacctttccgatgcagaaaaattaactgaggcatcaaagcaagttgctaccgatattcaagaccagcttaaacgtaagcataaaattgctgctcaggatattttaaaacaatcccaaaacattgcagctttagaccatggcaaattgtcatcaatggaagtcatagaccgtatggttgcagctcatggtgatatgtctggcatccagtcaatcgactctaaagcacgtgggattgcctcaatctatcgaggtgagttggtagatttctatacgaatattaaaggcggcttgggaatttttacagaccaagagttagtgcaaaaaattgttcgtgagcgctttggtgaaaacactggcgatgcattagctaaaaagatcagtgacaagatgggcgatgttttcgaaaccatgcgtgaccgatttaaccggaacggtggcgacattggaaagttagacaattggggattgccacaaacacataacctagaaaagatcgctaaagcaggaaaagaagcgtgggtaaacaaagctgaatcactaatcgacacacgccaatatgtgcatgagaacggtgattactactcacagcaagaaatacgctcattgcttgaatatacctatgacactctatcaagtgacggtgcaaataaaattgaagttggccgacaagctacaggtggcggcacatcaaaagtaactaaccgtcatggtgaaagtcgtgtcttgcatttcaaagatgctgaatcatggctagaatatcaatcagagtttggcggcatgcaatttgttgatctggttgaatcacacattaatggcttatcgaaagatattgccatggttgagaacctaggaagcaatccaaaaacagccttaaaaatcttgatggatgcagcttcaaaaaaagattgggaaaaagggatagaagcgaataaaactaatagtagccgtaaacgcgcacaaaccatgtttgatgagtttagcggtggtaattcgccacaatctgaagtcttggcaaaccttggccttgcatatcgttcgatgaacgtcgcgtcaatgcttggcggcaccacaattgcatcgattgcagatcaggcaaccattgccaaaacagcaagtgtgcataacgtggcttatcgaaaagcatttggcggcctgttagagcaacttaaccctgtcaataaagcagatcgagagcttgcacatagtttggggcttgcaactgaggaaatgctaggctctattgcaagatggtcagacgacggtcttacatctagttatggaaaatctgaaaaattggctcgtatttctagcggtgttgcaactcaagtgatgcgtatatcacttttaaatgcacttacgtcagcatcaaaagtaggttttaccaagctacttatggagaagtacggacgtttaagccgttcaaaagcttggaatgatttagacatacaagaccgggaattactttcaaacactggcctagatgagcgtgcatggcaagttttccaattagctgagccagttgttgatcgcaagggtaatcaactcatgtcggcgcgttctatctatgaaattccagatgaaaaattagcagcgttcggtgatcctaaacaggttaaagatcaagtagcctcacaactacaagcgcatttacttgatgagcagggcatggcagtaattgaagcagggcttcgtgaacgtacatggatgactgtaggcgcaaagggaactatcacaggggaggtatttaaaggcttaatgcaatttaaatcattctcggcttcattcttgatgcgacaaggtagccgcacaatggcgcaagaaggcttaaaaggcaaggcagcgtatgcaataccacttatggttagtatgacgttattaggtggtttagtagtgcaactacgtgaaatcctaaacggcaatgatccacaaaccatttatgatagtaatgaccctaaaaaggctacaagcttctttatgcgctcactagttgctggtggtggcttgcctgtactgggtgacattcttgttgctggtactgacacttctggtcgtgatgcaaactcgtttgtatctggtccacttggtagtgatttcaccgctctattaggcttaacggttggtaacttaactcaatacaatgaaggcaaggacaccaatttcggcaatgaggctttcaaatttgtgaaaggtaaaataccagcacaaaatttatggtatacaaaagcagcaattaaccgaatgttctttgatgaagttcaagacactattgcacccggctatcgtgagaaggctttgcgtaaagcagaacgacaacaagaccgcgagcgtttctggggtgatgatgttaccgatattcgtgcacctgactttgagagggttgtgaaataa

SEQ ID NO: 44960 - DNA, 144 bp, Acinetobacter baumannii
atgaaaactttaattcttgcagctattttagctttacctgcaactatgacttttgctggttcatgtgatcatagctggcaatctgctaaagacggttcatcttgtggtgatcgtgcagctgaccgtcgcccaggtggtcgttaa

SEQ ID NO: 44961 - DNA, 309 bp, Acinetobacter baumannii
atgcgtgatgatcaaatagaacgaatcaaagtaatgtctgaggatattgctgaggatatgcttaagacagcatatgtcgctttagaaactccacttgatagtaaacaggctcgtggcgataagggattcatgtataagatcgttaaagatcaggcgggagtcattgcaactattcagcgaattcttgatatcaagtctgggaaaattccacctataagcgcaactcaagcaactcaagaaaagtatgaacagcaacttatagaaaaagctgaaaaagaagctgaaaaattgaaacaacggttaagttaa

SEQ ID NO: 44962 - DNA, 1677 bp, Acinetobacter baumannii
atgtccaaacccaagataagctttttagctttttttctactttgggcagaactacagggctggaaagtcccaacgtttcatattcaggtctgtatcttcctagagaacttttatttaaatgggcgcacggcactgctcatgatgcctcgtgggcattcaaaatcttcaatgctagatgtctttaatgcatgggtaatctactgttggcctgaaacacaaatattacatcaaggtacaactgattcagatgcatataagtgtagtaaaggtacacgtgatgtgcttgagcgtcatccactttgtgcaagcaatcataatgttgcaattagacagggtgaaatagaacgttggttcgtaaatggaaccaatgatgtgcgttacggtactatgctagcaaagggtattttatccggtgttactggtcaccgtgcacactttatccagaacgatgatgttgagacaccacagacaacagccaatccagaacaacgagaaaaattaccaaagaaattaagcgaacaaacacacattgctataccaggcgcaaaaaagctatggattggtacgccacacacttatgactcactttacgaaaaaattaaaaaacaaaagcgagtaagcacatttattctcaagatgtttgaacatgaaaagcgtgttgaaaatggtgaaaagggccaaaaggttttacttgattttgagccaattcactcatttgcagggattggcataggcgctaagtatttaactaaaaatgttcactacacatgcgtcaataagggaagcacatgggaggtaacgcttcttgaatctcactatgtaattgacttttactctaagggtatttgggaagagcgctttactccagctgaaatggagattcgacgcgaggaatgtaaaacccttaatgaatgggactctcaatatcaaatgcacgctaagccaatcggtgatgtgcgtttagatccagataagatcatagcttacaactgtgaaccggttcttaaacgagctaatagaaccaccatgtttatgattggtgagcgtcaaattgttggtgcaactttccgttgggatccatcatcaggaaagcttaagtctgatatttcatcaactgcattagtattccatgatgatataggtaataaatattggcatagatcgatagcacttaagggcgaagtaattgaaaccgatgctgatgggcgcgtaataggcgggcaagtttggcagctttgcaacattattaaggagtttcatttatctaaagtcactattgaaacaaatggtatcggtaacttcgcaccagcagcgttaaaagctgctctaaagactcgtggaatacgctgtggtgtaacagagcagcattcaactaaatctaaaaataagcgcattttagatggtattgaagggcctttaatttctggcctgctatgggcacatgtatctgtacttgaagatgagaacggtgaagattcagcacaagtaaaacagatgcgagaatttaacccagccattactgatcaaccggatgactatttagactcattagcaggtgcaatcgtagaagctcctgaaagggttggtaaaacactcaaccaaacagactatgaagaaacgcctaattggagaacaaacggtggcgtacatgaagccgccttagatttcgaaaattag

SEQ ID NO: 44963 - DNA, 489 bp, Acinetobacter baumannii
atggcagtaccagaacagacgccatttatagaatatacagcgaatggaactactacagttttcccagtcccattccaatgtgacaaagcagagtatttaattgttacccttaacggtgaagaagcgcccgtaggctcatggacactggctaatgatactgtcacctttaatgtggctcctgtaaatggtgtggtggttaatcttcaaaggaatacaccatttcaacggaccacaaactaccaactatatgataattcattccgaccatctgccgtaaacaaagactttgatttaatttggtggaagcttcaagaacttggttatcgtgatcaagttatttggcttgctttgattaaagaaatttctgatcgaattaatggtgatgaagacctgcaaaatcaaataaatactattgacgagtggttgactgatcttcagcagaatgtaaatgaaaatactaatgatattgctcaattaggagcaagctaa

SEQ ID NO: 44964 - DNA, 195 bp, Acinetobacter baumannii
atgtcgcaagtcatgatcatggtttcggaagcgggcaggatggagaatacctgcaatctacccgctgatttagataagaatgggaatgttcttaaaatctatgactactcatttaaagagttgccgattaatttagatggaactgtgacttacaatggcaaaagatggacctttgataagaagcaaagtttttga

SEQ ID NO: 44965 - DNA, 1005 bp, Acinetobacter baumannii
atgttatattcacttgctcgcccgatgttgtttagtttagcaccagagcgtgcccatgaattaacattatccatgcttgataaagcgcataagctaggcatgatgcgccagaccgtagaagcgaagccaactacatgtatgggaatcgaatttcctaatccggtagggttggcagccggtttagataaaaatggtgctcatattgatgcattagctgggttgggtttcggtttcattgaaattggtacaattacacctcgcccgcaatctggtaacccaaaaccacgtttattccgtattcctgaagctaaagctattattaaccgtatgggttttaacaatgatggcgttgataagctaatcgagaatgttaaagcatccaaatttagaggcattttagggattaatattggtaaaaatgctgatacacctgtcgaaaaagccgttgatgattatttgatttgtcttgagaaagtttataactacgcttcatacgttacggttaatatttcatctccaaatactaaaaatttgcgtagtctgcaaagtggtgatgcattaactgaattattgcaaaccttaaaagcacgtcaacttgaattggcagagcaatataatcactatgtacctttagttcttaaagtcgctccagacttaacacctgaagatgttgaatttatttcggcacaattattagattttaaaattgatggtcttattgtgacgaacacgaccttatcgagagaaggggtagagaacctgccttacggtaatgagtcaggtggtttgtcgggtgcacctgtatttgaaaaaagtacggaatgtttacgtttatttgctcaaacattaaaaggacaaattcctttaattggtgtgggcggaattttgtcgggtgaacaagctgcagcgaaacaacaggctggagcaacgcttgtacaaatttatagtggtctgatttatacgggaccaacgcttgtgaagcaatgtgttgaagccatgacttaa

SEQ ID NO: 44966 - DNA, 327 bp, Acinetobacter baumannii
atgtttattgcaaaaaatatatttgtatatttactatcaatgttagctttatgcttactaattattctttttaactatctaggaatgaatcagacactaaatctcatcatttcttcagcgctctttggaatatttattacttggtactacaaaggaagcggactgtgtattgccctttttagctttttttactgggcaatgtttgtgattagtcaaagtttagaagtgatatggatgctgtcgatttcagtaattgtctatttagtcatgacacaaatcgtacctaaactcaaacacatccatatcggtatcgcatctaatagctag

SEQ ID NO: 44967 - DNA, 855 bp, Acinetobacter baumannii
atgctgagtagcctacatcagcccctttcagggagtattggtctatttgtgattaagtcaggtcaatcacccgttaatattgtatttttccgttgccttatttcagcattgtgtttaataccgatttgttacttctatggtcattttagaaaagtatacttcggtaaaaaagaactgtttttaatggtgacttcgggccttctaattatttttaactgggttctattgtttgccgcttttcctaaaacttctatttctttagcgacgattgtttatcacgtgaacccgtttgtcatttcatttttaggggctttggtctttcacgaaaagctcaataaaaatgatgtgctatggaccatcgttgcttttatagggctaatcgtgattataggcttaggcagtgcttcggtgaactctaatgagttagtcggcttggggctggttcttattgccacaacactttattccatatcggtattaatcactaaaaaattaagtaatacaccgcctttattaattgtatttatacaaactctgagcggggcgattgtcatggctccgtttatgtcggtttttgaaaacccgccgatcggtcaacaatggctgtttgtggtcggattgggagttttgcatactgcatttctctactatttaatgtattcggcaattaagaaaatacctttaaataatattgcgatcttatcttttatttatccaatatcgaccatagtgattgattatttcttctttgatcatgtgttgaccagtactcaagttttaggtgcaggtttaattttattaggcgtactgggtgtgaagttgcattggaatatttttgcgttgaagagcgcttaa

SEQ ID NO: 44968 - DNA, 402 bp, Acinetobacter baumannii
atgactaaatcatttattgctttatcttcattatttatagcttcagctacatttgcacaaactaatccactaagtgttcatgtgttaaacctagagacgggtttgccctcttctcaggttgaagtggttttagaaaaaaataccaataaccagtgggttaaactcaaccagcaagtgaccgattcaaatggtcgtattactgcgctctatccagaaaataaaaaactagagcaaggagtttataaagttacctttaaaactgaagactggtttaagaagaacaaacaacaaactttttttgccgaggttccagtaatttttaaagtcgatggaagcgtaaatcactaccatattccgttactacttagcccttacggttattcaacctatagaggcaactaa

SEQ ID NO: 44969 - DNA, 489 bp, Acinetobacter baumannii
atgaaaaaattgaactggctgatgttagcagccatgctattcggtagtagtacttttgcacagccccctgctttgaatcaagtttattcgttagatcttcaaactgcccacctgctagccgacagtgcaaaagaggcatgcaaaaaattaaatcaaaacattgcggttgttgttgtagatcgcggtggtaatccattaactgccgaacggcatgagttggtgggcccgcataacttaatggctgccgagaaaaaagcctataccgcgttatctaccaaaacatcgaccttagttttaagccaaaatagtaaccaaaaccccgatgcaaaaaatttaactaccgtagcaaatttacttttgttaggcggtggcgtacctgtccgttttgagaaccaagtgatcggagccattggggttgcaggtgctggcggcgcacaaaatgacaatgaatgcgcaagcaaagccattgaaaccgtttttcgttcataa

SEQ ID NO: 44970 - DNA, 672 bp, Acinetobacter baumannii
atgcgtatccttattattgaagacgagatcaagatcgccacttatttggtcaaaggattaaaagagtctggatatcaagcggagtgtgttcacttagggctgcaaggtttggaaatgctaaagagagatcaatatgacttgcttattcttgatgtcatgctgccagacatagacggctggagcgtattacaagtcctacgccagttttcaaaaattccggtgatttttttaacggcgaaagatcaggtgatggatagagtgaaaggtttggagttgggagcagatgattacttggctaaacccttttcctatattgaactgttggcacgcattaaaagtctgttaagacgacagcaatatctgcaagaaaatgagttgtctattagtgatctaaaaatggatatggttggtcataaagtatggcgtagtggcaacttaattgagctgagtaaaaccgaatttaatttgttgcgttatttgttgctcaacaaagagcaaattgtgacgcgcagacaaattggttccgaagtttggaatattaactttgacaccgataccaactttattgacgtcgcagtacgccgtttacgaagcaaaattgatgagggatatgaattaaaacttattcataccatacgtggcttgggctataaaatttcggttagtttatga

SEQ ID NO: 44971 - DNA, 1404 bp, Acinetobacter baumannii
atgaactttaaatttgtgcgttctcttgaagtccgtattacattactggtcacgctttgttctgccttaattttatgttcagtcggctttatgacctatttgggtattaaccagattttgttaaagcagcaagataaagctttagcagacagaattaaccgtttggaaattttgctgcaagatagcgaaaatgtagagcaaatcattgcgcggcctaagctgtatcaaaacatgcttggcaatcaagacaacttatttctttttattcataaagacaaaactttaattaatatcaatccgcttcacattcaactacctccgcttgcacagcgcgacagtcttcaatttcaagatttagctaacaactcatatccaacgagaattgcgtggaaaaccataaaaattaataacgaaccttatctgctcattgcaggtaaacaatggtcggaacgcattaatattcttttaccttttcaagaaagtctcttgatctatgtggtcgggggcgtgtttgcgatctttgtgctttgcattttagtgtgtcatttaggtttaaagtcgctacaacagcttcgcaagcaaactcattctattaacgtaaatcagctacaaaaacggttaaacctcccaaatacacctttagaagttgatctgctttcaaaagatataaaccacatgcttgagcgtattgaaaagggctatacgcagctcaaccgtttttctgaagatatcgcacatgagttccgcacacctttaaataatctgattgggcaaactgagattgctttaactggtgaacgttcggttgaacaatatgaagatttactggtttctcatttagatgattatcacagattaaaacgcatgattgatagcatgcttttcttggcaagagccgatcagaaaatggtgcttgtaaataaacaagaaataaacctccaagatgttatggataggttatgccagatttttgaatatcaggccgaggaacaagactgtcattttagttttaacttagaagctcaaacgttatttgcagatcctgagctttttcaaagagccgtttataacctgattttaaatgcgttggttcacggtggtgacaagcgaactatttatatcgcaacaaaacataagatgattgagcataagcaatgggtgagtctgactgtggtcacgggtgatatttcaattgctgaacatcaacttgagcatctttttgaaagattttaccaatgccacgcaagtcgaagtgatgagaatcaaacaggtggattaggtttgtcgattgttgcttcaattctggatctacatcatggccgctatcgagtttataacacggttgagggtgtgtgctttgagcttgattttccagttgcagatgcactaaagaaatacaattaa

SEQ ID NO: 44972 - DNA, 564 bp, Acinetobacter baumannii
atgaaattattatttaaatcacttgtcatcagcagtagccttgcagcggtcagtttaatgcttcctttgagcacctttgcagacaccaatactaaacctgtcgctgttgattctattgatattaataaatacgcaggtaagtggtatgaaattgcgcatttaccgatgttttttcagcgtaattgtgtagcaaatacaactgcaaactattctattaacgcggacaaaaccgttggtgttttaaatagctgtacgacaaaaaaaggcgaaatgatctcatctgaaggagttgcttatccgcaaaatgaaggcaacagtaaattgaaggtgagctttttaccttctggtcttagatggattccttttacaaaaggcgattactgggttttaagagttgacccaaattatcaggtcgctttagtgggtggtccaagccataaatatttatggattctttctcgtagccctcaacttgatgaggcgacatatcaatcttatctgcaaaccgcgaaaagctatggctacgacgtttctaaactcgttaaaacaacacaatctaaatag

SEQ ID NO: 44973 - DNA, 972 bp, Acinetobacter baumannii
atgtctaaattttttctgcgctggatcgatagctggtcagattcagaaaatgcgcaagtgggtgcttctagcgaatatgtcattgaaaagaaaattcaatggttaagaattattccttttattttattacatatcgcttgtttagctgcattttgggtgggcgtatcttggtttgctgtgatcttcatgctggggttttattttcttcgcatgtttgcaattactgcttttttccaccgctatctttcgcataaaacttttcagacatcacgtattgttcaattcatttttgtactgatcggaaccatgagtgcgcagcgcggacctttatggtgggcagcccatcaccgttatcaccatcactttaccgacaccgatcaggacccgcattcagcaaaagcaggcttttggtattcgcatgtaggctggtttttaaatgagcaaaattttgctactcgaaaaaaagtcattaaagactggttgaaatatccagagctgatttggctagaccgatttagtttgcctattgtgattttgacggccttagcaatttatggattaggttcatggcttgcacaacatttccctgagttgggcaccaatggtttacagcttttagtgtggggatttgtgatttccactgttctattaacacatgcaaccttgtgtattaattcactcgctcatcgttatggttcacgtgagtttaacaccccagatgatagccgtaataacttcctactttctttaattaccttgggtgaaggatggcataacaatcatcacttttacgcaggcagtgtgcgtcaaggtttttattggtggcagatagatatcactttttatgtgctcaagctgatgtctttatttggtttagtgtggggcctaaagcccgtaccagacaaggtttatcaatataaaaagattaaaaacctatcgatagaaaaaattgaaaacggtgaagtgttatga

SEQ ID NO: 44974 - DNA, 1263 bp, Acinetobacter baumannii
atgaaaattgccattattggttcaggtatatctggactttacgcagcttggagattgtcagaacaacatcaagtcactgtgtatgaaaaaaataactattttggcggtcatactgacactcacgagctagagatagaaggcactaaagtcgcggtagatagtggttttattgtgtttaacgactataactatccgttatttactgacatgcttaaaaaattaggcgtagaaactcaaagcagcgatatgagtttttcggtgaataatctggtcagtggacttcaatataacccttcaaaaaaatggtcgctctttgcccgtccgcagaactttttaaatcgaaaatttctgcaaatgctctcagatttgctgcgtttttatgatgacaataaagatatagatgtggcggatatcgatcctaatttatcgattgaagagtatttggaccttcacaaatatagtcatgagtttcgttatgaacatctttatccgatgtgcggtgccttatggtcggcacccgttgagcaggtaggccaaattccatatcgatttgtcgtgagcttttttcagcatcaccgcatgttgcagttaaaagagcggccgcaatggcaaacggttaaacacggttcagcaagctatattcgtgctattcaaaagaaatgcccacccattgagtggaaatttgcagaagtaaaagctgtgagccgttcaccagaaacagttttaatcgaaaccgttgaagggcaagagcaatatgactgggtgatttttgcaagccatgctgacgatagcctaagtttaattaaagatgcgtcagagcttgaacaagaaatattaagccaatttggttatcaagataatcgaatggtcgttcatcgtgatctttcaattatgcctaaaagccgtttgcagtgggcaagctggcatgtacatgtaacaccaaaatctcaagtccaaaacgatgaggccgacatacattatggttttacctactggatgaacaatttgcagaatttatcctgcgctacgcaaattttttctactttaaatccgaatatgaaaatcaaagccgaagacatcttggttgagcggcaataccggcatcccgtatttgatgcaaaagcgattcaagctcaatctcgttggcacgaaattaatggtcaaaatcggacttcattttgtggagcatattggggctggggctttcatgaagacggcgcccgcagtgcggcacgtgttgttgagcaactcttagcgttataa

SEQ ID NO: 44975 - DNA, 792 bp, Acinetobacter baumannii
atgttattaaataaacttgctatcgctcctgcgcttattcgtcatcggcgttatagccctaaaccgcatgagtttacatcgaccttaaattatttatggttcgatccagatcaattagttgatatcacaaacgattgttcactctggtcgacggatcactggaatgtattaaaactatctaaaaatgattttttaaacatgtatcacggttctataagggatagagtagagaaagcgatactgcaaaataatcacttacaccttcggccagactggcaaatcagagtgttggctttgcctcgttgtttgggctttcggtttaattcggtcgtattttattttgttttaaataaagccggaaaaccgctctttattcttagtgaaatcaccaatactccgtggaatgaacgagaagtctatacacacgactgtataaaacaacaaggtcaggtaggtgattaccaaagtttcgattttaactttgaaaaatcatttcatgtttcgccattcatgcccatgcagttgacttaccgttggcgatttagtttttcagatcagcagaatgtcattcacatgcagctttttgaagagcagaaacaagtctttgatgccactatgcgttttgagcttgtgcccatcacatttccttcacagcaatatcgatatgctcttataaacagcctagcgccttttaaaatgttgttttcaatatatttagaggcatttaagttgtggcgaaaaaaagttccattttatcgtcatcctaaaaagatcaaggtagataagacatga

SEQ ID NO: 44976 - DNA, 1200 bp, Acinetobacter baumannii
atgataaaaacatttctttatggtgaagatgactcactgccgttattgctcaagagtcttctcaaactacgtcatggacagatcacttttcagggcgcgtggaatgggacggtcggtgaagtttcagacttacatgctgtgattgaagttcacaatcctttattgatggatctcattttaaaaaatggtgttttgggagcagcagaaggctacatccgtggtgactggagcagcgagcaccttgtcgagttgattcagatcttggcacgtaatcgagctgtattggaccaaatcaaccagaatgttattgctcaagcgagccagttttttcttaaagcgtggtatcaaaatcgaaagaactctataagtggtagccgtaaaaatattgccgagcactacgacttaagcaacgacttttttaaattatttttagatccatctttaatgtattcgagcgccgtttttgaaaatgaaaacatgactctcgaagaagcatctgatttaaaaaaagagatcatttgtaaaaagttagatttaaaaccactagatcatttagttgaaattggaagtggatggggtggttttgccatttatgcagctcaacattatggctgtagagtaaccaccattaccatttcacaagctcaatatgatgaagccgttactcgtgtaaatgaagctggcttggcgcatcgaattgatgtgcaacttgaagactaccgtttgctcgaaggcaagttcgataagctagtttcaattgaaatggttgaggcggttggtgcgcaatatttatcgacatactttgatcaatgtaaagcactcttaaaaccaaaagggttggcatttattcaagccattactattgaagatttccgatataaaaaagcattaaatacagttgattatattaagcgctatattttcccaggtagctttattcctagcataagtgtattgactcaaaccgcctctgagagtggtttaaggttaaagcatttaaatgatattggtctaagttatgcgcacacacttcatcactggcgagcgcggtttttagcagcgcgggaacaagtattggctctaggttttgatgaaaacttcattcgcatgtgggatttttatttatgttattgcgaaggtggttttaaagaaggcgtgataagcaatgttcacttgttgtttgaaagtaccagttactaa

SEQ ID NO: 44977 - DNA, 780 bp, Acinetobacter baumannii
atgttttggaatttactgattctagatttaatgatcatgttgctgagctggctacttgccactctaaatggcagagctggaattgtagatgctgcatggagtttctgtctggcagtaaacattatcgtgtcttctttactcatttcagttgccccagttgaagtgcgtctttttatcggtatttttagcggcttatggtttttaagattattttggcacctgttaagacgttatcaatctgaacaaaaagaagatggacgttacgcgagcatgcgtaaagcgatggggaagtttcagcatattggctttttattcttttttatctttcaaacacttttagtgcttttgttctttttgccaatgtggatgctcctcaatgtagaggcaactgaatggagtagtggatataaagtcgctttagtaattgcagctgtcatcatggcaattgctttcatgggagagcagctcgctgatcagcagttataccgatttaaattaaatccagatcatcatggcaaaacgatggatcagggtttatggcgttattcacgtcaccccaattatttttttgaatggttacactggtttgcctatccaattattggtttagcggcaggccaatatgtattgtggatttatccgttactgatgtggctatttttatattacgtcacgggtattccatttagtgaaaaacaagcaattaaaagtcgcggtcaaaattatcttgattatcaacaaaaaacatcaatgtttattccgcgaaaacccaaaaaatag

SEQ ID NO: 44978 - DNA, 1047 bp, Acinetobacter baumannii
atggattttattgttcatcagtctttgaaaattgttgaaagtggtgtgattccagatcatgcaattcgagctgcaattcgtgctttaagtaaaaagcgcttaatccaagaaggccgttatgaccctgaacaaggggcgcagcgctacatggatgtgcttaatatgctgaagaagagcaaaatcgccgttgaaacggataaggcaaatgagcagcactatgaattgccgaccgagttttttcaggcggtgcttggaaaaagactcaaatatagtgcgtgttatttcccgactaaaaccacaactttagatgaggcagaagagttagctcttcagctttattgtgaaagagcacaacttaaaaacggtcaacagattttagagctaggctgtggatggggctctttaactttgtggatggcagaaaactatccacgctcacagattacggctgtttcaaattctacaactcagaaaaagcatattcttcggcaagcagagttgagaggtttaaccaatgttgaagtgctcacctgtgatgtgaatgtacttgaattagatcaagacaagtttgatcgtgttgtatcggtcgaaatgtttgaacacgtacgtaattaccaacgtctttttgaaaaaattcagggctggttaaaggcagatggcttactttggtgtcatattttttgccatcgctttttacattatccttttgaagtgaaatcagattatgattggatgtccaactatttctttactggcggtttaatgccttcgacttcgacttttttgcattttcaagagtatttagagttggctcaacagtggcagtggtcgggtgagcattatatgagaacggcaaatgcttggcttgataacatggataatcaagaagtcgaactaaagccactgtttaaaaaaatctatggaaaagatgccaatatttggtggcaacgctggcgtattttcttcatggcttgtgctgagttatttggttttgagcaaggtcaagaatgggtcattggtcactttttatttaaaaagcgatcatag

SEQ ID NO: 44979 - DNA, 1329 bp, Acinetobacter baumannii
atgataaaaaatcgacatgatggcaaagcgagtcatccattagcccaaatgttcaatcgatattactggttgcagattggtctgattgcattatcgatcgtggtcgggttggcttgtagtgcttgggtgattaagggctctttacttaaaaccgctttagaacaggaaatggagcattactggttacgcatagaacgtaatccaaatgctgatttaccagatactaaaaatttatatggatatcggtggaatacacaagtcgcgcctcaaccttttcggggcatgcatttagagagtggcgtgcaccgagtattcgttgatggtaaagaacgaatgacggtctatggtgagcgtaatggtcagcatgttctgttggtatttggcgaaagcaatgttaataagctgatctggttatttggtcttgctcccctcatgttcagcttatctgttttatatagctttttgtggtggtcaaaccgaagagcaagacgctatttttccccgattacgcgcttagcgaatgctttagaaaatatcgattgggcacatcaagatactcaagcatcaccttttagagatattaataccaatggcaatatggaagctgaatatctcaaacaagctttagaaaaatatcatcaggttttaagtgattttatccgacgcgaaagagaatttactggagatgtgagtcatgagttacgcactccactcaccattttgaaaggtaatgtgcaactgtgtcaggcgaaatatggagacgataaatctttagtccgtcttcataacacaattgaagatatgcagctgctcgttgataccttactggcgattgcacgtaatacggtacagagcttgccatctgagaaaaatttattatccaaaacggtaaaagatcttgttgaaagtttagaagcggtgagcgcgggtaaagggatacagattaatattcaacctgatgtttctgaacagccacgctggttatatccttctatgactcaaatggttttaggtaatattttacgtaatgcgcttaattattctcaaggttcacaaatcgacatcattcaacaaaaaaacagcctgattattgcagataacggaattggaatttctttacctaacgatgtaaaggtgcaagagctcagcgacacacaactttccttaaaggctaaaggtcatggcattggtttgcaattggtacaaaagctttgcaagcaattaggatggcgagttgagttgtttgatcggcagtactatttaaccactcatcctgaactcgatttgaagccaaccacaggcttaattgttgtggtctatttaagttaa

SEQ ID NO: 44980 - DNA, 696 bp, Acinetobacter baumannii
atgggtaatcactttatcctcatggttgaggaccattttgaactcgcagcaacggtctgcgaatttcttgaagtgcatggttatgtcgtcgatcatgcacgtaatttagatgctgcacggacttttctcaaatctcagcattatcatcttttgttgctcgatataaatttgcccgatggctcaggttatgacctatgtaactggctacgtaccgaacaaggcgttgatatccccgttcttatgctcacagcaagagatactttagatgacaaacttaaaggttttaccgctggaacagatgattatttggtaaaaccttttgattttaatgaactagtgatgcggattcgtgcattaataaaaagagcagctggcgaagtcactcaccataaaattcaaattcacgacttaattctttatagcgcaactcaaaccgtggttcgtgccggaaataatatcgagttaccccctattcaatttaaactattaaaaattttgatgcgccagtctccaaaagtagtgactaagcaagaactgatgatggaattatggggagacgaagaacctgaaagcgatgcgttgcgcagtcatatctataacctaagaaaaatggttgataaaccttttgatcctaaactattacatacagtggcaggtgtcggtttaaaaattgctttggaagattccgcgacttaa

SEQ ID NO: 44981 - DNA, 495 bp, Acinetobacter baumannii
atggatattgccgttcaaaaaagtcgaatcttgatatttctgggaatcttaatcgtatctcaagcgaatgcggttgaactaaaaaaatgtagttcagctcctttaatggttacgagtaaaaaagtgggaaatgtcagttactttgctgaagattgcctaaaaaattggcaaagccaaagcatcaaaatggactttagctataaccgcgatattcccgagtgggcatttaaacgcgcagcaacccactttttgaagaaaaatgttagcggctttgattcgaaatccccgcttaatcagattaatgaactatataggccaattaagagtggagatctctatagtctttactatcaacatgaaaatcaaaaactagaattaaaattaaaccagaagctactcggctctttaaacaatccgaatgcaaatcaatattttaaaatctggtttggtaacgaaccgtttaatgctaaattaaaacaacaactattaaattaa

SEQ ID NO: 44982 - DNA, 573 bp, Acinetobacter baumannii
atgaaaattataactacagccctagggctgattaccttggcaggtttaacggcgtgtaaaagtgtgcctagctactcaggtgactatggcaaagctgaacaaaaaattactggtatagaattagatgaccaacaggcgctagatgtgggcaatcgttttgtcgctgcatttaatacgctcggtactccttcttttgttaataatgctagcaatctttacgctgatcagctctatatcaacgatacactctcgcagttctctcaaaagaaagatctgattaagcattttgaaggcatgaatgcccgagtgaataatgtcacggtaaaactcattagtgcaactcatcaccaagatacagcctatatccattggtacatgacctatgactttaaaatgctaggtcgttcaaaaacgatggcttcttatggaattagtcaaattaagattaatgaccaacaaaaaattattttccagcaagattattgggatccagcgaatggcctctaccgttctttacccatatttggaggagtatataaatggatattgccgttcaaaaaagtcgaatcttga

SEQ ID NO: 44983 - DNA, 507 bp, Acinetobacter baumannii
atgttagaaacagaacgtttaattttacggccattccttgaagaaaacttacctattatgttggagatgtttcaagacaaagattttatggctttttcacctcatggtgccttatcaactgaggcagcaactgatcgttttttagaaattttggagcactataaaaatcataattttggcaagatggctatcgttttaaaagatacccataaaattattggttattgtggttttgaaacttgtgaggttgatagcaagacagaagctgaactaggttttagacttattaaaactgagcgaaataaaggttatattgttgaagcttcacttaagttactagaagacatgcaaagtcgaaactttaagcatgtgatcgctttttcagaaaaagataatttacctgcccacaacctattaaataaacttggttttgaaaaaacaaattcatctagttacatgaatatggatgttatctttttcaaaaaagacctgtcatttcttcgataa

SEQ ID NO: 44984 - DNA, 729 bp, Acinetobacter baumannii
atgaaaacaatcggcttattaggcggcatgagctgggagtctacagcactttactatcaacaaattaatagaatggttcagaacaagttagggaaactacattcagccaaaatcattctaaatagtgtcgattttgaagaaatagcagtattacaatcgaaaggtttgtggcaagaagctggagcctacttagctgagcaagcacaaaatttagaaaaagcaggggcagactgtattttagtctgtactaataccatgcataaggtagcacctcaaattgaagatgccattacggttccatttatacatattgctgatgccacagcaaaagaaattttaagtcaaaatatccgaaaagttgcactgttggggacagctttcaccatggagcaagacttctataaagccagattacaagatcatggaattgaggtgattattccaaatgatgcaaatcggaaaatagtacatagcattatctatgacgagctttgtttaggtgtgatcaaccccgattcgcaaaacaagtatatgaccattgttgaagagttgattgagcagggtgccgaggggattattttggggtgtaccgaaatttgtatgttgattggtgatatcaaattttctgtgcctctatttgataccaccaccattcatgcgaaagaagctgtaaattttgcattagagcaaaaaacggcagcccgttctattgctgctagttcggtataa

SEQ ID NO: 44985 - DNA, 912 bp, Acinetobacter baumannii
atgtcaaaaaatttagcaaccttgattggtttaagtgccatcctaatgtgggcctctatggtgggctttgtaaaacatattacgaccgcaatcggtccagatgttggcattacgctgatctataccttaagtgctttactcctgctcattatttttagggtgccaaattttaaattaatttctaaaaaatatttaattttaggggcaattttatttattgcttatgagctttgcttttcgtttgcacttgcctattcaaagacggcgcaacaagcgattgaagtaagtattgtgaactacctttggccaagcctgactgttttagcttttgtgatttttagagagttaaaatttaatgtgtttattattttaggattactcatttcaatttccggtatcatttttattcagaccgggaacagagattttagtttaggtcgtgttgtcgataattttcatagtaatcctttaagttatgttttggcctttataggtgccattatttgggctttttactgtgtgttgaccaagaaaataggtaaaggacaaaaccctatttctattttctttcttggtgttgccataaccttatggctaaaattgctttttagcggccaagtgagttttccttcactcgatttaaatacaattttatctttaatcgttgcttctgctgcaattggtctcggttatgcagcatggaatattggcattattcatggcaacattaccatgctggtggttgcgtcttactttaccccaatcatttcatctttacttgccatgctggttttacagacagagttatcaatcagtttttggcaaggtacagccatggtcacggcgggttcacttatctgctggctttcaacaaattgggctgtgatacgttcctatttcagaataaattaa

SEQ ID NO: 44986 - DNA, 462 bp, Acinetobacter baumannii
atgaatgcacaaaaaggttttacgttaattgaactcatgatcgtggttgccattatcggtatcttggcagcaattgcgattcctgcgtatcaagactatatcgctcgttctcaagttagtgaagctatggagttagctagtggattgaagggggctgttgcagagacttttagtcaagatgctacttgcccaacaaatggtactaatggaattgctactgctactgatattaatggtaaatatgttgcttctgtaaccacggcaggtaccgctgctgcctcaggtggatgtacaattactgcaaaaatgcgggcaactggagtttcaaaaggtattcaaaatggagagcttactctaactcttagtaatgcagataaaggttcaaatgtgtggagttgtacttcaactggttcaaacaaaattgaacaaaagtacttacctaaatcatgtacttcttcataa

SEQ ID NO: 44987 - DNA, 294 bp, Acinetobacter baumannii
atgctccagtgtccttactgtcattcattacacatcatattactccgccagactgagcccagttcaggggtgtttgcaaagctttcatcattctcacccatgtctctggcatccgcctgtatgcaattgtcaaaacgaagctctgttcatcctttggtaggcggttttattggcttggttatcggtggaatgtttctgctctacgtacagcatcaagacaatatggtgacactgtattaccagtgtgagcaatgtctggaacattttgaaatccagcaatcaggatttgcttaa

SEQ ID NO: 44988 - DNA, 1050 bp, Acinetobacter baumannii
gtggcacatcacgtggaaacaatggcttttgtaggtcaaaccccatggcatggtctgggaaatcagctccctcaaaatcagccgatagaaatctgggcacagcaagctggtatggactggcgaatagaatcatccaatgtcagctatatggcaaagaatgaacgaggacaaaatattctgatgccttatgaagagcaacgagtactttatcgttcagatactcatgcaccattgtctgtagtgagtcagcgttaccaagaagtacaacccaaagaaattctagaattttaccgtgaccttaccgagcaatcgggatttgaactggaaacagcgggggtacttaaaggggggcgtaagttctgggcattggcaagaacggggcaatcggcagcgttgaaaagtaaggatgtcagtaatggttacattttgttggcaactgcttgtgatggtacgttggcaaccacagcgcaatttacttcgattcgtgtggtgtgtagcaacaccttagcgattgccttacgtgggcagaatagcagtgttggtgtagtgaaagttccgcacagtaccaagtttgatgcagaaaagattaaacagcaattgggtatttcagtgcgtgcatgggacgagcacatgtatgaaatgaagcaactgagccagcgtaaagtcacccagcaagaagcggcagcttactttgatgcagtgtttaataacacgaacctgaacattgccgaacaggatgaaagtatcattcagttctaccgtaatgtagctacccctaaacaagtctattcaaccaaagctgataataaaaccgaaccgaatggacgtgctatgtctaaggtcatgaccatgtttaacgggcatggtcgtggggctgagttagcttcagctaaagatacggcttatgggctgctttgtagtattaccgagtttgtcgatcacgagcgaagggccatttcatcggactacaggatggattcagcatggtttggggctggagccaatcttaaacaacgtgggttggaacaagcattaagaatggtgtcttaa

SEQ ID NO: 44989 - DNA, 882 bp, Acinetobacter baumannii
atgaatcctgaaacttggatatatgcaacgtggctgattaaagtcgttttatatttaggaatagcctttgtcgttgggggcgcctttagctattttctactgggacgctatgtagaaatcaagaaaactctcctaaagtacattactatcggtgccggattaggctttatttcaagtactttaggtttcttcgttcttataggaagttttgccaatacaggtctttctgggatgtgggacagtaactacattaatatcttagtaaatacacctactgggcatatccatatcatccgttcagtcagcttcgcacttttactgttatttatgctcgtaaagcttagtaaagggactatccagatttccaaagtagaagggacaatttttaccatcctgctcatccccatagtttttagtttttcacaactaggccatgttacgaatttacctttattcgctcaattcttattatcaatacatgtacttgtaatgtccttatggatgggatcacttttccctttatggagaacaactaaaaaaattactggtcttccattaaaagatcgcatgcatttatttggaagaatcgcagcatttgttgtaggaatactactcgcttgtggtgccagtattgcgctgttactcattaaagattttaatactctactaaatactccttatggacatggttttattattaagatcgcatttgttctaagcattttattattagctgcctttaacaaatggtattttacccctcgcttacaagatccgaaatttgctagacagttgggttatgccattttatttgaaatgtcattaggcctaatgatccttttaacgactggatatattacaactgtagtcggcattgagtaa

SEQ ID NO: 44990 - DNA, 1377 bp, Acinetobacter baumannii
atgactcataaactgtttaatgcgatcagtttccgtattgcactcatcttctcgttatctaccattattatcttaatgattatggggctggtcattcatcagcttgttatgcatcatttcgaaactcaggaccgtactcagctagaagggaaaattcagcttttagaaaatttactggaacagaatccgaaaaatactgatgaattaaagatatatttaaaagatgctttagttggccatcatgacctaattgtccagattgaacgcccaactggccaaatcatttttagttcagcacctgccgttataaaggctcaaacattagtaaagtctaaacatatcccttggatagagtgggaaattcaaaataaaacctatcgtggtttagtttataaaaagtcgtttgataaaaatatgagtgttccaactgctcagattattgttggaatcgatacctccgaacatcaacattttttaaacgactttagacgacaattgttatatatcggagtggtgggcacaatttgtttaatgtttttaggttggtttgccgcatggagaggcttacgtccagttcagaaaatggcaaaagttgcagaaggtatttcagctcagcatctatctgaacggttagcggtcgataacactcctactgaactaaaatcattagccatagcctttaacgatatgctagatcgattagaaactgctgtagaaaaactctcagatttttcatctgatcttgcccatgaaataagaacgccaattaataatttaatgactcagactcaagtatgtttatctcgtagtcgggatattaatacttatcaggaagtcctcttttctaatctggaagagtttgaacgtttggctcgaatggtttcagatatgttatttcttgcaaaggcagagcatggcctacacttaccaaacctgcaacaggtcaacctggtacaagaaatttctgctctatttgacttttatgatgctatcgctgctgaaaagggaatgtccctagaacaaagtggacaaggatatgttaaaggcgatccttcaatgttacgtcgtgcactgagtaatttactatcaaatgcgatcaaatatggcaaacctgatacagtaattaagattaactgccgacaaaatattgataccactatatttacaatcgaaaatgaaagctcaccaataacatctgagcagctgaatcggttatttgaccgtttttaccgtacggatgcgtccagacaaagagttgaggaaggcacaggtttaggtctagcaattaccaagtcaattcttgatgtacatggtgcaacgattcaagcggactataacaacggtcggatagcttttaaaataatttttaaaaaataa

SEQ ID NO: 44991 - DNA, 366 bp, Acinetobacter baumannii
atgaaaactctattccgtcgtagcttaactgcttttatgtgtgttgggactttaattgctggaagccaatcttgggctgctgatgctcaacagaaaaatactttaagtacagaagttaaagtaaatgcaaaagcacaagagaaatgcaaaaagccttgtgatatgaaagatggtaaggaaaatcaacagaaccatagtcagcatgatcacagccaaatgtctgatatgtcccaaatggaccattctaagatgaaagacatggaccattctaagatgacggatatggaccattctaagatgatggacatggaccattctaagatgatggacatggaccattctaaaatgaatatgccaaataaataa

SEQ ID NO: 44992 - DNA, 903 bp, Acinetobacter baumannii
atgcgcaccactaaaaaaatatattctaagacactattatcaatagctttaattggattatcaggtctagcttttgcaaatgatacggatgttcaaagcatggataatagtactaaatcctctcagtccgagagtatgaaaatgctattaaaagagcctggtgggctaagttatgttgatcgtaatacttaccaaacaggtcttgaagctgaaattgaaacatccaatagccgaaatcatgataagcatctgaaagaacatggtggacaagtttttcaaacaactaaatttgagaatgagtggactgtggatgaagatggtaaaggtactttaggatcgaaaattgaaacattgataggcacagatgaaaatcgcctatttattgaagcaaatctggataaagcagaaagtcatgatccaaaatatgatgtgtcagcactttatagccgtaatgtagcacccttctgggatgtacaggctggggtgagatacagtgaagataaaaataacagcaacagtgatcgggttgatggtgttattggtgtattgggattagctccctatttctttgaaactcaagcttatttgtacggtggtgataataatttctggggggcaagcttagaagtcgaacgtgatttcttgttaacccagaaattgatcacacaaccttatctcgaagtagatgctgtatttagcgatgactctaactatgctgcaaaatcaggtttatctgagttaaaaactggtatcaaaacccggtatgagatcactaaaagaatccgacctttcattgatgtggcctaccaatatgaaaaaggccaaaaagctacgtccttacaggaagccactgattctgaaaaaggatgggtatatggggctggtatcgagttagttttttaa

SEQ ID NO: 44993 - DNA, 1146 bp, Acinetobacter baumannii
atgttcaatatgggtcgtttcgatctcgctcgtcaacgccgtggcttgactaagagagatttggctcatctattaggcgtaaccgatagaactgtttcaaattggtatagtaaccaagaaattgatgagagaattttagaaaaggctgctgagattcttgattttcctctcagctttttttatggaaatgatattgagaaaattcatgctgagtctgtaagttttagagctcttactaaaatgacagctagaaaaagagatatggcaattagccaaactattttagctgaaatgatcagtgattggattgatttgaaatttgaattacctcttcctaacgttcctgatttacatgaactaagaagtgatttttcgtcctcttctattgatgaattagatgaagtcagtgaagatgaggttaattattatttaaaatattcttatcctgaagcatgcgcagatacagtaagaaaagcgtggggattaggagaacagcccatcccaaacttaattgcacttttagaatctaagggcattagagttttttctcttacagatgaagcacaagatgttgatgcatgttgtagatggacaagtggtcggccttttatttttttaaatacctctcgaactgctgaaagatgtcgattcgacttagctcatgagcttggtcatttagtgatgcataagcacggaataattgaaggtattcatgttgaacaagaagctaacgcttttgcttccgcatttttaatgccacgtagaagcttactagcagatcctttaaaaataccttcattaaagggtattttatccaagaaagaaatatggcaagtttctgctgctgctttgacttatcgttacaataagctcggtattattactgattggaacgcgactagtatatataaacaattggctcagagaggacgaaataacgagccaaaccctattgctcatgaaacgtctcttttacttagtaaaatttttcaagctttagctcaggaaaattttgatttatcagaaatgactaatgagttaggtcttaatctagatgaaattaataggcttacttttaatcttgtatctaaatatcaaaatttagaagcactacgtcgtcgaagtcagttaatagttttgaactga

SEQ ID NO: 44994 - DNA, 684 bp, Acinetobacter baumannii
atgcagccattatatttaactattgatgatccacaacatgcccagaatcgaataaaagaggttttcggctttgactcaaaagttctactgggagtcattgaagatggatttgcagctcgcaatgaaacaacaaataatcaccctaaaatttatgggggttatagacattttgctgaaggaaacgcttttttaagagaacgccttctacctaaaggttattcaaaatatacccaaggaaactctgaatgggttcataatgaaaaaaaaggtattttaatcagctttatggcaggaaatgcctctgttgggatgaaaggtcaaaccccatctaatacagatggtttaaaagctgaaaaagttgctcgaaatagaaatcctaaaggtagcatgttttcaagaattgctaatgcacaactgcatggcgatatgttgactttacactcaggtatagatacgtggtgttgggttttgatgtattatattgattataaaaacaaaataattagaagtgaactatcatgcccttcaaggcttactgaaaacggtaaattttttgcagagtatcatgaaaggattattctaaaagaaattagtttcgatccagagtctgaatttgatactattctttcccctgcaccaacccccccgtcgattgattttgaaatcaaacgcaagaatgcttaa

SEQ ID NO: 44995 - DNA, 1251 bp, Acinetobacter baumannii
atgcagaaacatgatgcattcgctgccctgcgctatagagatttctcaattgtcaccattaatcaattttgcttaacattagcaattttgattcaagaaattattgttgcctattcactttatcaaattaccaaagaccctctaactttaggtttaattggactagcagaagccattccatttattgccctatcgctttggggtggttattttgctgataaatttaataaacagatcatcatgaaaatctgtttatttttctcagtacctcttcctttagttttatggttactgttccatctgcatggtttaggtcatatcagcgtaaatttcctttcttggggtatttatgcagtcatttttggcttaggtaccatacgcgggttttataatccctctgctacatccctaaaaccatttttaattccacgtgagctttatgccaatggcgcaacatggacaactattggttggcaaagtggcgtgattattgggcctatgctcggtgggtttatgcttgcttatttaggcaaagaaaccagtctttttagtgttgcagccctactcagcatctgttttattctgattaatttattacaaaaacgaagctttcctaaaattgaaactaccaatgtattagaaagtttaggtgatggtttccgctttatttggaaaaccaaaatcgttctctgggctatttctttagacttagcctccgttttatttggaggtgtgattgccttactgccgatctttgctgaagatattttaaaagtagggccagaaggcttaggttatttgcgtgcagcgccgtctattggcgcactcattaccatgattgctttgacccgttttccgccaactcagcatgcatggcgtaatatgctacttgcagttgcagggtttggtgtatttacaatccttttcgctttctcaaaaaatatgtggttatccctatttgctctggcgatgacgggcgcttgcgacagtatttcggtggtagttagacaaaccattttgcaaatattcccaccagaaaatatgcgtggtcgcgtagcggctgtaaatggaatgtttgtctcatcaagtaatgagctgggtgcatttgaatcaggcttggctgccaaatatttgggaactattgcagcgactatttttggtggttgtatgactcttgcagtagtaaccttctgttggctaaaaaccaatgatctttttaaagtcgatattactaaaagctcagaagattag

SEQ ID NO: 44996 - DNA, 246 bp, Acinetobacter baumannii
atgttattcaaaaaattcgctgttgctgctgctgttgctgctactttagctttcgttggttgttctaagaaagaagaagctcctgctgctgctgctgcatctgaagctgtagctgctgcttctgaagctactgctgctgcttctgaagctgctgtagctgttgacgctgctgcttctgaaactgctgctgctgcttctgacgttgctgctgctgcttctgacgttgctgcttctgctgcacactaa

SEQ ID NO: 44997 - DNA, 1011 bp, Acinetobacter baumannii
atgaataataaacgtaatatctataaagatgctgaacatccctttgctcaatatgtccgtattttaggtaaggggaaaactggatctcgctcactgagttatgaagaagcctatcaggcttttactatgattttaaaaggcgaagttcttgacgttcagttgggtgcttttttaatgttgctacgtgttaaagaagaatcgattgatgaacttgcaggttttgtacaagccacgaaagaccagcttcattttgcacctttagaagttgacttagattggtcatcttatgccggtaaacgtaaacattatccttggtttttattagcggctcttacccttgctcatcacggttataaaatcgtaatgcatggcgcttccggacataccattaaccgggtttataccgaacaagttttggaatatttagattataaaatttgccattctgaacaagaagttcgcacccaattggcagaacaaagttttgcttacttaccgctagacgtgatttcaccggttttaagcgaattgatatctctaagaaatgttatgggattgcgttcgcctattcatactttagcccgtttaattaatccttttaacgctaaagccaccttacaagccatattccatcctgcttacagaacttcccatcagcatagtgcacttcgcttaggctatcaaaatagtgctgtcattaaaggcgaaggcggcgaattcgagcgaaacccagacgcgaaaacgctgatttgcggaattaaaaatggtgaactctatgagcatgagttgccaaagcttacgcctgaacgtagcccaattgaagaagagttagacttagcaacctttaaagctgtctggcttggtcaacagcatcatgaatatggggaaatggccgtaacagaaaccatgggtattgcgttatataccatgggcgtagtttctaatttcgaggaagcgatgcaaaaagcaaaagtattatgggaaacacgagatacaaactcagaaggctaa

SEQ ID NO: 44998 - DNA, 318 bp, Acinetobacter baumannii
atgtcatggcttatgattttaggactggcagctatcgtattttttaatcgttattattttttggaaccaaacgtaaaagtcaaattaccagtacttatgaataaaatgttgaattattcagctccttgtttattaagtgctatttgtattccagtaattttttttgaaaataatgaattaagaggatttttagataatccttacttatacgcaacgatattttgtactgtcgtggctttctattttaaaaaagtgttaccgagcgttctgctgagcctagcatttttttattttataaattttctaataaatcattaa

SEQ ID NO: 44999 - DNA, 825 bp, Acinetobacter baumannii
atgcaccgggaacaggctgactacttgcatttgcgagagttgggcggtttagaattattaaaagcacattatcaccaaacacaattttcaaagcatactcatgaaggatattgtattggtgtcattgaagagggtgcacagtctttttttaggacgggtcagctacatgtagcccctaaaggtgacattattttggttaatgcagatgaaattcacacaggctcatctgctgtcgaatcgggctggcgttaccgtgcaatctatcctacacccgaaatgcttgctgaagtaagccaagatttttttgagcaaggccatggggcaccttggtttccgcaagctgtaattcaggacttgggattatctcaacaactctgtttattatttgatttattagaacaaaaagacaattttttgcttaaagaaaccatgtatttatcaacattagcatgcttaatggtacgtcatggtaagtcaagacacaccttttgcgagttaccagaagcttattcaaaagtattaaaagttaaagatttgttagctgatatgcctgaaaagaatttttctttgcaggaattggctgatatggtcgggttaagtgcatggcattttttaagacaatttaaaaaacatgtgggtttaccgcctcatgcatggttagtacaggcgcgtttgcaaaaagcgagacaattattaaaacaaggcgttcaaattgtaatggttgcacagcaatgtggtttttctgatcaaagccattttaatcgtcattttaaaaaggcgatgggtgttacaccaacccaatatgtggcgagtcttaatctttaa

SEQ ID NO: 45000 - DNA, 774 bp, Acinetobacter baumannii
atgcttgagaacttaaaaacgttcatagaacaaattgaagagaacgaccaagacaaagctgctgcttttaagcaagctttgatgatattaactgcgcctaacagtattgctctagccagtaacgaagacattcacttaagtgcagatggtcagctcaaccaaactgccggagatagcatcaatctgtctactcaaaagaacttgattgcacatgcccaaaataagattagcctttttgcagcgcaacaaggggcaagactgtatgcaggcaaaggtaaagtcgaaatacaggcgcaaggcgatggagctgatttaattgcccgtaaagctgttcaggtgatttcgactgaagacaaaattgaggcgacagcagccaaagaaattgtgctcaccgcaggcgggtctcaagtcaaaattaccggttcaggcatttttatgaccacgagcggcaagtttgaggtgaaagctgggcagcatgtgtttatggggggagctgaggtaggtatgaaccttcaagggttacccgcttacgaagcctataatgagaggttcaagatgctattaccttcaggtgagcccctttcatttattgattacaagatatcttctgaaggtaaagaaatttttgctaactcagataagaaaggtcaaaccaaagaaatacatagtcccaaagaacaggagcttaagctcgatttgttatggttggatctagaaacagtagatgagactgaagtttgggtagatccagcgcaaggaagtaaaaatgtctaa

SEQ ID NO: 45001 - DNA, 1095 bp, Acinetobacter baumannii
atgtctaacagtttggattggaacagtaaaacgaacataagtgaacatagttgtaaggatgctcactgtgactgtttgacattttgggaaatatatcagcaagaagcgatcaagagattatctaacttacaaaaagcgaataactataaacttgagccaggatatgaggcaagagcaagaagaattgcctccgtatatgccaaaatatttttagaaatagagctcggtgggaataagaaccttttggggcgatattattggatgggcttaggagctttcgcctcaaaaacagttgcaactatatttaagcattgggggagtctgcttggctataatgtcggtgtacaagaggctataaatctttttgctcgtggcaatttgtggttgtttatggatattgctccttggcatttagcttggagtgcatcttcagaatcttttaagagttgtaaaggtacgcgagatactagtactttcaaatttgttaaaccagcattaatgaatttgccatggtcatcgtgtttacctagtattaaaaatttaaaggtaacgaaagaaattaatgatgcttttactctattacctgccattgagaaagcttttttgaatggacgtgatgagaaaagtaaatatagaaaagcgagtcaaaatctattcgatcatttgatggctattgcggtacaggaacaacataatattcttcaagtcgttgtttgggaaaattgctcagttaaatttggagcatggatgcaacgttggtttataggtatgccagatgccacacttgttctatcaagtgattatagtgtagacgcggtaaaaaagaattggtttggtaattatacaggtagtaaagctgatcaattagtagaattaaaagaggatgtttatattgctcctcttaagggtacgattgctgaagattatgatagtcgtatgaaatggattggtaaagcagctgaaaaatatcaccgtttaatgcttgatgaaaaaggtcggccatttttacaacaagaattgaaaactatttctaaatggggaaatagtaaagccgattttaaaatacattcgagtagtaatgaggggaaggtttga

SEQ ID NO: 45002 - DNA, 792 bp, Acinetobacter baumannii
atgaaccaaaatcaagatgtaatagcccttcattttggtgagcaagggatgcaagattttagtaaaaatagtactacaccagttgatcgtcagcctgcagggatgaattttttatcattagattggactccaccgaaactaggtcgagtgcgtgtatttagtgaaaagagtaatttagaaattgaaaatgtaatcagtgtgctaggtacacaagtagctcgacgaagcaatgatggtattcaaatcatggacattaatgctagcttgcatccaaatgaatatactacgagccaagaggcttatactgcttatactaaattagtacatcagattaatgacaaacaatggaagcagtattttttaccttttagtgctcgaattgataaacaagataatctaaagcatatgactgaaactatgggggaggttatagatccaacttatatcttaaattttaaagaatggcaggatgtgctttcgaaaacaaataggttggtatttaatttgtataatggggatgtggagttgggtattagtcttcgacggacctataaagatgataaaaaagaacagtatatggtgaggtacagctttgaaaactttaaatatgcagggcgaaatgctatctctgattcagataagatgaattcagagcagttaaagcaagcatttgaaactgaagttgctaataataaaaaagcccgtaaaactgaagaaaataatatgaaaaaagagggttaccatatagatgagagctatatagacccagatatttggccttatgtacaataa

SEQ ID NO: 45003 - DNA, 702 bp, Acinetobacter baumannii
atgaacaacaatattataatttttggttatggaacaggtatttccaaagccgtagcacataagtttggtaaagaaggctataaaatcgggttagtggcacgaaacgcccaaaaacttgaaaaggctattctagaacttaaagcacaaggtattgaagcttacgcttttgcatgtgatttagctgttcttgaagatataccaaatcttattaaacgcattaaagatcaattaggagagattaaaaatattcattggaatgctttccatgatattgaaggcaatatcttagaaacccctccactagagcttaccaaaagctttcatattcgcgtgtcgagctatattgcgacggtacaggcttgtctaggcgatttagagaaaaaccacggtagcattttatcgacaaacggaatttttgctttcgatgcagtgggcatcgacttggttgccaaagaatattcatcgttagcaactaccgctgccgctcagtataaaactaccaacttacttgctcacagtcttgctgacacaaatgtttatgtgagccaagtgattgtaaatggtttcgtagatggcagacctgaagccaaagataaaacctacgcggtacatccagaaacagttgcggagcagttctggtacttacaccaacataaacaagaaacagtttctctttgtggagaagccattcaagcggcttaa

SEQ ID NO: 45004 - DNA, 2091 bp, Acinetobacter baumannii
atgcgacacaaattaggattgttgtcttcgttaggtctatcatttatatcaacactcacttggggagaagaaacatcaacggtacttgaaaccatacgtgttcaggctgaaagtacccgagaagatgtgagccaaaatagctcggcaactaaatttactcacgatgttttagatgtcccttttaaccgtgcttatctttctaaacaaataatggaacagcaagacgtgcaacggattgatgatgcattaactttagtcagtggggtttttcatcaaaatagctttggtggtggcttttgggataactactcatttcgtggttttagtaccgaccccaatttaggtgcggctatgatccgtaacggtttgagtgttaaccgaggaattagcgctccaaaagatgtcgtaaatattgaatctttagagtttttaaaaggaccaatggcggcgctatatggtcgcggcgaaacaggtggtttgcttaacctcaacagtaaaaagccacagtgggaaagcgaaagtgaacttaacctacgtgccaatacccaagaacaatatcgaataagtctggagcatactgcccctattaacgatgaactggcctatcgtttagcagtggcccacgaagataatcaaagctttcgtgatcatgtcagcagtgaacgctggttcttttcaccgcagctcacatggaaaatttcagaccaaacgcaactcgactttgacagtgaatttacagaacataaaggaacctttgaccgtggtgtcagcacagtcaatcatcagtttgtgatggacccgaaaacctttacaggtgagcctgacgatggcgacctgaagataaaagattacttttaccaattacgtctgagtcacgagtttaaccctgattggaaactaaacagtgcggtcagttataaagatgcacaaatggtcggctttgcaaccgaacctcgtcgtatgcaagccgatggccgcactctagagcgccaacgtcgctatcgtgattatacaagtgaagatgtactggctcagaccgagttactaggtaagtttgatacgttttgggctcgtcatgaaattttactttcaaccgagcttggtcaattcgactataaacaaaaccagcttcgtcgcaaccacagcacaagctcaacaaacacaattgatatttaccaacctgaatatggcaagtatttaccgaacctcactccgtttaccgacaccaaagagcgccagcgttacttcgcgcttaatgtacaagaccaaatctttttcaatgaccagtggagcgtgttactcggtaaccgttttgatcaggtcgaacaagactttaaaaatcatataaaacagaccgaggacaaccagacacttcaccagaatagtccacgtttcggagtaaattttaaagcctctgaccagtgggcgttttatacaaactatggtcactcatttgccatgaatagtggtatgaaccgaaatggacaaaccttcgctcctgaaaaaggcgaaagctatgaagtcggtaccaaatataaaataaacgaccaaagtgtgttgagtctcgctctgtttaaaatgaaaaaacgaaatgtactcacaactgacccaatcgacagtaactttcaaaccgccgcaggcgaagtgagtagtaaaggagttgaatttgacttaaatagccagatcaatgaccgctggttcgttaatgccaactatagttataccgatgctcaaattgaaaaagaccgagacttggcaaaaggcgctcgtctaagcaatgttccaaaacaccaaggctccgtaagcaccaattatgagtttctacaagacggtgcaagaaaagcgggtgtaggtgccaaccttacctatgtcggtgagcgcagcggacataatcttgataatggctttaacttaccgagttatacgctggtcaatttaaatggctactatgcaccatctgaccgtttacgctatcagctgaatataaataacctatttgataagacctactatgtctcaagctatagcgatttatgggttcaaccgggtgaaccactgaacgcctcaatttcggcacagtggaagttttaa

SEQ ID NO: 45005 - DNA, 459 bp, Acinetobacter baumannii
atgctggatgtaccttttacaatgctcactcaactttcttcacaccactaccacacacttaaagtgtggtatttggtgcagcactctttagttagctttaaaaaaattattgattattttggaaattgtgaaaaagccactcaacctgatggtttagcaaagtggtcctctctggggctacatgctaatcacttaaagcgtgtaaacgaatttcaaacgccccaaggtcaggcgcagtttgaacaacttgtacaacaagttcgtcagcatacggattttattttaacggcaggtgactcaggctacccctctcaattacttccttatacagattatccacctattatttttgggaaaggtcaagcgcaagctttattgcaacctcagattgcgattgtcggtagccgaaaaccaagcccacatggacgacagtcgcttatgattttgcttactacttaa

SEQ ID NO: 45006 - DNA, 1002 bp, Acinetobacter baumannii
atgaaactgctttttcaaaaaattcaaagtgcttttgacaatcaaaatacacataacaaaattactttaagaaatattgaggcattaagaaatttacttaatcagcaattaccacctgatattcttgtttattcattaaagaattggacaggcccccaacaacttgatattcgaaattatattttttggaatgctacaattttcgccttagtttgtatggccttaggctttttaatctcgatttacttcttcccttttgccattcttgcgattttttatggtttttatcatagagcatcgacggccgaactgatttgcctacttcaagatatccaaacttattattatgaacataaatataatttcaaatttgcaactgaagataacctacctaaagaaggaacgtccgcttcagactttcctttgtttaagttaggcaatcaacaaaattcagttttaactgcaatactcggcaagtggcaagtaagagaaacaactcacccctataaaatatttagataccattatgtcaatcgagagatggcctataattcaaaaggtaaatgggaactaaaagatgttagctacaatttatacggcatcattttagagaattttccagttcgcggagtcagcatttcaagtcaacagaaaaaggcttgtcgcttaggagtagcttgggaatcaagtgatatccgttttaatcaaaaataccaacaaagcggaattaatgaattggacttagtaaaatttctaagccctgatcggttgttattattagagaaaatgttggaagggttcccaggggatttctatgtacaccctgaaacatctgcattatgttggctctgtaatgtaaatcttttacgccagcaaagtttatatggcactagtgtacgtgagcttgctgaatgccttgaaactctttcaatgccagaatttgagcagtttgcaaatatattgcagcatttcattgatgaaactcaaataccgaagtcataa

SEQ ID NO: 45007 - DNA, 1299 bp, Acinetobacter baumannii
atggctaaaattacaaaacctttaacggcaagacaagttgaacgagctaaaccaacagacaaagaatacagtctctttgatggagatggtctttatcttgtagtacgtccttcgggtacaagaacttggatgcttcgtctgcgagatgattttggtaaaactcacaagattaagttaggaacatttcctgagttaccattggctctagctcgagagaagggtgctgaatacagaagatcaatcgctttaggaaaagaggttgatgaggttcttgggagaggtgaatacaaggtcgataaggtaaagcactctcttgaatctgttgcaagagaatggcttgaacaatatgccaagcgcaaaccattagaagaacatacaaagcataagcgcattcgtaaactagaaaatcatctattcccaatgttaggtcattatccaattgatgaccttcgtcccaagcatcttcgtaaagtgctaaatcatatctatgagaagagtgctgataatgcacaacgaattagagctgaccttattctcatctttagttatgcggtgcagtacggcttgattgaagtaaaccatgcaagagagatggagagccttgatctctcagcacctaagaatcaccgaccagcattaccacttcatagattgcctgagctaatacggcgcattagagcggattcaggtgatgagttgacaaagctgtgtatggagcttggcttacatattttcattcgttcatctgaactacgatttgctcgttgggatgagattgatttcggcaaacagcaatgggtcttacctgcaaagcgaaaccaagtaaatggtatcaagcattctgatcgaggggctaagatgaaagaacctcatattgttcccctatctgaccatgcgatcaccttactgcagaccataaaaaggctaggaggtagttctcaattggtttttccaagctcatacaatggtactgccttcctgagtgagaatacatttaatgttgcattacggcgcatggggtacgatacaagaaaggagatttgctttcatggttttagggctatggctagatctgctttaggagaatgtggtttatttcaaagagatgctattgagaagcaaatgagccatcaagagcgcaatgatgtagtaggtgcttacactcatgtggctgagtatctctacgagcgtaagcgaatgatgcagtggtggagtcaatacttggtggatattgaaaccaagggttatgtatcaccttatgattattcttatcagcaggtagtgaaagagactgcttag

SEQ ID NO: 45008 - DNA, 264 bp, Acinetobacter baumannii
atgaaacccatatctgcatatactgtcatacttaataccatagctaactgtgtaaataagatttgtgctatgggaccttttcgtgaagaagatgctaaatcaacattttttgttgaaccaaaattgcatcgcaagcttgaagtggttagtgaattattaggtttaaccaaacaagagatttacacaaaggctttacgcaattaccttaatgaaggttatctcaatgatatagacatagaatcatttattgacgaaactgcttaa

SEQ ID NO: 45009 - DNA, 648 bp, Acinetobacter baumannii
atgcaaaacttatcaatccctaaacagccttatgaacttccaacagcctatactctagccctaatacagatggcgaaatgtacaggcaaagatcccaaaaccataatcatagaagctttagatctatggctagataagcataatcaaatggcgaactcttctgaattaaagcaacaagagcaaccaaaaaacccaataaccccaatatgctcatctcaacttgatgtaattccaacaggtgaaacatatggtctactactagaaaacgatgaggggtatttactagaaaacaaaccttaccctgatctagccaaagctctaaatcaaattaaagagtatgagaaaattggccatactaatctcaacaattggaatcctataagtggtgaatatcctctagtgatcctccaaaagcctagtggacttccgcacatttggctcggccaaaactcagcatgcaagattttcaataataaggatgtcaaaccaaatagctttaaactaaccacaaatcatcccacacaaaacatttgcaagtcctgtgtaaacaactacaaggaaatctgctcacctaaagttcatctgtcctttgacagtaagaagcgattgctcccccccgatatccaaagttttaaccggctattctga

SEQ ID NO: 45010 - DNA, 240 bp, Acinetobacter baumannii
atgggtggtttttattcgagaagacataatgtaggacaaaaggtttttcctcatgagcttcatgtaggaatgctaatacatctgagtcatacaaattttggctgtgtgtggaggattactcacatcgagcctataaatgataaaggtgaagtttggttgcatttgattgccccggagtctggtagcagaaagcggtctaggtctatttatgctaggcatattcgaaggaatgagcgttag

SEQ ID NO: 45011 - DNA, 678 bp, Acinetobacter baumannii
atgacgactagaatctacttaagagcttcaaccaaagatcaagatgcacagaaagcactaaaccaattagatgacttaaaccaaacgctcaagttaggtgaatctgttacctatattgaaaacttctcaggcacgaagttggatcgtcctgaactaaacaggttgctcacagaagcaagccaaggcgacactttgatggtagaaagtgttgatcgtctgtcccgtctaagccaagcagacttccaagagcttaagcgtagaatccaagagaaaggacttcgcttagtagttgctgaccttcccacaactcatcaattgatccaaaccaatgacagcatcacaagctcaatcctagatctcatcaacaacatgctgattgatctacttgctactatggctcgtttggataacgagaaacgtattgaacgaatcaaacaaggcttagagcgttcagggtacaaaccatcaggtaagaaaccaaatgaagccaagcacaaaagaatcaaggagttgcttgctacaaataacatgactaagcaggaaattgcgaaagctgttggttgtggggtggctactgtgtatcgagtaatgaaccaaggagaagatgcagagctgaatcagcttgtcgaatctcgtgcacaacaaggcaggattcgagtagccattgaagatctttag

SEQ ID NO: 45012 - DNA, 1263 bp, Acinetobacter baumannii
atgcctgatcaacagctttccctcagtgaatacctcgaaacagttcaagagatcgtaaagattgcctttggtgatcctgtatgggttaaagctgaaattagaagcctgaacaccaagagtggtcactgctacctagaacttgctgaaaaagaagagggcactgataaagtcattgcatcttgtaaaggaaccatttggaagtccactgcagctaagcttctgtacaagtttcagaacgaaagtggaatggagctgtcaaaggacctgaatgtcctgattaaagtcaaagccagctttagtccgcaatatgggttctcagtaaacattgaggatattgactcaagctttacgctcggtgatcttgcgagacgttaccaacagatcgtaaagcaactcacagaagatggcttgattgacaagaataagaagctccctacaccatttgacatcaacaaagttctcgtcattgcacctgaacaagctgcaggattaggagactttaggaaggatgctgatattctgcataaagctggggtctgtgaattcatctatcactcagcaacatttcaaggtaatacagcagcagcaagtatcattgcttctttaagccaaggattaagacagtgggcgaatgaatacaaaacacctcctgacttgattgtcatcattcgtggtggtggtgctgtcaatgatttggcttacttgaatgattacgacctagctgctttgctttgcaaacgatcagtaccaatttgggttggtattggacatgaacgagataagaccattctcgatgaaattgcacaacgatcttttgatacaccgagtaaagtgattggcggtattagaaaccatatcgctgaacgtgtagatgaggtcaaggttttcattcaatccatccaactgtactctcagcagcagatccaagcgtaccaaagccaaaatgatcagttaatgcaaatcaccaaatctatggctcaggcacaacttaatcaagccagcaaacaagctgaccaaatgaagacgaatgtccattactttgctcagcaacaattgaaacgagcaacgcttaatgtggaaacgctgatgagaatgacgctgatccaaaaccctacaaatgtattggctagaggttatgccatcgttcgtagtggagggaaggctataacatccattcatcaagccaaggatcaaactttggcgattcaattacatgatggtttaatcaatacacaagttttacaggtgaaaccaaatgagtga

SEQ ID NO: 45013 - DNA, 195 bp, Acinetobacter baumannii
atgagtgaacaacaactaacatttaaagaaggctatgacatcttaaagaagaatgctgagcttctagagtctcaagaggagccggacattgataacctgatgaaagttgttgaagaatccatggcagcttataaaaactgtaagcaacgcattgatgcagtacaacaagcattgaatgaaagctttaaggattaa

SEQ ID NO: 45014 - DNA, 1299 bp, Acinetobacter baumannii
atggattgtaaaagcaaagtctatgctttggtggacatcaacaactgctatgtcagttgtgaacgcatctttaacccaagcttgaacaataagcctgtcattgtgctatccaacaatgatggctgtgctgtagcacgttcccaggaagccaaggacttgggcatcaagatgggtgttcctctctttcagatcaaggacatcgtagagcagcatcaggtgcaggtgctatcgagcaactatgcactgtatgcagagatgtctcgcagattcatgaaaatcctgtccaatttcgtatctcccaaagagcaggagatttactcaattgatgagtgctttctcgatctgacagctcatgcagggaattacgacttgactgaatatgctcatcagattcgtcagcgtgtgttttcttggcttggtttacctgtatgtattggcattggacgttcaaagactgaagcgaaactagcgaaccatattgccaagaagaacgcttacttctatggtgtttgcaacttggtttcaatggatccatgctctgctgaaactctgcatcaagccatagatgttggtgaaatctggggcataggccgaaagcattcaaagaagctcaacagcctggggattcattcagttatggattttgtcttggcttcccctctgatgatcagggaccagttctctgtagtgatgcacagaaccctattggaactccatggacttgcgtgcattgaactggaacatacgccacctgcaaagaagcagatcattgcgagtcgttcttttggtcaacgcatctaccacattgatgatcttaaagaagccatgtcattgtatgtcatggatgcagtgggtagattaagggatgacaagttactgtgtggttgtttaattggtttcgttcaatcaaatccatttgatagctctaagccctactacaacaagtcattatccttggctttacctgaacctacagacaatcttttgacgctctctaagctcgctacagcgatgattgatgagctatacgcccaggacattgctttcaagaaatgtggtgtcattttgacgtgcttagagccaaaatcgagccatgtctacgatatcttcacagatatggatcaggttcgcttggatgatgctttaatggattcccttgaacaaatccatatcaagtttggtaaaaccaagcttgctctaggtgcatgtatgatgcccaatcgcacttggaatatgtccagagatcgactgacacagaattactttaagtgggatcaattgctaacaattaaagattaa

SEQ ID NO: 45015 - DNA, 579 bp, Acinetobacter baumannii
atggttactcagcgtggaggatttcgggaaggtgctggtcgcaaggcaaattatgatgaacctacaaaggtaattcgtgtgccggaatctcgtgtcatcgagatcaagaattacttggtcaaatccaaagaagccaggttcaatgatatagcctcaattacacttgtagatccatctatctcgatgcacattcctttggcttcagaaaaggttgctgctggcttcccttctcctgctcaagactatgtagagaaaacactagacatgaatgaacacctcatacaaaacgaggcagccacattcattgttaaggttgcttctctgtccatgcgagatgcaggaatcgacattgatgatgagcttgtcgtagaccgcagtattgaagccaaacatgaagacattgtcatcgctctcatagacaacgagttcaccgttaaacgcttaatgattgaagctgatagccattggcttaaagcagagaatccagagttttcagacatacatctcaaagatggccaagagatgattatttggggtgttgtcacctatgtattgaagccattcagaaagcgtaagtaa

SEQ ID NO: 45016 - DNA, 807 bp, Acinetobacter baumannii
atggattattcatatcttcaacatattgctctagaagtttgtcagcaagcagacaaattcaatattccttataaagtatattggtattcacccgattcaagaaaagctaacccaaagtcaaagataggtcactatgtacaaccaaacgtaaagtgtttgtttaagcatggttgtaaatgcatcattttgtttagaaaggagcactttcggcagattcaagtcattttcaacctatatcgaggacaggttcctagaatcaaggagcttgagaatttcaaatgtaaagatgctataggctttgatgtctatcaaagagtaaatgagcttcatctgtttattgagcctgacaatgtttcttctaaagaatttacagtcgaagggatgaagaagaggatagattattggaagaaatatcagcttcaagtcctggagaacattcagcctcctatgcctcaaagagacattaatagttatatgaatagtctcacgcatgttcttgatcaggcaattgcttatttacaagccaagaataatcccaatgcaaaactcagagtaagacgaaatagtggcgttagacacagaatggttagagttgatctagctgataataagtcaaaaaaagagggattctctgatttggtttttgtatttagtacaggacgtaacttctctcatgtcaaattacctaaagaaccaagcccgacaagaaaaccaagatcagacagtattaaggcccagtatgatgctaatccattggctttcaaatattacgataattttggcatctttgagatctatgatcgctag

SEQ ID NO: 45017 - DNA, 1548 bp, Acinetobacter baumannii
atggctcgtgctccaaagcaaaccaaacaagaaccattagaggttgtactgtggaaaacagcagacaagcttcgtaagaacattgacgctgcagagtacaagcatgttgttcttggtttgatcttcctcaaatacatcagcgatacattcgaagctcactacaacttactcgtagaaggtgagggagagtttgcaggagctgacccagaagatcgtgatgaatacactgcatacaacgtattcttcgtccctgagaatgcacgttggtcttacctgttaaaccaagccaaacagcctaacattggcaagctcgtcgatgatgcaatggaagccatcgagaatgacaaccctcaattgaagggtgtacttcctaaggtatatgcacgtcagaatcttgatcctacgagcctaggagagctgattgacctgattggtaacattgcactaggcgatgcgaaatcgcgctctgccgacgttctaggccatgtattcgagtacttccttggtgagttcgctttagctgaaggcaagcaaggtgggcaattctacacgcctaaatccatcgtaagcttattggttaatatgcttgaaccatataaaggacgtgtattcgatccttgctgtggttcgggtggtatgtttgtacagtcggagaagtttgtagagtcgcatcagggcttggtagatgacatctccatctatggtcaagaaagtaaccagaccacttggcgtttggccaagatgaacctggcaattcgtggcattaactcagagcatgtgaaatggaactctgagggttcattcctgaatgatgcacacaaagaccttaaagctgattacatcattgccaacccaccattcaacgtctctgactggagtggtgagcaattggtaggtgatgctcgttggtcactgggtacacctcctgcaggtaatgcaaacttcgcatggatgcaacacttcttgtatcacatgagtcctaaaggtcaggcaggcgtagtccttgcaaaaggtgcgcttacctctaagacaagtggtgaaggtgagattcgtaaagccttggtttcagaagccaatgtcattgactgtattgtgaatctacctgccaagctgttcttgaatactcagattcctgctgctttatggtttatgcgtcgtgatcgtgttggttcaacccaatacaaagatcgtagcaatgaaatcctattcattgatgctcgtaacttgggtcatctcattaaccgcagaaccaaagtattgtctgatgaagatattaagctcatcactgacacttaccacaattggcgtaacaaagacggtgaatacgaagatgttgcaggtttctgtgcatctgtaccacttgaaaaagtggcagagcttgattatgtactgacaccaggtcgttatgttggtttagctgatgatgaagatgagttcgactttaaggaacgctttacgagcttaaaggcggagtttgaggcacagcttgcagaggaagcgaagctcaatcaagccattgctgagaacttggctaaggtgattgtatga

SEQ ID NO: 45018 - DNA, 1188 bp, Acinetobacter baumannii
atgagtgaatggaatcaggttgtattagacgatgtaagctcaaaaattggggatgggctacatggcacaccaacctatgatgataaaggcctttatagcttcatcaatggcaataatttgctaaatggtcgtattgtcataaaaccagagaccaagagaattaccgaagaagagtatcttaagattttaaaaccattagatgattctacgattttaatttcaattaatggcacgattggtaatgtagctaagtatcgagatgaattatgtgctttaggtaaaagtgcctgctacataaacttagatacaaatcttgtggatcgagattttttctactatgaatgtttatctgataatttccagtcacacctccaaaatgtagcaacaggcacaactattcctaatgttcctttgaaagggatacgagcgtacaaattcaacttaccacctctccctgaacaaaaagccattgcctcagtcctttcatcattagataacaagattgacttactgcatcgtcagaacaagaccttagaagccatggctgaaacattgtttcgtcaatggtttattgaggaagcgaaagaggattgggaagagctttcagtaagtgatattgctattcatattaaagataatgtgaatccatcaaaggaccctcttaagaccttttatcattttagtctgcctgcttttgactcaggacaaaaacctacaagtgaattaggctcggagattcttagtaacaaatatcgagtttctaagaactcaattcttgtgtcaaagctgaacccaagagttcctcgtatatggctcgtatctaatgttgaagataactatgtgtgttcaactgagtttcagaatttgaaacccaaagtaacagctcatttaatgttcttatatagcttgtttaactctagagatgtaattgatgaattaactatgagtgcttcaggtacgagtgggagtcatcagcgagtgaagccagaagatatgttgaatatcacgtttaggacaccaagcttagactatcttgagcaatactcatcattgattgctccttctatgcaaaaggtggcgagcaataagcaacagatcaaaacactagaaaacctaagagacacacttctaccaaagctcatgagtggtgaagtgagagtccaataccaaacagaagaagttgcataa

SEQ ID NO: 45019 - DNA, 567 bp, Acinetobacter baumannii
atgaagcaacaattactgattttagctatggtttcaattttcattttgggaggttgcgctaaaaaagctgaagatgcagcttactcatttgaggaaactacattagatgatgaaagtgagattgagtcagaggcagatagttacaattattcagatgcagatacttacatttattcgggtaatgataattttacagatagtgagtctgaagaatatttagtaggagaggaatcttcttctggatatgtaagtgatagaagtaattgtacaggtagtgaaactatgtatacctgtgtggatccaaacaatggaaatacttatgagattactaagtatggaaatactacagaagttcagggtagtagtttatcaggttcaacgtggagtcaaacaagtgagaccattggtaatacggtatatacgacaggatatgacaaagatgggaatgaatggaatcagacaggtgaaaagataggtaatacttattactacaatggaaccgatagtgatggtaatacatttagcggatcatgtgattcatattcaggttgctctaataattattaa

SEQ ID NO: 45020 - DNA, 3246 bp, Acinetobacter baumannii
atgactaaaatgaccgaatcagacattgaattgatggctatagagcagttagagggattgggttatacctatgtgtatggtcccgatattgaatccaagggaaacaaccctctacgaaactacaaacaggtcattttagaatccaaagtacaggaagctttgcagcgtttgaatccacatctaagtgaggacaaatgtatcgaggcgcttaagcaaatcaccaatctacaatcccctgatatgctcaccaataaccaggcattccaccgcttacttactgaaggtattaacattgaagtgagtaaggatggtaatactcaaggtgaatatgcctggttaattgatttcaatgatccaactaataatgaattccttgtcgttaaccaagtgaccgtcaaagaagatcgctggaccagacgaccagacctaatcctatatgtgaatggcttaccgttggtagtcattgaactcaagaacgccactgatgaaaatgctactgtggatggcgcatataagcagatccagacttatcaaagccaaatccctagtctgttcacctacaatgcctttaacgtcatctctgatggtttagaggcgaaagcagggactgtctcagcagacctgagtcgttacatggcgtggaagacttctaatggtcaaaccaaagcaaagaatacgcaggcacagctagaagtcttaattcatggtttgctcaatccagtcaccttactggacatgatcagacacttcattgtgtttgagtccaacaaacaagaagatgccaacggcttaatcactattaagaccatcaagaagatggctgcataccatcagtactatgcagtgaatgcagcagtactctctaccattcgtgcatctgcaatgtcctcggactcgaaatcagcagagcttgccatgcaacaccaaggcagaagtaagctcgaacttgtgcaacaacaagctgtaggtgataagaaagcaggtgtggtttggcatacccaaggttcaggtaagtccctgtctatggtgttctacacaggcaagattgtcttggcattggataacccaacagttgtggtgattacagatcgtaatgaccttgatgaccaactctttggaacctttgcagcatcaagccaactccttagacaaacacctaagcaagcagataacagagaagaacttaaagaacttctcaaggttggttcaggtggtgtgatcttcacaaccattcagaagttccaacctgaggatggcagcagtgtctacgaacagctctcagaccgaactaacattgttgtgattgcagacgaagcacatcgttcacagtatggtttcaatgcaagagaagtcgatgtcaaagatgacgatggtaaggtcatcggtaaacgtaccgtctatggttttgctaagtacatgcgtgatgccttaccaaatgccacttaccttggtttcacaggaacgccgattgagaagactgatgtaaacacgcctgcagtattcggtaactatgtagacatctatgacatctcacaagctgttgaggatggtgcaaccgttcggatcttctatgaaagtcgcttagctaagattgcgataagtgatgaaggtaaagagctgatcgaagactttgatgatcagtttagtgaagatgacttaaaccaaactcaaaaagaacgggcaaagtgggcaagagtcgaaggacttattggcagtaaagaacgtatcaaggctatcgctaaagacatcgtagaacactttgaacaacgtcttgttgccaatgcaaaccaaggtaaaggcatgatcgtcagcatgtctcgtaggattgctgtcgacctctacaacgagattgtagcgatcaaaccagaatggcatagcgatgatctaaacgatggtgtgatcaaggtggtgatgacctcatctgcttcggatggtgaagaaattgccaagcaccatacaaccaagcagcaacgccaaatcctggctaatcgtatgaaggacaacgatgacaaactgaagctcgtcattgtgcgtgatatgtggctgactggtttcgatgcaccgagtatgcatacgctctacatcgacaaaccaatgaaaggtcataacctcatgcaagcaatcgcacgagtgaaccgtgtctacaaagacaagataggtggcttggttgttgattatcttggtattgcgtctgaccttaaagaggctctgtcattctattctgaagcaggtggtaagggtgaccctgcattagtgcaagacgaagctgcaaccattctacaagagaagctcgaagtgattgaaggcatcatgcatggcttcaattaccaagaatacttcacagccaatacttctcgtaagctcaacattatccttgaagcagaagaacacatcttaggtgtagaccaaggagaaggtaagactcgcttcctgacagcagttgcagcgatgtcacaggcatttgctttagcagtgcctcatcctcatgcgatggaagtagcaccagtggttgccttcttccaagcagtgaaagcgcgacttgcgaagttcagtgatggctcaggcaacgtctcaggcatgagtaatgctgagcttgaagccaaagtaaagcaaaccattgaccaagcacttgttacagaacaagtggtcgacatcttcgatgcagcaggaatccagaagccagacatctcaattctctccgatgagttcatgcaggagatgaaaggctacaagcacaagaacattgcactggaaaccctgaagaaattactcagtgatgaaatcaaggtaagagaacagcgcagcgttacccagggtaagaagctcatggacatgctgagctccgcgatcaagggctatcagaacaaggtgctgactgcagcagaagtcattgatgaactcatcaagttggctaaggcaatccaagagtcagacaaaatggcagaagaactcaacctaactgaatacgaatacgccttctattcagcagtcgcagacaatgagagtgctcgagagttgatgcaaaaggatattcttagagagcttgcagttgtcctcacagactcgattcgtaagaacgtaaccttggactggaccatcaaagaggctgctagggcgaagctcagagtcatcgtaaaacgcttactgaaaaagtatggttatccacctgatatggctttgctcgcaacagagactgtcttggagcaggccgagcaattggcagaagaactggcaaatacagcctaa

SEQ ID NO: 45021 - DNA, 1029 bp, Acinetobacter baumannii
atgaaaatattgcatattgcaaattttggctttaataaacaaggcgcacatttttactgcacagaccgtaaaatttctgccggattaattgaaaatggccatttcgtttatgattttagtttccgtgacatggcgcgaatggggacaatctttaaaaccaaaaaattaggtgcaaagtgggccaataaagaagtactcaaggttgttaataatattgagcctgatttggtgctaattggtcatagcgacttgatgagtccagatgttttaagacagattaaagagtcttatcccaatactaaaattgcattttggtatgttgatccgctttatcttgaaaacaaactcgactttgtcaaagcgttctcgccatatttagatgctattttctgcacaacaggtggggaatatctacaaaagttaaaacagcctcatttaagtgtggcctacttgccaaatgtggggcatcgtaatgtagaaacactacagcaattttcaaattctaagactgacaagacctttattttctgcggcgtggtctataaagaacctgagcgtgagaagttcttaaaggatttggcagatgctttgcaacaaggtcatgtgaactatcaatattatggttgttttgaacaaccgggtgtttatggtaaagcctattataaagttctgtctgaaacaaaaatgggacttaattactcacgccgtaatgatgtaaccttgtatagttctgaccgtattgtacagctgactggtaatggtttactcacttttagtccaagaattccgggttttgagaagctctatactgagcaggaagtggtttactttgatgatcagtttgatttagccaaaaaaatccaattctttgatcaaaatccagagcaggctgaaaaaatagcgaaagaaggctgggagaaaacacgcaaatctttcaatgctaagcgcatcacccagtttatggttgaagtgacatttaagcagccactttcagaagattatgaatggtcacatgaggtttatgcatga

SEQ ID NO: 45022 - DNA, 756 bp, Acinetobacter baumannii
atgatgtggtttttgtacgttgcggtgggcctattagtacttgctgcactgttatatgtgctaggtaattatacattctggcttccgttccgttcgaacaaactacctcgtattgtcatgttgcatcaggttacccctaaagatgcagcctctggcatgaacatgcctcctgaaaagtttgaacaactcttacaactgttaactcgtaaaggggctatcttttgctttgtttctgagcttgagcaatatcgtaatcaaaagaatgtggttgctttaagttttgatgacggttttatggataattatctctatgcttatccattactcaaaaaatataacgcgaaagcaactatttatttggcaactcaaattgaaggcatcgaaaagcttactcatgagcaaattcatgaaatggcgaattctggtttggttgaatttggtgcgcatacccagcatcatgtgaacttacttaagcttgatgatcaaactgcttatgatgagatgcttcagtctaaacgtgacgttgaagcattagttggaaagtgcccgagttttgcttatccatttggtcgatttaatgaaaagcaccagaaaatggcgcaagaaattggctttaaaaacgcagtatcgactcgtaaaaaaatcgaagcgtatgaagcagataaccaatttaatattccacgtgtcagcacgcatggtaccatgaatgctttacagatgcgtatcgcccttgctaaaggacgttataagttatga

SEQ ID NO: 45023 - DNA, 765 bp, Acinetobacter baumannii
atgaataaaattccatgtagtgtctatattgttactttaaactgtggcgcttggttagagcgaactttacaaagtgtcagtgagtttgatgaagtcattattttagactctggcagtactgataatacttatgaaattgctcagcgctttgaaaatacgcaaatatctcatcaagattggcaaggttacgctgggcaaaaaagtttagctttagcaaaatgccgaaatgagtgggtgctcaatctagatggcgatgaagttttatctaacgagttaaaacaagagattgttgagaccattcaacagaacaagcttgatgcattaatcacaccaattaatgatgtgttcttaggtgttccaaacagcaaacatactaaaaaacatgcaaaggtacgttttttccgtaagtctaaagggcattatgatcttgctaataaggtccatgaaaatgtgatcgtagatggtgaatctcaacgtgctcaacacgatatttaccattatggtgagtcgagcattttcgttaaagtcgaaaaaaataaccaatattccaacttaaaagcattagagaaataccaaaaaggaaagtctccaagcattgcaaaattggttttggtgatgccagtgacttttatgaagtcttattttattcgccgtagcttcttaaatggttggcgtggtttcgtaaatagtatgattaacgcattttatgcatttctaaaagaagctaagctttttgaacagaccatgaataaagataaaaaataa

SEQ ID NO: 45024 - DNA, 1035 bp, Acinetobacter baumannii
atgaaaattgttcaggtattggcaactagcggtggagttggtggattagagcagcacacttttaaccttgttaatgagcttgctttaaaccatgaagtacatgtgattgcacatccttgctatgtagacaagtttagccaacaagtacattttcatgctatcgattttgcccgtagtcgttggaatatttttttactttggcaacttaaaaatcttattcagcagatccaacccgctattgttcatgcacaagcaggaaaagcggctgagctgattgcccgcattaagccatttttatctggtccaaagtttgtaacgactgttcatggtactaaaaagaataagtctgcttatttagcaggtgatgcagttattgcggtgagccaagcgctcacgcaaggcattccagagtctaaagcacacgtagtttataacggggtatatcctcagcccgtacttacaactgaaaataaagaaaaattgcttcaatcgattcaaaaagattttactgagctagacacaagtaaaaaagttgttatgtgcattggacgtctagaaccagtaaaaaatatcagcttattgattgattcgatgcaacagattgatgccaatttatggattgttggtgacggttcacttcgagcaagtttggaaaagcaagtcagcgaattgaacatgcaaaatcgggtcgcttttcttgggtttagaactgatgcgcgtgatctggtacaactggctgatatcgtggttttatcatcagatcgtgaaggttttccacttgttatggtcgaagctttacaggccgataaagcaatggtttcaactaaagtgaacggtgtgatcgagtggttgccagagcaatatctggcacaaattggagatactcaaggtttagcaaaagcgattgaatatgcccttcaacctgaggctcaaaatgacttcagcccactatatgcaaaggccaaggctgaactgactgtaccagccatggctgagcagacgcttaatatttataaaggcctgctgaaaacttaa

SEQ ID NO: 45025 - DNA, 894 bp, Acinetobacter baumannii
atgttattaactcgcggtcttcaaaaaaaatggtacaagtaccaacaagcaaaaaaagcaaaaacttttgactctcattggtatatgcgttttggctggttagaacaaccttttacaacacttgagcaattagattctctctttgaaatccattcccctagaaagtttacttttgcagatagtttttatgcttatgaaaatggccgtcatttcattttttttgaagaagttgatgatgaacatccagtaggttttctttcagttttagaagtctttaaggatggcacttacacaccgcctgaaactattttaaaacttgactatcatctctcctatccttgtgtatttaaaatagataacacttggtacatgattccagagtcttctgccaacaaaactattgagctttggaaatgtaccgaatttccattgaaatgggaaaagcattctaatctgatagagaatatcgaagcagtcgacagcacccctttttaccatgagggcttatggtatctttttacctcaacgcgtcgtgattgtaaaaagtttggtgaccgtttagatttgttctttaccgaagatattttaaatcctaactggcaagagcacccaatgaacccagtgtgccgaggaagtcagcagttccgtatggcgggcaaaccttttgtttacaaagggcaactggttcggccaagccaagattctttaaaacggtatggcggcaatatcgaattaaaagcgattactcagcttagtccagcagcttatgaagaaaaattactagaagtggttttaccagactggaatcaggctgatgatggttgccataccattaatgtcgaagataatttcgtggtacttgatgccatccgccttacaccaaaaaataattaa

SEQ ID NO: 45026 - DNA, 816 bp, Acinetobacter baumannii
atgaaaaaaattcttatcttgtgtgtctccttaaaaggaagtaatgaacgacaagaaaaaattaaacagcaacatcaaagtttgcaatcggtcattcacgatatacaaattgattttgaatttttcgaagcaatttatgggaaaaaacttcctaatgagtatttaacttttttaaatttaagtcgtcagtttgctggattatgtgatcatgaattagggccaagtgaactaggctgctggttaagtcatatgattatttggcaacgtctagctcaaggtgattatgcagcatatgatcgcataataattattgaagatgatgtaatttttcaaaccgaacatatacaacagaaattacattctttattagaaaccaatcccgcattcgcattcttaggaggacactctgaaccatctagacgacgaataagaggatacgtaagtaaagatgaactttacttcaatatgactggccctaaagacctatatacagccacatatgcgtactctttaacccgagaaactgctcaagattttgtcaataagcaaataaagaaattgacttatattgatgactggaaatatttattagaaggagatatttccactcctttttattattgctttgagcatgacgacgagatgcaaagccatattgcatctgatagaaaaacatacatgaaaaagccaaatcgctttaaaaagaactttaacaaaatgaaaaatgatttaatttctcgggttatttctctttttattttcaaaaaaattattcgattagcatactttctccaatccgcccaaacacaaaaatga

SEQ ID NO: 45027 - DNA, 1128 bp, Acinetobacter baumannii
atgattaaagttcttatctcatttggtacgcgtcctgaagctattaaaatggcacctgtaatccaatgtttaaaaaaagacaatagattcgatgttaaagtattagtaacagctcaacatagagagatgcttgatcaagtattagaagtttttaaaataactcctgattttgatttaaatttaatgaaagctaatcaaagtttaaatcagctttctgcaaatattttacaaaatatggatagtatttatcagaattttagaccacatatattattagtgcatggtgatacattgtctgcatttgtggtggctcaatctgcattttataaccaaattgatattggtcatgttgaggctggtttaagaacttataatttaaagtcgccttggcctgaagaaggtaatagacaactaatttctaaaatttcaaatttacattttgctccttctgagttggctgctgagtgcttaaaaaaagaaaatattcagttagataatatatatattacggggaatactgtagtagatgcattattaagtgtttctgaccaaattttacctttacctataaaatataatggtagtaagtggaacttggatgaaaaaataaaaaaaattctgatcacagggcatagacgtgagaattttggtcaaggttttattaatatttgtcaggctataaaagatttagccttaaagtatcccgcaattgagtttatttatcctgttcatttaaatcctaatgtgaaagatattgtttttagttatctaactgatattaaaaatattattttattaccaccacagtcttatttagaatttattaatttaatgaaacatagttatctaattttgacagactctgggggaattcaagaggaagcaccaagtctgggggtgccaattctagtaatgcgagatactactgaaagacaagaagctattgatgcaggcacagtcaaattggtgggaacagaaactgcttcaataacattttgggtagaaacattattggaaaatagtgagctgtatcatcagatggctagagctaacaacccttatggggatggtacagctagtattaaaatcaaacaaattcttttggataaatatagtcatacaatataa

SEQ ID NO: 45028 - DNA, 774 bp, Acinetobacter baumannii
atgatcccacgcataatacattattgttggtttggccccaacaagatccctgaacaacttgttaaatatatggaatcatggagattattttgtccagattatgaaataaaattatggaatgaaaaatcatttgatataaacagccatcctttcaccttatcagcctataatcaaaaaaaatatgcctatgtatcagactacgtaagagcttatgctttacataattttggaggaatttatttagatactgatgtagaactaaaagaaaatcttgatatttttttacagcacgaagcctttacaggtttcgaagggaaaggctctccttttactgctgtttggggctcaataccaaatcatagcctaaccaaaagaattttagaatattatcatgaacgtatttatacagctgaagagagtactaatactttttcggtatcagaaatattaagagaaaagttttttattgatcctttaaataataacttgcaagttggaaaggattctataaatacaattcatgtatatccatcaacacatttttgcttagacttacctaaaaattttgctacgcatcatttttatggttcttggttaccagatagaactaagagttataaagaaaatgcagtagagatatattttaatgaacaattagaatctttagaaaatattactcacagtaaaaactttctaaagactctagctactcgtattaaaattaaagatttatttaaacttatacgttattttatacaatataaactaaagtaa

SEQ ID NO: 45029 - DNA, 216 bp, Acinetobacter baumannii
atggctatgcgcccagatgtacgtcgacatgctttagtcgtgattgtattctccctcgcacaatggtttttcatgcgctacatccttgcgaatgaattatttaaccttacgacaaatcaacgtattctttatttctgtgtaagtagtttagtcggtgcattacttatctttgttgcactgatttatatggtgctcaaaggtaatgcggataaataa

SEQ ID NO: 45030 - DNA, 1779 bp, Acinetobacter baumannii
atgatgcgaactcattactgtggctctttaactgaagcccaaatcgaccagaccgttacattatgcggttgggtacatcgtcgccgtgaccatggcggtgttattttccttgatatgcgtgaccgtgatggtctcgttcaagtggttattgacccagatactccagaagcatttgcaactgcagataaagcacgttctgaatatgtattaaaaattacaggtcgtgttcgtcgccgttatgaaggtactgaaaacccaaatatggtgagtggtcaaatcgaagttttaggcaaagaaatcgaagttcttgctgcatctgaaactccaccattcccattaaatgatgacactattaacgtgtcagaagaacaccgtttaaaatatcgtttcttggacatccgtcgtccagaaatgttagagcgtttacgcttccgttctaaagtaaccaacttgattcgtaactatttagacgaccatggtttcttagacgttgaaactccgattttaactcgtgcaacccctgaaggtgcgcgtgactatttagtaccaagccgtgtacaaaatggtagcttctatgcacttccacaatcaccacaattgttcaaacaattgttgatggttggtggtattgatcgctactaccaaatcgcgaaatgtttccgtgatgaagacttacgtgctgaccgtcagcctgaattcactcaaatcgacattgaaacatcgttcttaaacgacgatgacattatggatttgatggaaggtatgactgttaaattatttaacgacttgcttggcgtaaaatttgaaaaattccgccgtatgccatacagcgaagcaatgcgtgattatgcatctgacaaaccagacttgcgtattccgttaaaactcgttgatgttgcagacttaatgcaagaagttgagttcaaagtatttgcaggtccagctaaagaccctaaaggccgtattgcagcacttcgtgtaccgggcgcaggttcattaacacgtagtcagattgacgaatacactaaatttgtcggtatctacggtgcaaaaggcttagcgtacattaaagtcaatgaaatcgaaaaaggaattgaaggccttcaatctcctatcgttaaattcatcgaaccaatcgtaatgcaattgcttgaacgtgttggcgctgaaaatggcgatatcgtattctttggtgcggacaaagctaaaattgtaaatgatgcaatgggtgcgcttcgtgtcaagatcggtcatgacttgaaccttgcgacttgtgagtgggctccactttgggttgttgacttcccaatgtttgaagaaactgacgatggcaaatggacttctgtacaccatccattcacattacctaaatctagcgtagaagacgtgaagagcaacccaggcgaagcactttctgttgcttacgacatggtattgaatggtactgaagttggtggtggttcacttcgtatttacacattagaaatgcaaaaagcgatttttgaagcgcttggtatttccgatgaagaagcagaagaaaaattcagcttcttactcaatgcgcttcgttacggcgcacctcctcacggtggtttggcatttggtcttgaccgtttagtaatgcttatgactggcgcgacttcaattcgtgatgttattgcgttccctaaaacgaaaactgctgaatgtccacttactcaagcaccggctcctgtggaagcaaaccagcttcgtgacttgggcatccgcttacgtgaacaacaaaagaaagaagcttaa

SEQ ID NO: 45031 - DNA, 765 bp, Acinetobacter baumannii
atgccttttacaatctcccatgcagttatcgcccctccacttgctaaattgagccgaaatacgttacccattgccgccttagcaattggcagtatgacgcccgatctttaccgcttatttacaatgcaatcaggtatgctgacccatcaatggaaggggcttttctaccctaaccttacattagggttattattctgtgtcatttggtatttactttatcgacctgtggtttaccgtttttttggtatccaacacgatttaaaactagattcttttagacatttttttagcttttttattggaatcataattgctctactcattggtgtagcaacacatctcatttgggatgggcttacgcactcagactttagaacttttatatttcaagactttttatctcaaactgttcacttgtttggccacccttatccattgcatcgccttcttcaactcggttcttctgctctggcattaccttttttaggctggatgagtattcattactatcagcgccataaacagcattggaaagtaaattataaaattaaaatttttgcttggtgtttatttactttatctacacttttaggcttattttcattttgggactatgcccgttatattccccatgaggtttggcattctgatacctattattttactggccgctctattaatgagtttatgcaaggttggttaagtacttttagtttgggatgtctattattcttatttttagatcgacaacaaagaatgggctaa

SEQ ID NO: 45032 - DNA, 2076 bp, Acinetobacter baumannii
atgttgttctataaaaatattttgaccttatccattttggctgccatatccatacctgtatttgcagcagaaaatgaaaatgttgagaagttagaaactatccgcatcaaggcgcacccccttgagcaaacttcaaaagattttgcagtcgcagatactgtagttgaccaaaagcatttaactgaaggggccgccactattggggatgcgctcaatagtgaggtggggatttatgcgaatcagtttggggctggttcaagtcgtccggtgattcgtggccaagatggaccacgtgttaaagttcttcaaaattcatctgaaaatgtggatgtctcaactttgtctcctgatcatgctgtaacagtagatccagttctcgcaaaacaagttgaagtgattcgtggaccctctactttattgtttggtgcgggaactgttggtggtttagtcaacgttattgataacaagatccctacacaaatgcctgaaaatggttatgaaggacaagttggcttacgttacaacactggaagtgatgaaaagctggcgagtgctggtgtaactgtagggttgggaagccaagttgcattacgtgttgaggggttaacacgtgatgcgaataactatattgcaccaaactatattcatgaaggtgaaaaagagcgccgtgtagacaatacctttgcacaaggtgattcagtgaatgtggggttgtcttggatttatgatcgcggttatacgggtatttcgtatagtaaccgtcgagaccagtatggtttaccggggcatagccatgaatatgaaacctgtagcgctcatttaataggtagaccacatttacattgtgatgctcatgagcatgatcatgaagagggtgaagaggctcatgcccatgaagaacatgagcacgaacatggcggcccatggattgacttaaaatctgagcgttatgattttaaaaccgagttaaatgatccatttgcaggcttccaaaagttacgtgcccaagcgagctatactgactatcagcatgatgaaattgaagaagggacaatcgcgactcgattccaaaacaaaggttatgatgggcgtattgagttagtccataatcctattgctgattgggaaggggtaattggtacccagttaggccaacaaaaactaaatttaactggtgaagaagcatttatggcaccaaccactaccaaaaagtggagtgtttttgctttagaacataaacaatggaaagatgttcattttgaactttctgcccgtgcagatcagcaagaaattgatgtagacgataattctaaacaagattttgatggttcggcattttcttacgcaggtgctgcgaattgggagtttgcaccgaactataaactctcttttgtcgcttcacatcaagagcgtctgcctcttgctcaagagttatatgcaaatggtgcccattttgcgaccaatacttatgagttaggaaatgatcaactcagtaaggaaaaatcaaataatgttgagttaggtttgcattttgataatgacaaacttgattatcatcttcatgtttaccataactggtttgatgactacatctatgcgcaaacccttgaccgttataaagacttccgtttagttcaatacactcaagataaagcacgtttctatggtgctgagggtgaaattggttatcaaattacaccaatgtacaagatcagtgcttttggcgattacgtgcgcggtaagattgatgccgagggcaatgctccccgtattccggctgggcgtttaggtgctaaagtcgatgcagatttcggtgacggttttagtggttctgctgagtactatcatgtctttaatcaagataagattgcggcttatgaaaccaaaacagaaggctacaacatgctcaatttaggggtagcatactctggacaatatggtacaaaaacagattatcgcgtttatttaaaagcgaataacttgttagatgacacggtttatcaacatgcgtcgttcttatcaaatatcccgcaagttggacgtaactttaccgtcggtgtagattttagtttctaa

SEQ ID NO: 45033 - DNA, 1464 bp, Acinetobacter baumannii
atgcgtatttttcagcgaattcatcaaaagttaaattggtcaggacgtcgttatatggcggtcatactttgcgttgttgctattgcatatcttgcatcggcaatttatcacacagtgaaaccattgccgcaaggaattaactttagtggcaagctcagacatgccgatgttaaatttttagccgataaaacgtatattgatgcgaatgggcaacaacaggttgatcagcacatctttgatgaaatcttgaaaatgattgatgaagcaaaaaccacgattgtggtggatatgttcttgtttaattcagaagtgggtgactcgaaactcaagcaaagaccattgatgcaagagctcactgatgcactaattagtaagaaaagacagaaccgccaaattcaggttgttatgattaccgacccgattaattcggtatatggtggactaagccctgaacactaccgtcaattacgccaagctggtgttgatgtcatcgaaacgaatctggcacctttacgtgcttctaacccattctggtcagggttttggtacatctgttgccaaaatattggcaataatccagagaaaggctggttacccaacccatttggcgatgaaaaaattacgctacgtagttatttgaacttatttaactttaaagcaaaccatcgtaaaactgttgtcgttgataccgatgcgggttggaagtcattggtgacctcagcaaatccgcatgatggtagttcgcgccattctaatgtggcattggtggtaaatggagccacagctgctgatgtactccaaaccgaagctgctgttgcgcaaatgtcaggaagtagttcaccatcacttatattaggcgattttgaaaaagacgttagcaagcctcaagttcaggtgctaactgaaggggcaatctatgaagctgtattaaaattgattaatacggctaaacctaaagaatatcttgatttaagtatgttctatttgtctgaacgtaagattattaaagctctaaaaagtgcccaagaacgtggcgttattgttcgtgttttactcgatccaaataaagatgcgtttggtagacaaaagaatggtatcccaaaccgtcaagtagcttcagagttacatgctgctggcattccaattcgttggtgtgatactcatggcgagcagaaccatagcaaaatgatcttgaaatataatgctcaacaagctgagttaattgtaggatctgccaattttacagcccgtaatttaaaaaattataaccttgaaacggatatgttggttgtaggcaaagttcaagatcaagtctttaaagacgctcagaattacttcaatacctcttggtcaaacctacaaggtagacagatgagcgtggactatgcgaagtatgctgatgagtctaaagtgaagtattggatttatcgttttatggaatggtcaggtttatcgactttttaa

SEQ ID NO: 45034 - DNA, 933 bp, Acinetobacter baumannii
atgaacgctactgtagaacagcttgcacctgtagaacagcaagcgaccgcgggttgggttgttgcagcactatatcaatttaaagaagttcaagatccagctgatcttcaacaacgtcttttagacttagtgaaaacaattaacctttgcggaactctgattgtagcaggtgaaggaattaatggcaccgttgctggggaccgtgaggcaattgatacgattcatcaatttttgttaaacgaaggttttaacgctatggaatataaagaatcccatagttctgacaaacctttccgtaaaatgaaaatcaagcttaaaaaagaaatcgtgactttaggtgttgaagtaaaacctcgtgatttagtgggtcactatcttgatcctaaagaatggaatgagcttattgcacgtgatgatgtgattctaatcgacacacgtaatgattatgaatataaagccggaactttcaaaggtgcgattgatccaaaaacagaaactttccgcgaatttcctgaatatgtaaaaaaagagttagaacaacataaagataagaaaatcgcgatgttctgtacgggcggtattcgctgcgaaaaatcaacttctttacttcttcaagagggctttaaagaggtttaccaccttaaaggcggtattcttaaatatttagaagaaactcctcctgatgaaagcctttgggaaggtgaatgtttcgtatttgatggacgtactgctgtaactcatggtgttgaagaaggtgcaaacattaaatgtcatgcttgtggctggcctttaactcctgaagagtctgcgctaccaagctatgaacatggtgtttcttgcttgtactgtattgataaaaccactgaaaaacaaaaagctggcttccgtatgcgccaatcacaaattgctgccgctaaacgtaaacgtctataa

SEQ ID NO: 45035 - DNA, 525 bp, Acinetobacter baumannii
atgagtgcattagatttagaccaattaagtgaatatctagatggagaccacaatgagtatggtctagactttgctgcaactcatggatttttgtgtgcaattgcagtaggtcctcagtttgaccgttggttagatgaattgttcgaaggtaaccagaaaaaggttccggctgaaattattcaacaaatcaaggtttggctagagtcgattcgtcaagatttagcaaatgaaaatgggattgaatttccatttgaagttgaagaagctgacgttgaatcaagcctaggcgattggagtgtagggtttgttgatgcaatgttcttaaacgaagaggcttggtttgcccctgagtatgaagaacaattggttgatttgactttaccaatcatggtttttagcggaattgatgaagaagatccacagatggaatctttccgtcgcaatggacagttaatggatgaactggcagaagaaatcccagataatttgaatgagttatatttgatgtaccatactccaaattaa

SEQ ID NO: 45036 - DNA, 207 bp, Acinetobacter baumannii; identical to SEQ ID NO: 43916

SEQ ID NO: 45037 - DNA, 1887 bp, Acinetobacter baumannii
atgagcgatatgcattcccctacttctcaagtagcggctctgattagccgaggcaaagaacaaggttacttaacttacgctgaggttaacgatcatctgccggactcgattactgaaagcgaacagattgaagacatcatccagatgcttcaagacgttggtattcccgtacacgagcgtgcacctgaatctgacgataccatgttcggcgaatcagctgatgcaactgatgaagttgctgaagaagaagctgctgccgtacttgcatctgttgaaaatgagcctggacgtacgacagaccctgtacgtatgtacatgcgtgaaatgggtacagtagaactgttaacccgtgaaggtgaaatcagcattgctaaacgtattgaagaaggcattcgtgatgtcttgaactcaatcgcttactggccaaatgctgttgaagttgtattaaaagaatataatgattttttaactggcgaacgccgtcttgccgatatcttatctggttatttagaccctgaaactgatgaagatattcctgaagttttagaagacgttgaagagcttgaggaagaagacgaatcatctacaaagtcaacgaaagaagttaagcttgatgatgacgatgaagaagaagagtctgaaggtgatgatgattctgaaggtgattcaggtccagaccctgaagttgcaaaagttcgttttgctgaattagaagctgcatgggctcaaactaaagctgtcatcgaaaaacatggccgtaatagccctgaagcaaatgaagctcttgagtctttagcaactgtatttatgatgtttaaatttactccacgtttatttgacatcatttcagaaatgattcgcggaactcatgaacaaattcgtgccaatgaacgtgaaattatgcgttatgcagtacgtcgtggtcgtatggaccgtaaccagttccgtacatctttcccgaaacaggaatctaatcctgcttggttagatgaacaaattgctaaagctccagctgaaatcaaggctcacttggaaaaagttcgtcctgatgttttagccttccagcaaaaaattgcagatatcgaaaaagagcttggcctaaacgttagtgaaattaaagatatttctaaacgtatggcaattggtgaagccaaagctcgtcgtgcgaaaaaagaaatggtagaggccaaccttcgtttggtaatttcgattgcgaaaaaatataccaaccgtggtttacagttccttgacttgattcaagaagggaacattggtttgatgaaagccgtagataagtttgaataccgtcgtggttataaattctcgacttatgcgacttggtggattcgtcaggcaattacccgttctattgccgatcaggctcgtacaattcgtattcctgtacacatgattgaaacgattaacaaaattaaccgtgtatcgcgtcaattattacaggaaatgggccgtgaacctactcctgaagagttaggcgaacgcttagaaatggatgaggttaaagttcgtaaggttcttaaaattgcgaaagagccaatttcaatggaaactccaatcggtgatgatgaagattcgcatcttggcgatttcattgaagaccagaacatcacttctccaattgatgctgcgacttcagaaggcttaaaagaagcaactcgtgaagttttagaaaacttaactgaacgtgaagcaaaagtattgaagatgcgttttggtattgatatgccaaccgatcatactttagaagaagtaggtaagcagtttgatgtaacacgtgagcgtattcgtcagattgaagcaaaagcattgcgtaaattacgtcacccttctcgttccgaacacttgcgttctttcctagagaatgactaa

SEQ ID NO: 45038 - DNA, 546 bp, Acinetobacter baumannii
ttggctactattgccaaagatgatgatcgcccacgtttgattgttttgcatcaggtgggtagtcatggacctgcatattacaagcgtgcgcctgaagcatatcaaccctttaaaccgacttgtgatacgaatgcgatacagggctgttcgcaaaccgaattgctaaatagttatgataatacaatcgtatatacagaccatgtattaagccaaatgattaatactctaaaagaaatatcaaaatatcagacaggtttatggtatttatctgatcatggcgaatcaaccggagaacatggtttatatttacatggttcaccttatgcaatcgcaccgagccaacaaacacatgtaccaatgattatgtggttctctgaaagttggaaacaacataatcttgctcaagtgaattgtttaagccaacaaactaaacaaaagttaagtcaggataatttattcccaagtttgttaagtttgctggatgtaaaaactcaggtcatcaaccctcaactggacatgttgcactcttgtgcccatgtaaactaa

SEQ ID NO: 45039 - DNA, 447 bp, Acinetobacter baumannii
atggtgcaaagcgatatttttgatgcaattaaaaatattgatgaagttcgaaaaatagatgatctttatttagttgtagatggagagtccaattctgaagacccagtcgaaagtttaatatttgaaattaataaaaagttttgggttattacagttaatcataattttgatgaaattgaattaaaggtcttctcttccttaccaaataaggcaatacaacaacgatattcagataatttatcaagtctaaaaggattagaaattggaacaatgttcgctatcgtcaatgaaagaggatatacagatgggattaagctcatgctttacgaccattcattgaaagaatctaagaggaatccattttttgctgtattaacgattgttgctttggcttctgggttgcaatatgaattaagaaaaacaggagttgatacatatctgatttag

SEQ ID NO: 45040 - DNA, 879 bp, Acinetobacter baumannii
atgaaaaaattatttagcgtactgttcagtgcctctgtactgacactgactgcatgtaataaacagcctgcacaaactgaaaatacagcagcagccaaagataaaactgagtcggttcgtacaattaaattggtttcaacaggttctgatacggatgtatggaaatacgtggcaacacttcctgaaactgctcaagcgggtattaaactcgaagtaaccaatttgactgactatgttgtgctcaatacgtctgtagcaagtggcgaacaagatgtaaatgcgtttcagtcattcaactatttggcagcttataatgcttcaaataaagctaaagttgctgctgttgcgacaacttacttggaaccaatgggtatttatgcaaataaagttaaaaccgttgatgagttcccgcaaggcgctaccattgcaattccaaacgatactgctaacgaagctcgtgcattaacattattgcagtctgctaaattaattaaacttaaaccaggttttgaccctgtaaaagggacagtgaatgatattgctgaaaaccctaaaaacttacaattaaaacctattcaaatgacaaccgcggttcgtgttaaaaacgatgtagatgcgattgtactgggtaatacattggcacttgagggtggcctcaatgtaatgaaagacgcaatcttccgtgagccaatcgatcagtctactaagctttatgtcaatttattgggtgtagctgaagcaaacaaaaatgacccgatctatacgaaacttggtgaactttaccacttacctaaagtacaaaaatttgtgagtgaaaaatttggtggcacaaaagttgaagtgaacaaacctgtttctgaatttgcagacattaaataa

SEQ ID NO: 45041 - DNA, 1749 bp, Acinetobacter baumannii
atgttagaaactgatgttttaattgttggaagtggtccagctggttcttctgctgcacttatgttaagtagttatggaattagaaatatcataataactaaatatagatggctggcaaacagccctcgtgctcattatatcagtcaaagaactatggaaattgttcgagacttggggatctcagatgaagtaatcccaaaagcagcaccaaaagaagttatgggagatgttgtttattgcacatctttaacgggtgatgaaattggacgctttccttatggaatgaatcatccagaaagaatgtcagaatatgctaaagcgagtccctgtgaacagtgcgatcttcctcaacatctatttgaacctattttactttcaaatgcagcatcacgagggagtcatccaagatttgatacggaatatttatctcatgtgcaagatgaggatggtgtaactgtcactgttttagatagattaactaaacaaacatacttaatccgatgtaagtatttaattggagctgatggtgcaagcagccaaatcgtaaaagatttagatttacctatggctggtaaaatggggaaaagtggcagtatcagcattatttttaaagccgatttaacaaaatacgtttcgcatcgacctggctacctctggtggattatacaacctggagcaaacattggcgggatcgggttggggttgttgcgtatggtcagaccttggaatgaatggcagattgtttgggggtatgacattgaaaaggaagagccatctcttaccgatgatgaggcggtcgcgatttgcaaacagcttattggcgataacgacattgaaataagcataagtagtaagtcgttatggacagtcaatgaaatgtatgcagagcaatattcgaaaggtcgagttttctgtattggtgatgctgtccatcgtcatccaccttctaatggtttaggttcaaattcttctatacaagacgcttataatttatgttggaaattagcatttgtattaaatggcaaagcaggtcgtgctttattagacagttataatgatgaaagggcacctgttggtgagcgaattgttaaacgagcaaatcaaagtgttagagagttctctacaatattttctgctttagatttagatggaaagtacagtacagagacaatgcaaaaaagcattaatgctttaagtgagagtaatgaaaaaggtgctgttaaacgccgtgatttaagatctgcaattaaatataaagcttatgaatttgctgctttaggagtagaaactaatgtgcggtataattcatctgcaattattggggcagaacataatattgaaaatgaactagattcttgtcgagatgaagatctttattactatccctcatttactcctggccataaactccctcatatatggttagtcaaaaatcatagaaaaatctcaactttagatttaattggaaatggaaagtttacgctgttttgttggttacaaggtgataaatggaaacttgctgtagacaacctgaatagacagctcaacttggatattaaagttatacaggtaggtccaaaaagagaggtcgaagactcttatggagagctttcacgctcttggactaatgatgaaaatgaatgtttactgattagaccagatggctatattgcttggcaaagcaacaaaattgaatcggcagatgatgagttatatagcgcaatttcatcaatacttagcttgagttaa

SEQ ID NO: 45042 - DNA, 819 bp, Acinetobacter baumannii
atggaaaaacaagaaattatatcgattttagatagatatttttctaatcctatttctaaagtaacaaattttcctatgcatgagctaaaaaataatgcacctactgaaaatgaaaattctttcttctttctacatgactttggtacttatgaattagaagctaaattcaattattgtgatggttttccacagaaaatagctttactgatacatggcggcaactctgatttaagttctttaaatcctttagaaaatctacttagaagtaaaaatattggaacgctttcattcaatttaagtggtttaaataatacaagtgaaacgaaatcatctttatctcagaatataaatgaaagtatggttttttacagtcttttaaaaaaggtggatatagttattggatatagtttaggcggttatattgcgatcaatttagcgaaaaaatttcaaattgatcgattgattttattatgcccagcgatatattcagatcaagcagtcaaaaaaatgtatggaaccgaatttaaggatgaaatctccaaaccttatagcttttactcatcatcgatttggctttttttaatggaatataaaagagaaatcacaatagtttatggcgagttagatggtataaaaacagataatggaaaatcgaaagggttttatgaaattaatggtattacgaagtactctccaattccctatgaaatagtccaaaccttaaaaaaaatttccatgcgaaaagctaactttaatttcataattgagaaagataaagatcattatctcttaaaaaatatcagaaattataatatttaa

SEQ ID NO: 45043 - DNA, 1428 bp, Acinetobacter baumannii
atgtcagttgagcaatcttctataacaatacctaatataaggacacctaaaaatattgcccttatcaccattattattcttagctttgctttagcattttacgcaaaaggcctgccaatagaggaggttggtttaattgggttattgcccatttttgccttggcgctcttaactgttatcggtctcgatattgtccttgctgttattattgcaattattattagcgtgataatgacatccaccagtgtgtttgaattaggcggaattcttgcaaagtctacgggctcatttattgcggctgtaggtcttattattatgctaggtgctggggttggtgaagtcgccaaccgaacaggtgcagcgaaagaattggtcaaatttattgtcaataaagttgggctttcaagtattcctcgcgtcaaacttggcatcatgatttcatcagttgttatttgcggttcattaggtactatggcaggtggtaatgccattattgttgctgtcattattcccattgctgcgacagttggtttaacgccgcccaccgttgctttgcttttgatgacggcaggctctgtcggtctttttataggaccttttacacccagtactgtgactattttagagttgggaggcttgacctacccgcaatatttgagcacttgtgccatacctatgagtgttgtcacacttcttacaggttggttcatgtctggttatatccaaaagtggacttttggaaaatatacctataatgaaaatttcttagaaccttctgaaaaaatagaaagtgcctctgaattgaaaagaagtaaacgtgcagcaattgtatttattggcacaattatcgtgatggcaattcttggaattatttttaaagcaggctttagttttgcaattattgtgatgcttactgttgccacattaactgggttagtggcggggtttagtcctaaacaaattttggaagcactctatgagggatgcggtaaattagtatggatgtttattctttactggttatacaatccaattttagttcttgttgaaaaactcaatgcttatcaaacactattagataatgcgacaccgtatttggtcgacttaagtcctgctatgctgtgttttggtattttcttatttaatattgtggggcatattccaggggcagctgttgcacaaatgacctttaccaataaaatttttggaccaattttactggcaaatggtgttccacctgtagcggttacagcagttctattatcaagttcccaagtagactggtttggtccttttccatcttctgatatgtttggtcaaatgggcttagcacgttcaagtcaacttaaatatatgctctatggtggttgggccatagtgatcgcaaatattctactctttgcagtattgtttcagattttgaattag

SEQ ID NO: 45044 - DNA, 1038 bp, Acinetobacter baumannii
atggctcatcaaatagaaacaatggcctatgctggtcaaaccccatggcatggcttaggcaaccaactcactcaaaaccagcctattgaagtttgggcgcagcaggcgggtatggactggcggatcgaatcatccgatgtcagctatatggcagaaaatgaacgagggcagaacatcatcatgcctttttcagaacaacgtgttttgtatcgttctgatacgcatgcaccgttatctgtagtcagccaacgctttcaggaagtccagccccgtgacatattagaattttaccgagacctcactgaacaatcaggctttgaactggaaacggcaggggtattgaaaggcggtaagaaattctgggcattggctaaaacatggcaatccactgcattgaaaggaaaagatgtcagtaatggttatattctattggcaacagcttgtgatggcactttggcgaccacagctcaatttacctcgattcgtgtggtgtgtaacaacaccttggcgattgccttgaaaggtcagaacagcagtgcaggtgtagtgaaagttccgcatagtaccaagtttgatgcagacaaaatcaaacaacaactgggtatctcagtacatgcatgggatgaacacatgtatgaaatgaaacaactggcacaacgaaaagtgacccaacaggaagcagcagctttctttgatcaggtgtttaatgccaatagcaatccagcctatcaagacaacattattcgttttaaccgtaacaataacctcaatccatttaccccgagcaatgacaacaagactgaaccgaatgcccgtgccatgtctaaagtcatgaccatgtttaacggacatggacgtggggcagagctggcttcagctaaagatacggcttatggtttgttatgcagtattacggaatttgtggatcacgaacgtcgagccatttccactgatcaccgcatggattcagcatggtttggtgccggagccaacattaaacaacgtgggttggaacaagctttacggatggtgtcttaa

SEQ ID NO: 45045 - DNA, 357 bp, Acinetobacter baumannii
atgggtacatttacgaaatttatgttgccagttttaatgatttcaccgttggttttatcgggatgtgatcagactcaaccaccttcaatggaggctcatcttagtgtgcctcacaatacttcggggcaaccacaacttaccattcggtcattagaatcagaaccaatcacaattaatagtgttgcagtaaatgagggtcaatgccgttatgcaagtttcttttatcgccctatcgaatttccaattcagctacagattgggcaagcaaagaatctctatctatattgttcttacgattcagtcgtgaaagtggacattgagacagatcggggaaatgtaacttactcttttaaataa

SEQ ID NO: 45046 - DNA, 864 bp, Acinetobacter baumannii
atgagtttatttaccgtagatacagacaagaaaatattaatgcctctcggggggacaaaactgagtgaacaacaactgacagaacgttatgatttacaagagtggttggttagccatcctaaagccttgggtgaagagcttttaattattcaaaaagaattttcaggctttgatggaacaggagaacgtttagatttattagctatagatactcaaggtagattagttcttattgagaataaaagagatgaaagtggtcgtgatgctgtttggcaagcaataaaatatgcttcctatgttgctccttttacttcagatgacattgaggatgtttttgcaaagtatttacttaaatacaaacctagatatgcagaacttgatgataatgcatatgatttagatcagatcaagcatactgcaaaatctattattcaaagatttcttgaagaaaatcaagagttagattctgagatgactatactgaatttaggaaatagtcagcgcataattttagtggcaggcgaatttagacgagaagttactagtacagcattgtggttaattgaacgtggtattgatgttaagtgtgtaaaagtttcaccatacgtattaaataaacaactgttagttcaaattcagcaaattattcctgttccagaagcttctgagtatatggttcgcttaaatcgtaaagaggctgaggaggtatcggttaaaaacaaacgaacagatcgaactgatattagatatcaatattgggagcagttattagaatacttttcaaagttcaataatcgcttatataacaacataagcccaaaaagtgatcattggcttaatagtggttctggtatgagcctgtaa

SEQ ID NO: 45047 - DNA, 1005 bp, Acinetobacter baumannii
atgcgattttccaaaacgcttttacttgcgatgggactcacaacaatttcatttgcagccgaggccaaacaaaccatatgtgtttttgactttgttggtaaaaatggcgatgtctatgcactcatgaaggactatcagcttgcagcgaaaaactggggagctgatatcgaactaaaagtaaaccagaatgaagcagtgattgctgaagattttaaagcgggcaaatgtgatggtattagtgtatcaggcatgcgcggacgtcaattcaactcatttacgggatcattagatgcaattggtgcgattccagatctcaaacttgctgttaaagtcatgcaaggtttagcaagccaaacctttagtaaatatatggtcaatggccgctatgaggtagtaggtgttattccggtaggagatgcttaccttttagtaaacgaccgtagtattaataccgtagcgaaagctgccggtaaaaaaatcgccgtattagactacgatgaagcacaaaaaatcatggttcagcaggtgggtgcccaggcagtgagtgctgacgtgacgaactttggagctaaatttaataatcatcaggtggatattattggtgcaccagcagcagcttttaaacctttagagttacaaaaaggcttaggtacaaaaggggcaattgtaaactatccaattttacaggtgaccggaaatattattattcgtccagacaaattcccagctggttttggtcagaaatctagagagtgggtggctagtcagttaccgcgtgcttttactatcttgggtaaaatgaaagcggatattccgcaaaaatattggatggaagtaccagctgccgataaaccgggttatcaaaagctcatgcgtgagtctcgaattaaccttacacaacgcggggtgtatgataaacgcatgatgaaactactatggcaattccgttgtaagcaagacgcgaaaaactttgaatgtggcttacaagatgagaattacaaataa

SEQ ID NO: 45048 - DNA, 432 bp, Acinetobacter baumannii
gtgaaaaagtttaatagtggccaagtcgaggcaattgctgcacctgcttatgcttataaaccgttagaaattggtaagggaattggagcaaatggagccatgtttacttttcctgtggtgaacgtcacaggggatttaattgcaagaagtgataagtttccggccaattttggaatgaagtctcgtgaatggtttattaaacagttgccacagaacttcgcaatggtaaaacggttagaaaccggtattcctcctaaaattaaattaaatttttcagccgaagataagttgaaatatcagaaaatattacgtgaaggtcgccttggcttaacaaaacaaggtgtatatgacgcgacaatgatgagtgtactcaagcgcgcacgatgcaccattgaacggacaaattttgaatgtacgctgactggagagtag

SEQ ID NO: 45049 - DNA, 1926 bp, Acinetobacter baumannii
atgattcaatttgaccaagtttctttacgccgcggtggacgtgttctatttcaaaaagcgtctatgcaattacacccaggttggaagattggtctaactggggtcaatggtgcaggtaaatcaacactatttgcagcattactcggtagcttaggagcagatgaaggctcgcttactcgtccttccgtatggactgtggctcatatggcgcaagaagttaaagccctagacatgcctgctatcgattttgtcctttctggagatgaagaatattgggatattcaaaataaacttgctcaaccagaacaattaacagactcggatttggctaaattacatggccgttttgatgaaattcatggttattctgcgccatctaaagcagctcagctgatggctggtttagggtttctagaacatcaattacgtttaaacgttgctagtttttctggtggatggcgtatgcgtctgaatttggcgcgtacattgatgagtcgttctgacttactcttattggatgagccaactaaccacttagatttggatgcaattttatggttagaagattggctcaaagcttatgaaggcaccctcattttaatctcgcatgaccgagatttcttagatgcaattacagaccatattcttcatattgagaatcaggaacttacgctttacacgggtaactactccacatttgagaccactcgaagtgaacgtttagcacaacaacaacaagcttttgaaaaacagcaagaagcacgtgctcatttacaaaagttcattgatcgctttaaggctaaagccactaaagctcgtcaggcacaaagtcgtattaagcaacttgaacgcatgcagcaacttgcacctgctcatgtagatacaccgtttatttttagtttccgtgaacctaccaaaatgagttcaccgttactgaccttagaaaatgccagcataggttatggcgataaaaaaattgctgaaaaaattaaacttcaaattacgccaaactcgcgtattggtctgcttggtatgaatggtgcgggtaaatcaacattgattaaaagcttggtgggtgatttaccattactggcaggtgaacgtaaagcttccgagctactcaacattggttactttgcgcagcaccaaatggacgccttagatggtcatgccagcccaatgcttcaactcgcccggatagccgataaacaaattagtgaagcaacattacgttcttttttaggtagttttggctttagtggcgaacgcatggatactccatgtgaaagcttctctgggggtgagcgcgctcgtttggccttagcactcattgtatggcagcgcccaaatgttttaattctggatgaaccaacgaaccacttagaccttgatatgcgtcatgcgcttagtatggccttacaagattttaggggtgcagttgttctggtttctcacgaacgtcaacttattgccagcgtttgtgatgaactccttttggtacacggtggcaaatgtaccgagtttgaaggtgatttgcaggattatgctaaatggctacgtgaagcacgccagcaacaaatcaatgctcagactgctgtagcacaaaataattcatcttctgccgctccccctaaagtcgataaagaagcacagcgtaaagaagcagctcgccgtcgtgaacaaactcgaccaatccgtaaaaatattgaaaaggttgaatctcaaattgaaaagcttcagccacgtcttgctcaaatcgaagaagctttagcagatacttcactatatgaagctaatcgtaaggaagatttgcttaaactgatgaatgagcaaaccgaactcaaagctaagcttgaacaatatgaagagcaactcttagaactcatgatggaacttgaggaaatggaagcctcatttgaaaactaa

SEQ ID NO: 45050 - DNA, 705 bp, Acinetobacter baumannii
ttggtacaaattggctggcttgtagctaactttgctcatgtcctttctatatctctatttttatgtctagttgtgttcgagttatttgttcccatctatgcagaaaaacattcgcctacgccgtggcatcctcaccatattgtagagcgctatgctctcctcaccattattgttttgggcgaatcaattgtaggtagttttaatgccatacgtgatgcgcttgcggctcaatctatcaatattccggctgtttttttaatgattggcggattaatgttgatgtttgcaatgtggtgggcttactttgatcgcagtgaacaacatcatcattttaaaggtgtgcgtccatttgtatggggttatggccattattttgtttttgtgagtattgctgccgtaggtgctgcgcttgccgccgccgtggatgttactacccatcatgcacatatctctgatttatatatgggtgtgattgttgctgtgagtgtggtgctttataccacttgtatctggatgttatacgagtttgagtgtttagctggaatttctaaatggttttatcctattaccgcatttattattttatgtattccgtttatttgtaataacgtgggatatagcgtgtttgcgatgggtatagtctatacgttacgtttattcatctcgaataaatttatggaaaatatagagccaaaacaggtttaa

SEQ ID NO: 45051 - DNA, 1293 bp, Acinetobacter baumannii
atgcgacgtttttcttgtattgttgggtctgtatttttggcgatgacccaggctcaagcagagctggtaattaatggttctacaatatctagtaatgcgactgttccagtaacgaatagtgatacttatacgcctaataataatttccagagctgtttggcaaatttacgttcacaggctattgctgctggtgtttcaggtagcacttatgatcgctatacgcaaaatttaacaccagattactcggtgattgataagttaaattaccaaccagagttttcgacaccgatttgggattatttgtctggtctggtagatgaagaacgtgttgcacttggaaaacaaaaacttgcacaacaccgggatgttttaaatcgtgcttctcaagtgtacggtgtgcctgctgaaaccattgtagcggtatggggtgttgaaagtaattttggtgatatttctggaaaatatcctttattacaagctcttgggactttaagttgtgaagggcgccgacaaggttattttcgtaccgagttttttgccacaatgcgtattttacagcgtggtgacttaactgaagatcaacttaaaggttcgtgggcaggagcatttggtcatactcaatttatgccatcaacttatgaacgcttagcggttgattttgatggagatggccgacgcgatttagtatcgagtactgcagatgcattggcatcaacggctaatttcttgaataaagcaggttggcagacgggtatgccttggggctttgaagttcaaattccagcaggcatgtcaattgatggagaaggacgacgctcgaaaaaaccattaagcagttggagtgcgcgaggagtaacacggattgatggttcgccactaatacaaggtcctttgtctggtagtacgccagccggtttaatggctccagcaggaccaagtggaccagtatttttagtatttaagaattttgatgctatttatagttacaacgctgcggaaagttacgggctggcaattgcacatttgtctgatcgcttaagaggagcaggtccatttgttagctcttggccaactgatgatcctggtacttcacgtgcagagcgtcgcgaaattcagcaatttttgattaatcgtggttatgatattggtgctgttgatggattgattggcgataaaacccgtgttgctattcgtcaggagcaaacccgtttaggtttaaatccaacaggacgggcagggcaacaaattttacgtgcattccgccaagaacaagcacgaaaaatgatgcaataa

SEQ ID NO: 45052 - DNA, 906 bp, Acinetobacter baumannii
atgcgtttaacttctttgttattaggcatggcctttgctttttctaattttcaggctaatgctaatcttgcgactcccctacacacccaagttcagcaaaaaaatgttcaacatttgacatataaaattgctgaagttgaccctcgttttggtttaagtcaagagcaattgatccagattacacagcaagctgctgatatttggaaagaaggtacaggtaaaaattactttacttatgacccaaatgcaaagttagaaattcgtcttgtatacgatgacagccaaaatcgttcagcagagcgtcaaaaaatcgcttctcagttcaaacaagaccaacaacgtgtaattgatgagcaacaacaaattaaacagttgaagcaaaatttaagtcaaactcaatcggatcttgaaaataaaaaacagatcttaaatgagaaattgaagaattttgatcaacagatgatgcagtttaaggaaggaaaattagcacctgaatacactgcaaaatcactttcgaaaactcagaaagatttacaaaaacagacagttgctttaaagaaagatattgctgcttataatcagcaagctgcagacttaaataaaaaggttactcactttaaccagattaatgatgaattcaaccaatcattaaatcagtttaagcaaaatgcccaagctgatgtatttaagaaaggtatttataacggtaaacaaatcatgatctatgaatatagttctattgatgatttacgtttaacaattgctcatgaattaggccatgcacttggcttaaaacatagtgatcaaccgggtgctttaatgtactcagttcgaaaagatagcgataaaaaaagtaatattttaactgatgctgatcgtgatctattaagcgctttacctcaataa

SEQ ID NO: 45053 - DNA, 894 bp, Acinetobacter baumannii
atggatactttaaaagccattcaggtctttgtttctattgcacaacacggtaatttaactaaagccgcagagcatcttaattattctcgtgcaatggtttcgcgttatcttgagcaccttgaacatacgttctcaactcgactatttcagagaaatacccgaaaaatatctcttacacccgcaggtgaaaaagctctgctctactgcgaaaatattttacagcagcaacaacttttacaagaactcgcagcacctgaacaacacaacggtacaatccgttttacatgcggattatttctatttgaacttggggttgcggaatgtattcggcaatttaagagacagcatcctcatattcagtttgatgtatacctgactgaaagcacgatggatcttatagatgcacaagtggacttggcactacgcattactcaaaaagtcgcagatggtttaattgcacggccagtttgtcaaatcgaatccgttttctgtgctcatcctgattatttaaaacagcacagtcccctactccatcctcgtcaactcattcaacatgaatgtattgcacatcatagccaacatcaattctggacactttttgataatgagcaacaacctcagaactatcctctaaatgtcacttttaaaagtaatgatgtgaatgctctttacgatatgtgcttacatgcacagggagtcgcaatgttgcctacattattagttgagaaagatttaaaagaaaaacgcttaaaagctttatttaaaaattttacggcccccgagttaagtttgtcggtcgtgtatgcctctagacaacatttaccccgaatcactcaagaatttatagcttttatgatcgaaaatttagatttttacttaaaaccgcaaaattaa

SEQ ID NO: 45054 - DNA, 477 bp, Acinetobacter baumannii
atgcctgaaatacaaattattgccaaggatagtcacgataccttgtcaacaatccaaggaacttctgcaaagctttcagaagcgtcggtcgtattggtaaaagtggctgccagtgatgtattggtagtgaatagggagggtaccaatgcagtcattcgcctgaaaaatggcgagactattgttattgaaggcttctttagtggaacagctgagcctaaagataacagtctggttttccaagatgaaaatggacagttgatttgggcaaaattcaaagatgctgaaaatgatgcagatgctgatagtgatgcggacgcagatgctgacagtgacgtggaaccacaagcacttttaggtgaagatttaccagcagctctaccagcagaagctccacaagagttggtatctgatgttatttaccaacctatttcttcaattgagcctctactttatcatgatgcaggcgtgaacccgtag

SEQ ID NO: 45055 - DNA, 3096 bp, Acinetobacter baumannii
atgctatctaaattctttattcaacgccccatttttgccaatgtattggcgatcattgttatggctttcggtattttttcggttatgaatttgcctgtagaacggtatccagacattgctccacctaaaattactgtgtcggccaactatagtggtgcagatgcacaaacggttgagcaaagtgttactcaaattttagaacagcaaatacaagggattgaccacttactctattttagttcatcgagtgactcatctggacgtagtcgaattactataagttttgataacggaacaaatccggatactgctcaggtccaagtacaaaatagtattagtggcgtaatacgtcgcttaccggatgaagttcaacgccaaggtgttacggtaagtaagtcactgggtgacacttttatggtaattggcttatatgactcgactggtaaaacaggaaacattgagctatcggactatttaactacgcatgtggtagataacctgaaccgtattgaaggggtgggtgaaactgatgtatttggttcacaatatgccatgcgtatctggttaaatccggataaattaaaacaatataatttaatgccaagtgatgtagcgaatgcaatcaccgcacaaaatactcaggtcgccgcaggggcaattggtgacttacccgtaattgacggtcaatatttaaatacaaaagtcacagcaggttctcgcttaaaaacagttgaggattttaaaaatattgtcgtgaagtcgaataaaacggcgagttatgtgtatttaaaagatattgccagagttgagctaggtgcagaaaactatcagtcttttaacactattaatggctatcctgccgcaggtttgggtatttctttatcttcaggtgcaaatgcaattcagacctctaagctcatccaccaaactctagatcagcttacaacgaaactaccagcgggttataaaatcgtttatccacgagataatacgccctttgttcaagagtcaattaaggaagtagtaaagactctggtagaggcgattattctggttattttggtcatgttcctgttcttacaaagctggcgtgctacgctcattccgagtattaccgttccagttgtaattttaggaactttcgcggtcttatatgtgcttggttttagtattaacaccttaacgttatttgcgctggtactcgcgattggtttgttggtcgatgatgcaatcgtggtcgtagaaaacgttgagcggctcatgcatgaacagcacttatctcctaaagaagctgctattgagtcgatgggagaaattagtggtgccttagtcggaattacgttggttttaactgctgtttttattccaatgtcctttttaggcggttcaattggggtgatttaccgtcagttttctattactttagttgccgctatggcgttgtcccttattgttgcgctcattttaacaccggctttatgtgcattaattttaaaaccaaaccctcaacctcagcgctgggccgtatggtttaaccaaaagattgagcaacttaaaaatcaatatatcaagcttgttcagacgagtattcattacagtaaatcagttattgtgatttttgtggctttaattgccgtttttacgctgttctataacggtttaaaaagcggttttattcctaaagaagaccaagggattttaagtgttcaaattaagctcgtagacagcgcaccaatttctcaaagtcagaaaattggtgagcaagtccgccaatatttcttaactcaagaagataaaaacgtagatttggttttaatccgctatggacgaaattattcgggcacaggacaaaacttggcacaagggtttattgctctaaaaccgtgggatgtccgaacaggaaaagaaaactcggctgaggctatacaaaagcgtgcaatgaaatactttagtcattttaataatgcacagattaatgtgactttacctgcctcagttaatggcttaggtcaaacagatggtctggatttatggattcaggatttgaatgggcaagggcaagattttctagatagtgccttccgccaattgcaggctcaaagtaaaaattattcaactttcgaaaactttgataagcagtcaaccaatagtaaggcaaatcttaatattaagattgaccagaaacaggcactagcaaatggactacagctatcggcaattaataatactttatctagcgcatggggcggaacttatgtaaatgactttattgatcggggccgtattaaacgtgtcatgattcaaggtgatgccgagtttagatctaaaccggaagatttatataactggtctgtacgtaatgaccaaaatgaaatggttccgtttagttcatttgccaactttagctggggcggggcaccggaaattgtaaaacgctatatgggatatagtgctttacaactacaagcagatgttgcgagtggcagcagttctggccaagcgatgaaagatgtagaacaacttgttaaccaacaaaaagatattggtttagcgtggacaggtttatcttttgaagaacagaagtcgactaatcaggcggtgtggttatatttaatttcggctggatttattttcttatgtttagctgctttatatgaaagcttaagtattcctgccgccgtaatgacatctattccgcttggtgtaggaggaagtgtgattttctcttatatttttggtttgccaaatgacgtgtatttccaaattgcgctattaacgactattggtttgtcatgtaaaaacgccattttaattgttgagttcgcggccttagcgcaagaaaaaggtaagaatgccattcaggcggccttagaaggtgcgagcttacgattaagaccgattctaatgacctctttagcctttggggcaggcgtaattccgcttgtgtttgctcaaggtgctggtgcggttagtcgtcaagagattggtattagtattttaggtggcgtgatgtttggtactgtgctggttctgttttttattccggtcatgtacgtattattacgttcactgtttaaatcgaaagcttcaacctaa

SEQ ID NO: 45056 - DNA, 1458 bp, Acinetobacter baumannii
atgaatcgtcgcgaatttcttttaaattctacaaaaacaatgtttgggaccgctgctctggcgagtttcccgctgagtattcaaaaagcgttagcaattgacgccaaagttgaaagtggaactattcaagatgttaaacacattgtgattttgactcaggaaaaccgttcatttgataattattttggaacactcaaaggtgtacgtggtttcggtgaccgttttaccattcctatgacagaaggccgaaaggtttgggaacaatatgatgcgaataaaaagaaagtattgccataccatttagatagccgcttaggaaatgctcagcgtgtttcgggtacacctcactcatggtctgatggacaagcagcttgggacaacggtcgtatgagtgattgggtggcatataaaaaaccgcagtcgatgggctattacaaaaagcaagaagttgaatatcaatttgccttagcgaatgcttttacgatttgtgatgcgtaccactgcgctatgcatgcgggaactaacccgaaccgtaaatttatctggacgggaaccaatggtcctacaggcgcaggtgttgcgagtgtggtcaacgaatttgatggaattggaccatcaacagaaggttatgaatggacgacgtatcctgagcgtttacagcaggctggcgtgacatggaaagtttatcaaaacatgccggataactttactgataaccctttagctggtttcaagcaatatcgccgcgcaaatgagcaatctggtcaacctgtcagtaacgatacgctcacttgtccagcatatgatgaaaaaatcgatgctactcaaccactttataaaggtattgccaataccatgccggacggtggttttttaggaacttttaaagctgatattgcgcaaggtaaattaccgcaagtaagttggctagttgctccagcaacctatagtgaacatccagggccatctagtcctgtgcaaggcgcttggtatattcaggaagtattaaatgcgttaactgaaaatgctgagttgtggagccaaaccgttttattggtgaacttcgatgaaaatgacggtttctttgaccatgttccttcaccaagtgcaccttctaaagatataaacggtgttgtatatggaaaaaccactttaacggaccaacaagtgtcttatgagtactttaaccatccagcagtagcgacttcaaaatctcaacccgaaacagacggacgggtgtatggcccaggtgtacgcgttccaatgtatgtgatttcgccgtggagccgtggaggatgggtaaattctcaagtctttgatcatacttctattttacaattcttagaaaaacgttttggtgtgcaagaacctaacattagcccataccgccgtgctgtatgtggtgatttaacaacggcatttaattttaaaaacaccgaatcttttgcctgttgctga

SEQ ID NO: 45057 - DNA, 723 bp, Acinetobacter baumannii
atgagtaaagccttacccattgctgtcgctgtagttttaggcggtgctgcacttgtacctgtatattatgcaactcaacatccgaccacagaagtcggacgtaaagcaaacaaaaatgcttctccaattcaaaaaatcagttatgttcttgggtatgaagttgctcaacaaacccctcctgaactagatactaaagcatttgttcaagggatccatgatgcgcgcaataagcagcctagtgcttatactcaagaagatttaaaagctgccgttgctgcttatgaaaaagagttacaacaaaaaatgcagcatcaagacaaacctgagcaagcgggtacagctactgactctgcagatgcacagttccttgcagaaaacaaaacgaaagctggcgtaaaaaccactgcatcaggtttgcaatatatcattactaaagaaggtactggtaaacagccaactgctcagtctattgttaaagtacattatgaaggccgcttaattaatggacaggttttcgatagttcttataagcgtggtcaaccagtagaattcccgcttaatcaggtcattccgggttggactgaaggtcttcaactcatgaaagaaggtggaaaagcgactttcttcataccatcaaatctagcatatggcccacaagagcttcctggaattccagcaaacagtacactgatttttgatgtagaactcatttcagtgaaataa

SEQ ID NO: 45058 - DNA, 1197 bp, Acinetobacter baumannii
atgtctacagatattcaattaaatttaattggcagaacacaagagctttttgttgatgatattcaacaatggaataataagttaatcgaaattgtttcctcatcgaagtttttagttttaggtggggcggggtctattggccaagcagttgttaaagaaatttttaaacgtaatcctaagaaactacacgttgttgatatttcggaaaataatctaacagaagttgttcgtgatattcgtagctcgtttggctatatcgatggtgatttccaaacatttgcactagatattggctctgctgagtatgatgcatatattcagaatgatggtgattttgactacgttttaaatctttctgctttgaagcatgtacgtagtgaaaaagatccatttacattaatgcgaatgattcatgtcaatattttgaatactgaaaaaacgattcagcagtctattgaaaaaggcgtgaagaagtatttctgtgtttcaacagataaagctgctaaccctgtaaatatgatgggtggctcaaaacgtattatggaaatgttccttatgcgtcaaagtcagcatattgatatttccacggctcgttttgcgaatgttgcattttcagatggttctttattacatggttttaatcaacgtattcagaaaaaccagccaattgctgcgccaaatgatattcgccgttatttcgttactccaaaagagtcaggtgagttgtgcctcatgtcttgtttactaggtgagaatagagatattttcttccctaagcttagcgagcacttacacctcattacttttgctgatattgcagtcaaatatcttaataaccttggatatgagccgtatttgtgtgagtctgaggatgaagcgcgtagcttaattcagactttgccaaaacaaggaaaatggccttgtttatttgctggaagcacaactacgggtgagaaagattttgaagagttctttaccgataatgaaactttagatatgcaacgttttaataatttaggtgttattaaaaacgaactaaatgttgaagaagacaagttgcatgtatttgaagaaaaaattcatgcaatgctttcaaataagcagtggaataaagaagaaattgttgatctatttaactatatgatgcctaactttggacacaaagaaacaggtttatatttagatgggaaaatgtaa

SEQ ID NO: 45059 - DNA, 1149 bp, Acinetobacter baumannii
atggatacttctaaatttaatcagtttgtacgagatatttatcataccaataattttattccattacatgaacctcgttttcttggtaatgaaaagaaatatgtattagatacgattgatagtacttttgtctctagtgttggtgcatatgtaaatgacttcgaagcaaaagttcaacaatttacaggttgtactaaagccattgcgactgttaatggaacagctgcattacatattgctcttttactagctggtgtaaagcgcgacgatattgtaatcacgcaagcgctgacttttgtcgcaacctgtaatgccttgtcttatattggtgcggaaccattatttattgatgtttcattgaagacactcggtttgtgcccaaaggcattagacgcttatttgcaagaaaatgcttttattgatgaccaaggtgtatgtaaacacaaagcaactaataaacgtatttctgcaatcgttccaatgcatacatttggtcatcctgttgaaattgatgagcttcaacaggtcgtaaccaagtggaatattgcattagttgaagacgctgctgaaagtttaggttcttactacaaaggtaaacataccggaacttttggtctagtttcaacacttagctttaacggaaataaagtcatcactacaggcggcggcggtatggtcttgtgtcaagatgaggaacttggcataagagcgaagcacattacgacaactgcaaaaataccgcatccttatgagttttatcatgatgaaaatggttttaactaccgtttaccaaatttgaatgctgccttaggttgtgcacaaatggaaggcttggaaggtttccttgctaaaaagcgtgatttagctcagcaatatcaagatttctttaaagatagtgatatttcatttgttgtggaacctgaagactgccgatctaactattggttaaatgccattgtttgcaaagataaagcccaacgagatttgattttggatgaaaccaattcaaataaggtgatgactcgcccaatctggactttaatgaccagattgccaatgtaccaaactgcattacaaggcgatttaactaactcattatggttggaagaaagagttgtaaatattccaagttcagttcctctggagtaa

SEQ ID NO: 45060 - DNA, 1137 bp, Acinetobacter baumannii
atgaaaaaaatagccgtttttacaggaactcgagctgaatatggtttgctgtattggttaatgcgagatattcagcaagatccagagctagaattacaaattctagctacggctatgcattattcatctgagcacggtgaaacttggaaaactattgttcaagatggtttcgaaattaccgaatcggtagaaatgctactgtcatctgatacatcgtccgctgttgtgaaatcaatgggtgtgggcttacttggatttgcagatgcattgaaacgtatgcaacctgatttattagttgttttgggtgatcgtttcgaagctttggcagtgacgcaggctgctttaatcatgcatattcctgttgcacatttgcacggtggtgaaatcactgaaggtgcatatgacgaatcaattcgtcatgcgatcaccaaaatgtctaatatccattttgctgcagcagaagaatacaaaaaacgaattattcagttaggcgagcaaccagaaaaagtatttaatgtcggcgcactaggcttagatcatatccagcgtacaacatttaaaaatattgcagaattgagtgaattatatgattttgatttttcaaaaccatattttctcattacttatcatcctgaaactaatctactagaagaaaatgttgcacctttatttgatgcacttaagcaaataaaagatgtcaattttgtctttagttatccaaatgcagataatggtaatactaacattgtgaaagcaatgcttgatttaaaagcacagttgccagatcgtgtattgcttgtaaagagttttggtattcaaaactatttaagtgttttgaaaaatgctttagcaatggtgggtaattcttcaagtggtctatcagaagctccagcattacaggtaccaacagtaaatattggtgatcgtcaaaaaggacgcttacgttgtgagtctatacttgatgttagattagacgaaagtgaaattttagaagcattgcaaaaagcaattaatttcccagacgatgaattgagtaaagttgttccaccattagggttaggcaatacttctcagaaaataattgaacttattaaaacgacggattttaaaaagaaggcaccattttatgatctttaa

SEQ ID NO: 45061 - DNA, 1095 bp, Acinetobacter baumannii
atgatctttaatcaagacgaaatttatgtcattgcagaaattggtgtaaatcataatggctctgtagagttagcaaaagagcttattttaaaagccaaagaatgcggtgcgaatgctgtcaaatttcaaacatttaaagcagatagtttattatctgatcaaactgaaatggctgcatatcaaaaagaaaatactagttctagtcaaagccaattagagcttgtaaaaagtttagagctcacttatgagcagacagaagaaatacagaaattttgtgatgagcatcaaattacttttatttcaacgccgtttgactctgatagtttgaagttcttggtgaatgagatcgatgtaccttacttgaaagtatcatctgctgatatttcaaatttaccgtttctctatgaaattgcatgttcaaaaaagcatgtcattttatctacaggaacagctagcctaggtgatattgaacaagcattatcagtatttgcttttgttatcgataagggaacggaagttcgaccatctcagcagttatttagagaagcttattctaaaatttcagtacgtaaacagttgaaagaacaggtttctatcttacactgtgtaactcaatatccggcattatttgaagaaagtaatcttaaagccatttcaaccttaaaaaatgtatttgatttggcaacagggttttctgatcatacgcttgatgaatacgcggcggttattggtgtaagtcttggtgctcgtattttcgaaaagcatattacattagataaaacgatggctggcccagaccatgcagcatcaatggaaccagatgaatttaagcattatgtcgaaattttgcataaaacatatgcagctttgggcgatggtattaaatttatgctagagcaagagagcgataactattacctagtacgtcgtagtattgtggctaaaacagatattgcggaaggggagctgttaacctctgacaatgtcacaacaaaacgagcaggtcgcgtttgtttagaaccaaataagtattgggatgttgttggtacaaaagcaaaacgtagctttaaaaagaacgattttattgaaatttaa

SEQ ID NO: 45062 - DNA, 642 bp, Acinetobacter baumannii
atgaaaaaactggcgatttttggttcaggtggctttgcaaaagagctagtagatttagcaatagatcaaggctaccgccatatattttttttagaaagaaatgccaaagatggtgacaccctacttggcttccccattttgccagaatcagcaatatcgacattaacggatacggtatatgcgataggtgttgctgatccaaagattcgtaaaaaaatatatgaagcttatcccgatttaccttatcccaatttgattcattctcaatcatcacttggctatggcattcgagagttgctagaacatagtaaaggtgtggtaattgcggctggagcgagaattacaaattcatgtcgttttggtcattttattatagtaagttttaacagcacaattgggcacgactgtattctagaaaactacgtttctgtcatgccaggtgttaatgtgtctggttgtattcatttgaagcaaggcacttacattggaacaaatgctgctattttgccgggcaaaagtccagagcaattgaaatatttaggtgaaaactccgttataggcgcgggtgctgtggttgtgaaacatacggaaccgaataaggtctatattggatcacctgctaaggaattaagtcgtgactag

SEQ ID NO: 45063 - DNA, 1056 bp, Acinetobacter baumannii
gtgactagagatgttaataatataattttgcataaaaatgattcaattttgaaagcattagagctacttgatttatatgctttaagaattgttttggtcgttgatgatcacaatcaattgatcggaagtattacagacggtgatattcgtagagggcttttaaaaggccaagatgtgcatgcagctgttgaaacaatcatgcatactaacccttatagtattgaagaaggtagcttaaataaccgccagatttttgagatcatgcgtgaaaaaagttatctggcattaccagtaattaaaaataatcagctagttaatatcattacgcttgatgatttgattcgtaaaaaacgtaaagaaaatccagtttttattatggctggaggatttggaacacgtttacgtcctttaacagatacatgcccaaaaccaatgttacctgttggtggtaagcctttactagaaaccattatctcaagctttaaaaatcaaggcttttataaattttatatttctactcactatttaccagaagtgattaatgagcattttggtaatggtgagaagtttgacgtacagattcaatatgtacatgaaactgatccgcttggaactggcggtgcattgagtttattgccagcatcagatattaaattgccattcattgtgattaatggtgatgtactaacaaacatgaattttgaaaaattattggactttcatgaaaagcgcgaagctattgcaacgatgtgcgtgagagaattccaatatcaaattccttatggcgtagttaactctgaagataatgtaatacaaagcatgactgaaaaaccaagttatttctttgatattaatacaggtatttatgtcatttcccctgaattgttggcacaagttaatgcacagtttattggtatgccgactatcttagaacagcaaatggaaaagaaaaataaagtcttaagctatcctttacatgaatattggctcgacatcggtcatatggaagactataaccgtgcgcaaaaagatattcatatgttgggtctagaataa

SEQ ID NO: 45064 - DNA, 972 bp, Acinetobacter baumannii
atgaaaaatattgctgttattggtttaggtaatattgctacccgacatcgtcgtaaccttaaaatgctttttcctgaagcaaaattaattgtgatgtctgctagtggccgtattcctaaagagccagtgactgatagcgatcatatagcagaaagtgttgatgaaattattcagttgcaagttcagtttgcaataattgcctcaccagctccttttcatgcccaacatgcactaccacttattaaagcaggtatccctgtattaatagaaaaaccagtatcagttacccagacagatgctcaagctttaattgatgcagaagcccagtataagacacctgtagcagtaggttactgtttgcgctatttaccttcagcgcagcaagtacgacaaatgatacaagagggtgtcattggaaacttatataatgcatttattgaaattggtcagtatttaccagattggcgacctaccaaggattatcgcgaaacagtatctgctaaaactgaattggggggaggagtcctattagagctgagtcacgagttagattatgctcaatggattttaggttcgcttactcctaaatatgtcgttttacgtgcttcagaagagctcggtttagaagtcgaggataatgccgatcttttaatgacaacagcgaaaggagctgttgtaaatatccacttagattttttgcagcgtaaagcacatcgtaaatgtcgttttattggcagtgaaggatgtattgagtgggatttaattcgaaatgaagttgtgcttattaaggctaaagagcaacaagaaatttatagcgcccctgagtgggataaaaatcaaatgtatttagaaatggttaccgattttattaaaaaaataaacggacagccaaaccaatctataagtctgcaagaagctgaaagaacagtaggcctgattgtagagatgaaagaatttgtgacgaaagaatga

SEQ ID NO: 45065 - DNA, 687 bp, Acinetobacter baumannii
atgagaaattttgcatttatttttgctagaggcggctctaaaggtttacctggaaaaaatattaaaccattggcaggaaaaccgttattacaatattcaattgataccgctttagcatcggatttgattgaacaagtttttgtttcaacagatgatcaggctattgcacaagtcgctatagaaggtggagcaattcttatagagcgacctgctgaactagcaactgatcaaagtccagaatggttgtcttggcgtcatgcagttgagtgggcaactgagcactatggctcatttgatgggtttgttagtttacctgcaactagtccattacgtagccaagaggatgtagaggctgcgattttaaaaagacaagcagagacagctgatatttgtattgcagttacacccgcaagtcgcagtccttatttcaatatggttaagtacaatgaggctggttttgttgagcttgtcaatcagcctgaaggtgaagtatcacgccgtcaagatgctcccaaagtttttgatattacaacagtagtttatgcgacaacgcctgagtttgtattaaatagctatggtttattttcagggaaagttgcgagtattgaagtaccaaaagcaagagctgtagatattgatgatatttacgattttcgtttagctgaagctattattaaaggtgaataa

SEQ ID NO: 45066 - DNA, 771 bp, Acinetobacter baumannii
atgcaaaatttattacagaataaaacctttttagtagctggtgccggtgggttattaggcacgcgtttagtggcggctatattagaacaaggtgcaaaagttattgcagctgatataaaccttgaatctatggcaactcgattaagtagtgtaggagttaatactacaaacgaaaagttatcgttggtttccttagatgtaacaaatgaaacaagtgtaaagttatttttttcaacagatcttaaaattgatggggctgttaatacaacatacccacggaataagacttatggttcgcatttttttgatgtgactcttgaaagctttaatgagaacttatcactacatttaggtagtatgtttttgtttactcagcaatgtgccaaatattttacgcaataccagactcctttttcgcttgtaaatatctcatctatttatggagtagtggctccaaaatttgatatttataacaacacgaaaatgaccatgcctgttgagtatgctgcaattaaatcagcaacactccatttaaacaaatacacagttgcttatgtcaacgacagccgattccgcattaattgtgtaagtccaggtggtatctttgatcatcaacctgaaccatttttagaagcatataagagccatacccatggagctggtatgttagatgttacagaaatcataggttcagttttattcttactttctgaacaatcaagatatgtaacaggtcaaaatattattgtcgatgatggcttttcaatataa

SEQ ID NO: 45067 - DNA, 375 bp, Acinetobacter baumannii
atgatgcgtggtggtcaccttgatattgctgtactcggtgcatttcaggtggcagccaatggtgacttagcgaactggcacacgggtgcacctaatgcgattcctgctgttggtggtgcgatggatttagcggttggtgccaagaaagtatttatcactacagaccatgtgaccaaacaaggcgagccaaagattgtcgctgagctcacttatccggtaacgggtaaacactgtgttgaccgtatttacactgacctgtgtgtgattgatgtgaccaaagacggtttaaaggtgattgagaaagtggaaggtcttagctttgatgagttacaggctttaacaggtgcaactttgattgatgcgactcaagggtaa

SEQ ID NO: 45068 - DNA, 2307 bp, Acinetobacter baumannii
atgcgtaaacaacgattattgaatgacatacaaaaaatactggcacttaacttatcaatcgctgcaagcttttggggactcaatactcaagcgtttgctcatggtggaaaggccgaaatggtctcactttatcaaaacatgagtgagcaaggtgctaaagttgttaaagatgactttaccaatacctatacaattaccaaaggctctatgatggttagagccaagccaaactcaaatcaagttttagtgaatggcaaacctttaaaactcagcgtgcctttattaattaaagagggtaagcctgttattggaaaagatttttttaacgaagtattccagtcggggttagatcaaacttttaaagttgaaaatacctttcacccgctcaatagcttaaattctgatgaaatcaaaaagacatttgatgtgattaaccgctcgaaatacgcttataaaaatatgcgttttgccgagttaaagcttaaagaacctgaaaaagccaaagtatgggattactttattaatcataaagaatttaaagaagatcgtattgcctcatttattttattaaagggcaatcaagcgattgaaggtgaagttaatcttaatactcaacaagtcacaaaatggaatgtacttaaagatactcacggtatggtgttgcttgataattttgaagccgtacagcgcgtaattgagacgagtaaagaatatcaagacgcgttacgcaaacgcggcattactgatgtgaagaaagtgattgctacaccgctaactgttggatattttggcggtaaagatggtctggataaacaactcaatatattaaaagtcgtcgcttacctcgatgtcggcgatggcaactattgggcgcatcctattgagaacctagttgctgtagtcgatttagataaagaaaaaattatcaagattgaagaaggtgcgatcattcctgtgccaatggcaaatcgaccttatatgtcgaataaacccgtagcaagtaagctaaaaccactcaatattactgaacctgagggtaagaactttagcattaccggtcaaaccatacattggggcaactggtgtttgcatgtggcgttagattctcgtgttggcttgcagctttcaactgtgacttataaagataagggcgtaaagcgtaaagtcatgtatgaagggaacttgggtggaatggtagttccatatggtgaccctgatattggatggtacttcaaatcttatttggattctggcgaatatggtatgggaacacttacctcatctattcttccgggaacagatgcacccgacaatgcagttttacttgatgccgtgattgcagactataaaggccagccacaagtgattccaaatgccattgccgtgtttgaacgttatgcaggacctgaatataaacatcacgaaatttttggcaatcaggatgcgagtgaagcacgccatgaacttgtcgtgcgctggattagtacagttggaaactacgattacatgtttgactgggtattttcccaaaatggtgtaattggaattaatgcgggtgcaacgggtattgaagctgttaaaggtgttaaagcacgcaccatgcatgacagtactgccaaagaagacaccaaatatggaactttaattgaccataatattgtgggtacaacgcatcagcacatctataacttccgcttagacatggacgtagatggggaaaataacagctttatgcatatggaccctgtagtgaaagccaatgacaaaggtggtgttcgtacaagttcaatgcaaattgacagtaaagtcattaccaatgagcaaaatgcagctgaaaagtttgatccatctaccattcgcttactcacgaatttcaataaggaaaataaattaggtaatccggtttcttaccagctcattccttttgcaggtggaacacaccctgtggcgaaaggagccaatttttcgaaagatgaatggttatttaaacgtttgaactttatggataagcaaatttgggtgactcaatacaatccagacgaacgctatcctgaagggaaatattcaaaccgttcgactcatgatacaggcttaggacagttcattggtaacaacgaaaatattgaaaataaagaccttgtggtgtggatgacaacaggcacaacccatgtggcacgtgctgaagaatggccaattatgccgacagaatgggtttataccctaatcaaaccttggaacttctttgacaacaccccgactttaaacttgggtgaagaagagcaaaacacacagcacgaccatcactaa

SEQ ID NO: 45069 - DNA, 1488 bp, Acinetobacter baumannii
atgagtgaagttaagattttacaaagcgtacagcaatttatggcacgtcaacatggacattttattgatggaaagttagttgttgccgagcttttagataaagtggatattgtgaatccatcgactgaacaagtggttgctcaaattagtattggtagtcaacaagatgtcgaaagcgccgtcaaaagtgctgaacatgcttttcaaaatgcttgggctgaaacgacgccgtatgaacgtggcgttaaactaaataagttggcagatttaattgaacaacatggtgaagaacttgctcagctcgaatcattgtctaccggaaaacttatcaatatttcccgtcatcttgaggtcgcacaatccgttattttcttaagatattttgcagggtgggcaaccaaaattaatggtcaaaccatgcaaccgtctattccgtctgtgcaaggagaaaaatatacggcctttactttaagacaaccagtgggtgtagttgcagggattgtgccttggaatttttcactgatgattggcgtttggaaaatcggttcagctttaacaactggctgtaccattgtgcttaaaccaagtgagttcgccagtttatcattattacgtttagctgaacttgctattgaggcaggtattccggctggtgtaattaatgtagttacgggtaagggcgatacagggcaatatttaattgagtcaccgctggttaagaaagtctcgtttacaggttcagtaccaacaggtattgccatcggtaaacttgcaatgagtagtgatttaactcgggtaagtttagagttaggtggtaaaaatgccatagccatcttggctgatgcaaatatcgatgagatattaccgactttgctacaagcaacttttgtacatcaaggtcaagtttgtgcatccccagagcgtttttttgttcaccatacaaaacatgatgaacttgtcgagaaactctctaaagcactctcgcagttcaaaattggatcggctatggatgaaggaagtatgtttggtccactctctaatcagccacactttcataaagtgaaacattatttagatatggctaaagccaacaaccagattattgttggaggtgaggctttagatcagaccggatattttgtacaaccgactttaatttcctttaaaaatacggatgatcctttattttcagaagaaacctttggcccagtggtcggggtaatgccattcgacactgatgaagagctcattcaactgatgaaccagtctcgctttggtttaacggcaagtatttggacaaatgacttatcgaaagctttgcgtttaattcctaaaattgaagcaggtaccttgtgggtcaatatgcatacgttcttagatccatcagttccatttggtggggtaaaagcttcgggaattggcagagagttttcagatgcatttatcgaagattacaccgaattaaaatcggtgatgattcggtattaa

SEQ ID NO: 45070 - DNA, 2475 bp, Acinetobacter baumannii
ttgaacatatctatgctgaactctcggcctcaccctacacgccctttaattaaatatggaacattacttttaggtgcgcttttagcgggttgtaattcctcatcaagtttagaccctacaccgacacacaagcagatcacaattaagcgcgataaattcggtacaccacatgtatatgcaaatgatacctatggacttttttacggctatggatattcggtagcgactgatcgattattccagatggaaatgtcgaaacgtacaggacaaggtacagttgccgaagtgctcggccccgactatcttcaatatgatattgcaacacatagccgttttgacccagaaaatattaagcaacaactcgccgcgctctcaccagaagaccgagcaatttttgaaggttatgccgcaggttttaataagcgtgttaaagaggttttagcagatccagctcttatgcctaaagagttcacagatcatgattttaaaccatcaacatggcaaccagaagatattgctatggtttgggtgggcttaattttaaatcgcttcttttcagcaagttcggaagtaacaaatttagatttactcacgcaactgcaaaaagaaaaaggtcaagaagaaggccttaaagtctatcaacaattacgttggctaaatgacccaagtgccccaactattattcaatctgcacaaaaaactcagcttttagcacatcaacaacaaatacttaaagacattagccctatttcaaacaaggcagccaaaacctatttagctcaagctcgcattgctttaggcaaaagtgtggtagatggtgtacctaccgccagtaatgcatgggtattaaaaggtgataagactattgaaggccaagcagttttatataatggcccacagcaaggatggtatacaccagcaattacctacgctattggtttacatggtgctggctataatttgacaggtataactccagttggcttgcctgcaattttatttggaactaatggcaaaatcgcatggggttcgacggtaggttcactcgatactaacgatgtttatcaactcaccctaaatccaagtaattcaaaagaatatttatataaaggggtttatattccatttgaacacaagcaagtaaaaataaaagttaagaatcaagccgaccatgttttagatgtttataagagtaaacaaggttttgtaagtacatgggatgaaaataaccatacggcgtatgcgcaaaaacgtagctgggaaggcgtagaaattgaaactttattaggatgggcaaatgcagcgaaagcctcaaattgggatgagtttcttgctcaagccaaacgtgtcgcagcctctattacttggttctatgccgatactaaaaataatatcggtgtggctgctttaggtcgtttacctattcgccctgaaaaccagcatattcagcttccagctaaaggtgatggttcaatggagtggcaaggtttttatgacttctcacacaaccctaaagaatacaatccgcaaaaaggttatgtcacaagctggaataacaaagcctatgcaggtttacgctcagattcgtcaaacttttcttatgtagatcgggtgaatgaactaattgaacctttagaaagtaaagcaaaactgagtcagcaagaaatttgggaaattaataaaacggctgcatggtctgatttaaatgcgcgttattttgttccttatatggtcaaagctgcacaaagtcctaaggcaacaccgttagctaaaaaagtcgctcccttacttgccagttgggatcttaaattacgccctgatagcgaggcgaaatattatcaaggtgcagcaccagcaattacgcgtacatggcttaatcaaatgattgaactggtactcaaaccaaacctttcagaaaatatttataagcgttataccgatacgctttatccggtaaataatgatccacgaagtgcacagccagcgagtgcatcaaaattaatctggaatgcactgcaaggaaaacaggcaagcgttcctcagaatgttgatttcttaaaaggacaaacagcagatgaagtcgtattaaaagctttagaaaatgcgctgactgaactttcaaatcaatatcactctaccgacccgaacgactggaaaattccggtggcaaccatgggtttttccagcaaaaattcggtaggcattccttgggctgatccatcgcatgaacaaaagcttagtacttatggaaatactggaagtgctacttttagagtggtcttaaatccaaatcaagtcactatgtgttcaattttagctccaggacaaagtggttttatcaatcaaaatggaaaacctgatgcccactttgcagatcagctctctttatttgaaagttataaatgtaaagatgatgcggtgagtcaaaaagaaatcgaccaatcaactcaacaaagcatcactttaaactactaa

SEQ ID NO: 45071 - DNA, 780 bp, Acinetobacter baumannii
atgccatcttttcaatctgctgatgcacaaatcaactatcaaacctttggcgagccatcttcccctgctctggtgttttccaattctttgggcaccaactatggcatgtggcaaaaacagtttaatgagttaaaagatcaattttttgtcatctgctatgacacacgtggtcacggttcatcatctacgcctgacggtccatatactgtagagcaattaggtgaagatgttgtccgtttactggatcatctgaatattagtaaagctgctttttgtggaatttctatgggtggtttaactggtcaatggctggcaattcactaccctgaccgttttagtcatgtaattgtggcaaataccgccgctaaaattggacaagaacaagcatggcttgaccgtgcaaaattagtacgtgagcaaggtttacaaccaatcgctgctacagctgcttcgcgatggtttacagatccctttatccaaagtcacccttcaattgtcaacaacctgtgtaacgacttaagtgctggcagcgcaatgggttatgccaattgttgtgaggctttggctaaagcggatgtccgtgagcagttaaaagacatcaaaattccagtattagtgattgctggaacccaagaccctgtaacaaccgttgcagatagtcaatttatgcagcagcgcattccacaatcacatcttgaagaaatagatgcctctcatatttctaatgtcgagcaacccgaagcttttaataaaatcttaaaagattttttattggactaa

SEQ ID NO: 45072 - DNA, 1221 bp, Acinetobacter baumannii
atgacattaaaaaacgcttatatcatcgatgccatccgtactccattcggccgttatgccggtggccttgcacctgtccgtgccgatgaccttggcgctgtgccgattaaagccctcatgcagcgtaacccaaatgtagattgggaacaggtcgatgatgtgatttatggctgtgcgaatcaagccggtgaagataaccgtaatgtcggccgtatgtcagcactacttgcaggtttaccatatcaagtgccagcaaccaccattaaccgtttgtgtggttcatcactcgatgccattgctattgctgcccgtgccattaaagccggtgaagcgaacttggtaattgcaggtggtgtggaaagcatgagccgtgcaccttatgtaatgggtaagtcagacagtgcctttggccgtagtcagaagattgaagacaccactatgggctggcgtttcattaaccctaaacttaaagaattgtatggtgtagacaccatgccccagactgccgaaaacgtcgctgaacagttcaacgtcaatcgtgcagatcaggaccagtttgccttggtaagccaacaacgcaccgcaagcgcgcaagccaaaggctttttttctaaagaaatcgtggcggttgaaatccctcagcgtaagggtgatgctgttgtgattgataccgatgagcatcctcgtgcatcgaccacacttgaaggtttaagcaaacttaaacctgttgtgaaagcagatggcacagttactgcggggaatgcttcaggtattaatgatggcgcagcagcactgctgattgcttctgatgaggcagttcaatcttacaatctaaaaccacgtgccaagattattgcttcgacagctgtaggtgtagaaccacgcattatgggttttgctccagcaccagcgattaaaaaattacttaaacaagccaacctgactttagagcagatggatgtgattgagctgaacgaagcctttgctgcacaggctttggcagtgacccgtgatttaggtttgccagataattctgacaaggtaaatccaaacggtggtgccattgctttaggtcatccactcggtgcatcaggtgcacgcttagtcactacagccctaaaccagcttgaacaaacaggtggtcgctacgctttgtgttcaatgtgtattggggtgggtcaaggcatcgcattgattattgaacgtgttgaagcactttaa

SEQ ID NO: 45073 - DNA, 375 bp, Acinetobacter baumannii
atgatgcgtggtggtcaccttgatattgcggtgcttggggcatttcaggtggcagccaatggtgacttggcgaactggcacacaggtgcgccgaatgcgattcctgctgttggtggtgcgatggatttggcggttggtgccaagaaagtatttatcactacagaccatgtgaccaaacaaggtgagccaaagattgtcgctgagctgagctatccggtgacgggtaaacactgtgttgaccgtatttacactgacctgtgtgtgattgatgtgaccaaagacggtttaaaggtgattgagaaagtggaaggtcttagctttgatgagttacaggctttaacaggtgcaactttgattgatgcgactcaagggtaa

SEQ ID NO: 45074 - DNA, 465 bp, Acinetobacter baumannii
atgactcctgcatgtagactgttaaaaagtaacaaaatcgaattttctatccatgagtatgaacatgacgcaaatgctaaaagttttggcttagaagctgcggaaaaattaaaccttaatgtaaatgaggtgtttaaaacacttctggttaccgatgagaaaaattattttgttgcggttataccagttaaccatcaacttaatttaaaaaaagtagctacggcagtagggtgtaaaaaactacagatggcaaatcctaaagatgccgaacgtttaacagggtacttagtaggtggaattagtcctttaggccaaaagaaacgtttgaagacagtaattgatgcctctgcacaagagctcagcaaaatttatgtaagtggtggtaagagagggttagatattggtgtaaatcctaaagatttagcacaaatattaacggcgcaatttgtagacgtacttgattaa

SEQ ID NO: 45075 - DNA, 1434 bp, Acinetobacter baumannii
atgcttgattttattggaattggactggggccgtttaatttaagtctggctagtctgttacatgataaaagcgagctgcaatatcgcttttttgatcagcgtgagaaatttgactggcatgctggtatgcaattgcccaatgcgatgttacaagttccttttatggctgatttggttagtatggttgagccaaccagcccttttagttttttaaattatttaaaacaccatcaacgtttatataaattctattttagagaaaatttgtatataccgcgtcaggaatataaccattattgtcaatgggttgtagaacaacttaaccatattgagtttagtagccatgtgctggatattaaaccgattaaaggtggatttgatgtggaggtagtgtgtaatgggcaccaccaacattatcgtactcgacaattggtattgggagtgggtacaactccacatttaccagaaagcttacaaaagatttactcaaaatcaggaacctgcctgcattcatcagaatatttacagtacaactcccagaagttatcaggaaatgtagttttaattggttctgggcagtcagcagcagagatttttttagatctatttgatcgtcagtatatgaatggtcgaactacaccagactttcatctttattggttaacccgttctgctggtttctttcccatggaaaatacaccattcggtttagaacactttagtccggattacatgcattatttttaccatttaccatcaggtttaaaggcagagttgccagcgcaacaagcaaatttatataaaggtattagcagtaaaacgatacgtgatatttatgagcgtttatatcatcgtagtatcggtggaatgcctacagatgttacgttggctggacatcatcaactgcaatatgcagagctcttagaaaaccaaaaaacaaagttgtgttttgaacatcgtcagcaaaataagaattatattctggaggctgattgtgttattgcagcaacgggttatcgttatccaaaccctaagtttctacaaaatttacaatctttgatcatacgagatcaggccgaccattggcaggtggcttcaaactttaaagtcaattatcaaggtgagggatctatatttattcaaaatatggaagtttatcaccacggcgtaggtacacctgatttaggcttaggagcatatagggcagccacaattgcaaatcaattggttggtgaagagttattcaaacttgatcattctcagtcgttccaacaatttggagtgaatgcatcagcgcaagaagaagtctctattcgcaatattgcagtctcaaaaataaccgagttttcaagacctttaaataaatcagggccaatgcatcattctgctttgggagcgtatgcacgaagtaaattatctgagcatattgaataa

SEQ ID NO: 45076 - DNA, 1440 bp, Acinetobacter baumannii
atggaacgttcttctgtgtccgcggctcaacctcatgagcaaagtttacaacgctacgtacttctgacggttatgcttggtacaggtacggttagtttaaataacagtagtttcaaccctgcaatacctcatttaatgtcctattttcaggtaggtgaggtatgggcaagttgggtagttgttgcctttttattagcaatgagtatcagtttgcctttagctggattcctaagccagcgttttggtaagcggtcaatttatttaattgccttattggggtttgctttggcttctacagtaggtggtttatttaatcagtttgaatcggtgttgattgctagagctctgcaaggcttttgtagcggattaatgattccattatctcttggactaattttttcagttacgccaagtgaacaacggggaagtacaacaggattatggggtgccatgatcatgctaaccttagcagttgggcctatgctcggagcactggttttggtatggcttaattggaaggccttattttttatcaatttacctgttgcttgtctggcattaattttaggctatgtttttctacctaaagagcaaggggacaataagcaagagtttgactgggcaggattcttttttctcggttcaagcatagttttattacttgggacactaagccaaatccatcaaattcaggacttacttcaacctctatatggtgcgcttttagttctaagtgtgctgctttttataagatttatttttgtacaaaagaataagtctatgccattaatcgagccagctttgtttgctacgaagggtttccgctacagcttagtcatttgtgtggcacaaacagtaggcttatttattggcatgttgctcattccactatggatacagcaccttctaaagttaagtccgctttggactggttttgcgctaatgagtagtgcagtagttaccggtatttgtagtcaacctgcaggaaaatatctagatcgttacggtgctgcacaaataatgtctcttggactaatgattaccgcggcttcttttcttttgcttgcttgggcacctgtacaaaatgtctggttcattgtgttttgtatgatattacatggcttaggaatgggactttcttatatgccatcgactacggcaggtttgaacagcttacgccagcagcaacagcatctagttactcaagcggccgctctaaataatttattccgacgtatttttgctgcagtggcagtcgttattgccgcgttatatcttcagctaagacaacaatcattgccgttaaatactcaagcaatatttacatcatttcacactatgcaggaaatctttgtgtgttgtgcaattcttatactttgcactttgcctttcgcatggcgttttcctgaacagtacagaatcgaccaattaaagaaatag

SEQ ID NO: 45077 - DNA, 2100 bp, Acinetobacter baumannii
atgaatatcccacctcgaccatttaagttgtctgtaatcgcctgcgcgatttgttatgccaatctcacctatgcccaagatgcacaggtacaagctttgcaaacgattcaagtcaaagcatcaaatgcagagcagtcttctgaacagaccaaggcatataatgttaaaaactcaagtagtgcaaccaagcttaatattgaggcgaaggaaacaccccaaaccattaatgtcgttactcgtcagcaaattgaagattttggccttaccagtactcgtgatgttttaagtaatacaccaggtgtgacagtaactggattagaaacaaaccgaacaacttatactgctcgtggttttgatatttcaaatattttggttgacggaatcggtatccctcaagttgatagctacaattataataatagtgatgcagatagctatttctatgatcgcattgaaattgtaaaaggtgctgatgctctaacaaatgctctaggtgatcctggggctacaattaactatatccgtaaacgccctaccaaagaatttcaagcaaatgctggggtgagctatggttcatgggatacgcagcgctatgaagctgatatctcaggttctcttacacaagatgggcgagtacgaggacgtctcgtaggttatgagaaagtcggagattcttatcttgatcgctattcagaagaaaaaaacggttttcaaggaattttagaagctgacgttacagacactacaaatatttcagcaggatattcaaaaactcgtcaatacgctaatggttcgcaatggggtgcactacccttagttaactcaaaaggagaaccattaaattattcacgcaactataattatgcaccatcatggacatactacgattgggaaattgataattattttgccaatattgaacaaaatttatggggagactggaagctaaggttaggttataaccttaaaaaatcagaggttaaagataaaatgctttatctcaatggttctccttctgctacagacaatacatctggtatttcactattaccagaaatttataatcaaaaatttaaagaaactacagcaaatgcagatattcaaggtacgtttaatttattagggcagcaacacgaagcaaatattggttataactggtcaaagtataatgcacaaagtgtttattcgtatggtagtagtttaggcgttattactacagacttaccaagctggacacctgaagaaccgacttggggagactttacctatgctgacccagaagaaagaataatgaagtctgtttacggtgccacacgtcttcatttaggtgaggatctgaaatttatcttaggtgctaactatactgaaatcgaaactttggattataaaaagaataaagtttccccgtatgcgggtattacatataactttactcctgaatacacaggttatatgagttatacctctatttttaggccacaaacggttatcgatctttctactaaacaaaccgctgtaccagtagagggtgaaagttatgaagtaggtgtaaaaagctcttggttagatggtgctttaactggaaatatcgctatctttagaacagacgaagataactttgcactaaacccattatgggatccgctctataataaatactcgtcaccaataggaacgattagatcgcaaggggttgaagttggattaactggaaaattaactgataacttagatttagtttttggtttctcaacatttagtctaaaaaatatggaatcaggtgaaagaggtagaccaaatatcccaactcaaacacttaacgttttagcttcttatactgttccccaaattccaaaattgaaagttggtgcaagcattaaatggcaagatgatatacatgacacctcttattcaactgtaaaacaagatgcttacgcattgcttaatgttatggccagctatgatttaaacgaacatgtaatgttccaagtgaatggcaataatctaacaaatgaaaagtatttgacaggtttatctggtggtcagggttactatggtgccccagccaactatacagttgctgtaaagtttaaatattaa

SEQ ID NO: 45078 - DNA, 648 bp, Acinetobacter baumannii
atgtccagatctagacgaagtgatggtgatttgacaaagactaaaattattgaggcagcaggacccttaatcgcccaatatggttttgcaaaaacagcaaacaaaacaattgccaaagtagcaaatgtcgatttagcagcaattaattatcactttgatggccgagatgggctataccaagcagtgttaatggaagctcatgcccattatctagatgaacaatacttactagaacttgttgaaagtacttactctcccgaagaaaaattgagtttattacttgaaactttattacataagttgacggaaaaagatgtttggcatggcaaagtttttattcgcgaactgttttcaccgtctgagcatttattaagttttattgaattaactggtatgagaaaattttttcttattcgaaagttgattagccaagtggcgaacttagatgaaaatgatccggccgttttaccttgtattttaagcgtgatgaccccgtgcatgatgcttattattgccggacctaatgctcaagcacctgagtcacttaaaaatattgctcagatgcccttacatgatttagttgaacactttaaaaaattttcattagctggattaaaagcaattagccaatcaaatcttaaaaattag

SEQ ID NO: 45079 - DNA, 870 bp, Acinetobacter baumannii
atggaactacaaggcatttgccataaaatgcatgcaggcctaaaagatgctagtgtaactgatcaacagacaaccaaggcaaatgttgaatacaaatttatattagaccgttcagaaattgatcttccttttaatttaggacaagaactagaaatcgaatggacaggtaatatttattgcacttcttgtggtgctaaaacaccaaagtcttattctcaaggccactgctttaaatgctttaaaacgaaagcggaatgtgacctttgcattatgaaacctgaaacatgccactaccatttgggtacatgtcgtgaagatgattttgcccacagcgtatgtttccagcctcatattgtctacttagcaaattcaagtgctttaaaagtaggtattactcgcgttagccatatgcctggtcgttggttagatcaaggggcaactcaggccttacctattttaaaagttggttcacgtcgtttatctggtcagcttgaaaccatgtttggttccttaattgcggataagacagattggcgtaaacttctcaaaggcgaagctgagcctctaaatctgattgaacaacgtgatcagttaattgaagaattcgctcctaaaattcaaactattcgtgaagaatttagccaaaatcttgaatttaacgaaacggttgaattactagaaaatgaattgccacgtgagtttgtttatccagttgaacaatatcctgaaaaaattaagtctttaaacttagataaaacaccaaaaattcgtggtgtattgcaaggtattaaaggccaatatttaatttttgatattggtgttattaatatccgtaaatatacaggttacgagctgattgtacgtgcataa

SEQ ID NO: 45080 - DNA, 225 bp, Acinetobacter baumannii
atgaagagattgttacttgtattggctacaggatttggtttagatgggtgtgcatcgttaacacaaaaagcagatgaaaattatattactaaatcgcctgttactccggtcaatactgcctttaatgccactaaagtacttgaacatggaatttttactgagcaggatattgctgatatgcctgaacactcaagtataaattcacgttataaaatatctttttaa

SEQ ID NO: 45081 - DNA, 306 bp, Acinetobacter baumannii
atgaaaaacgtcattattttaacttctatattgttattaagtgggtgtacaattaattctaagttattatcaccagcaaaaagtgatgatgacaaaattattgtagaagcagaaaagtacaagcaacaatatcaaaaaaagatctttaaaatttggaatgttccgccttctttagtgggaatgagtgctagcgttaaagtctttttaagtgatactggtgagattgagcaaattatttttctagataaagaagaccaaaagtttaagtcgagtattgaaaaggcaataatagcgccaacgccataa

SEQ ID NO: 45082 - DNA, 840 bp, Acinetobacter baumannii
atgtcaattacacaaggccatgtaagtattcaaaatctatctctacatttagggcaaactaaaaatcgttttcaggcattagatcgggttaatttcgaaatacaaccaggcgagtttatatgtctacttggcccatctggttgcggaaaatccacattattaggtgctttggcagggcatttaccgattagttctgggtctttaacggtcgatgatgaatcgatatttgaaccgcatccagatagaggtttggtgtttcagcaacatactttatttccgtggaaaagcgtgctcgaaaatattgcctttggtttaaaaatgaaaggcatcgccaagcaaaagcgtattgaacaagctcagaaaatgattgatctggtcggacttaaaggttttgaacataaatttccagctgaactttctggtgggatgcagcaacgagttgaaattgcgagagtactgattaatcaacctcgcattttattaatggatgagccttttggtgccttagatgctcaaactcgtttaaaaatgcaaatgctattactcgaaatttggcaagaaattcaaacgtcggttttatttattacccacgatattgatgaggcactttttttagccgatcgagtgttgattatgagccatcgaccaggacggattattgaggaaatttcgcttaagtttgaacgtccacgggatgttgagcttgtaacgagtagtgaatttacagccattaaaaaacattgcatccaaacgttaaaagaagccactcaacaagaagagttaagccgtttaaatccattagggcttggaaagaaatcacaaattaaggaatacgaatga

SEQ ID NO: 45083 - DNA, 2172 bp, Acinetobacter baumannii
atggaaagacgttcgttaaatcttcacttcatgacatgctctaaaacagcattggcttcatctattgcactcataacatctgtcgtctatgcaaatgaagcagaggtttcgcagctcccaaccattactgtgaacgctacacaaaatagtgatgcactatacacatcaaaaaaagtgagtttatctggttttcaaactggtgatgtaaagaaagtacctgcatctattaccaccattacatctgaacgtatagcagatcaacacgcaaaaacactgaccgatgtgattgaaaatgattcatccttaggcgatggttatgctgcaattggctactatccaaattttgtagcacgtggttttgcgcttgatttaggctcaagctatctcattaatggccataccatacgtggcgaacaaaatgtagctttagaaaataaagaacaagttgaaatcttaaaaggcatttctgcaattcaaagtggaatgtcgacaccaggtggtgtggttaactatgtaaccaaaaggcctgccgatattaaaactattacagtcgatgcaaattcagaaggtggttatacactggcaacggatgtaggcggctttgttaatgatagttttggttatcgaatcaatttagcccatgaaagcatccatccaaatgttgatcacgcaaatggtaagcgtgagtttggttcagtagctttagactggaaaattaatgagcgttctaaattattgtttgatattgaagctcagcatcaaagtcaacgttcagtacccggttatcaactgcttgatgggcaagaagtaccaacaaatgtagatcaagaccgtttattgggttaccagtcttggagtaaacctgttgtaaataacagtctaaatgcgagtttgaaatatcaatatgcatttaacgatcaatggaatggtagcttaagtgcgtctcaaagccgtgttgtgattgatgattatattgtatttccttatggaagttattactcatcaggtaatgaacttgcagtattcgacaaagatggcaactatgacatttatgattatcgcagtccagatgatgcacgtataaccaatcagtttgctgctgggttaaatggtcaattcaatactggcaatatacagcatcaaatcgctttcgaattacaacatacttataaaactctaaaacaccatacaccacttaatggatttataggaacaggcaatatctatgaaaatacggtcgactacaatctgtcattggaaagtccaggcgatcgttacaaagctctacagagtgatcagactgcatttactgtatctgaccgagttcaatttaatgatcaatggtcaactctactcggtggaaaactgattcatcttgatgagcaagcttataattcagatgggcagcaaagccgtgatatggatttaaacaagttcttgccacaattagcgctcatgtatagcccaactgctacgactaatctttatgcttcatatgccaaaggtttatcggatggtggcgaagctccgtggtatgcagaagcgaatgcttatcaagtcctatcacctagaaattctgaacaatatgaacttggtgtcaaacaacaaatacgcaatttcttattaacagcagctatttttgatttaaagcaagataatcaatatacgactgcaaactctgaagggaagttagagtttgtggaacaaggcgaacaacataatcaaggtattgaattaggtttaacaggtgccttaaccgatacacttgacgtaagctctggcattacctataccaaatctcgtcttgttgatattgatactgacagctataaaggtcatcaaactcaaaatgtgccgaaagtacgtgccacagcccagttatcttataaagtaccgtcagttgaaggtttaagattattgagtggtatacaatacagtagcagtaaatatgcaaataaagagggaactgcaaaagtaggcggatatagtgtctttaatattggtgctgcctataaaacaaattttgctgggcatgacacaacttttagattcaatattgataacttatttaataagaaatattggcgtgatgtaggggcatttatgggagatgactatctgttcttaggtaatcctcgtacagttcagttctctacaacttttagtttttaa

SEQ ID NO: 45084 - DNA, 246 bp, Acinetobacter baumannii
atgagaacttattatctaaaaaagagttctaaattaactcaattaaaaaataatatgttgactcttattccaccaacaaaagatgaaaaagagagaatggaattattaaatcctcatatgaagaaaaaagaatataagactgtaaatctaaagtctgataaaaaatggttaaaagaagatagacctgacttatacaaattactcgaagcttttgtaagaaagaagtctaccacctcacataaataa

SEQ ID NO: 45085 - DNA, 1242 bp, Acinetobacter baumannii
atgaaatctttaaacacaaacacttcagctaaaccaattcttccacctgtcgcacaattctcaggtgcagatagagatgctttcttagaacaactcaaggaagatttttcaactcatgaacatatgacagaaagcggtaagactgaaatattcagaatgagtataaaccacgaacttgaaacaatactcagtcgtgttgagctcattaagtatttggtggaggagcgtccaatcgcgacccttaaatctattaaaagttttaagggtaaagagcaactgcgtgttgaatatgccaaggatattccacctttactgaagaaccaaattgcgacaatctttgtttctattcattctagcaactacaagatgggcattgaattacaagcctttcaggacactttctcagaactatcagatgaagaaaaacataccctatatggctttgctctgatcaatcagtgttatacatctgaacaagctcaagcctatgttgcggctttgattaaatttcagaagctgtttgcagcaaaaatggaaagtgcttcaattcgaaaacagctttcgagtcgtgctagtaaccgacgccgtcctaaacagcgttgtgttcagcttgttgaaacgctactaaaaatccattctagaatcctcgttgttcgagtagacctaggattgatacgtgatccagccaagcttcaagaacgctctatttcccctgattttgctcaggctgggcacgatattgagtttatgcaaaagtctatggctcggttctatgaagccgctaaacgtaatcagcttaagcatgcgattgggtacatccagcgtcttgaatacacgcccgccaaaggtctacacctccattgctactatttctttaatgccaatgaccatcgtgaagacatcacgtgggggcaatatattgctgagaaatggaagattgctacaaacaatcttggttctgcttttatctgcaatatgaaaaagaatgagtaccgctatcgtgctttgggcattctggcttataacgaccatgaaatgcttgagaacctcaaagctacgtttgactacatttgtaaaaatgatcagtactttgcctttactgttcaggagagacttcgtagtttccgcataagccaattacctgacgtaccagatacaaagcttggtcgctcacgtaagtttgaacagcttaaccttctagactctgatcaatcagatgatgctcacgaaggaggactgtaa

SEQ ID NO: 45086 - DNA, 981 bp, Acinetobacter baumannii
atgactaaatatgcatcagatgcgttacatgtagccacacatttatcatgcagcattcaacctacttatgcttatgatctgattggttcggagaggtcggcaaaagctcttgggaaatcaaaaaccacgagcatgtttgcaaaacaaaagtctcaaaatagtcatggagcgttgtctctcagtaaacctgttgaattgattaggtccatgtatccattagtgacaggttcccctgtcactaatgggatgttagccgttcgtctaaaaccagagaatgagctgtttattcagtttattaaacaaataggacctatggtcaatgttggaatttactgtgacgatcagtatttttcgaacaaaatgacgggctatcaatatacgctcaatactagacaggttaatgagaagtcatcggcttgggatgcagaacaagttcgtattgaagagttatttgattcaacaatgaaggctataatcaaggacaattctggcttcgagacacatgagctaaatctgccaatgcaatttacgctttcagcgaatacaacaacgtattccaaaaagcaatatttagatcagcagaagaaagatatgatcgctgttttccttaatgaaagcggtaataatgatgttattgccgtcttttccaaatgggaacttacacctcaaggacaattagcacttagactggtgtttttactggaacgccagttcatagatgatcctattggtttatctgatgaaaatgctttcgttgccttacaaggtaatctggaaggcctgtttaattgcaaagcataccctgtgcctatggcattaaacggctttatgcaaaccaatcgcttttttaaaggtgatccaaagtataaagaccttattaagttgcttaaaacgtatctagttggcaccgatacaatccttcgaatctgggatacgcagtctggttttgatgttttgtattctaaatttaaagctagttag

SEQ ID NO: 45087 - DNA, 273 bp, Acinetobacter baumannii
atgggagtatttcagttaaaaaccgctgattacctgttcatgaaatatcgcactatgactgttgaacttatgacggtagtacaagaatattaccctcatttaagtaaggcggaagcgctgagaaaggcaaataatcaagaatttcctttctcggtctttaaaatagatccaagcaaacgtgcaccatttctggtacacgttcaagacttggctggtattttagacaaaaagtattctgaagctgctaaagactttgctacgtttcatcaatga

SEQ ID NO: 45088 - DNA, 1149 bp, Acinetobacter baumannii
atggggtcaattactgccagaaaaggtgcagatggaaacgttagttaccgcgctgctatccggatcaataaaaaaggctatccagcttattctgaaagcaaaacatttcattcaaaaaaagtggcagaaaactggcttaaaaaaagagaagtcgagattcaagaaaatccagatattttacttggcaaagaacaactgattgacctaactttgtcagatgccatagataaatacttggatgaagttgggagcgaatacggaaggacgaaacgctatgctctactcttaattaagaagttgccaatcgcgcgcaatattatcacaaaaatacattcaacacatttggctgagcatgttgctctaagacggaaaggtgtgccgaatcttggcttggaacctattgcaacaagtacacagcagcatgagctattacatattagaggcgtgctatctcatgcatctgttatgtggggtgtagagattgatttaagtaactttgacaaagctacagcacagcttagaaaaactcgccaaatctcttctagtaaagttagagataggcttcccacaaatgaagatttagttactttaacgaaattttttgctgaacgttggaaattaaataaatatggcactaagtatccaatgcatttaattatttggtttgcaattttttcatgcagacgtgaagcagagttaacacgcttatggctgcaagattatgattcttaccattctgcatggaaagtttatgatttgaaaaacccaaatggttcaaaaggcaatcataagtcttttgaagtgttggaaccatgtaaaagaataattgaacttttgttagataatgaagttcgaagccgtatgcttcaattggggtatgataagcagcttttattgccattgaatccgaaaaccataggaaaagagtttcgtgatgcttgtagaatgttgggaattgaggatttgcactttcatgatttaagacatgaaggttgtacgagacttgcagaacaaagttttacaatacctgaaattcagaaagtaagtttgcatgattcttggggtagcttacagcgttatgtttctgtgaagtcaaggcgaaatgtaattcaattggaagaggtgctacgcctcattgatgaaacgtag

SEQ ID NO: 45089 - DNA, 393 bp, Acinetobacter baumannii
atggccctaactttaactatgcttagccctgccgtacttgcaaatgataacaatgatatacgaaagactgttgtagttaagtttgcaaaaaaagcttactctgcaaattattacggaaggatagatggatacaagtatgattcctacaaattttatgctaaaaaagggcaaaagttaaaagtgacgttgactggaggaaatgttgaaacttacttatggggtaatcaattaaaagactccatcaatcttggagaatattctccagagcttgataataatggtatttatattttacctgcttcaggtgagtatgaaattagagtatttcaacctagatcacaggcaagaaaagataaaaaacctcaatactggatgagtattaacattaaataa

SEQ ID NO: 45090 - DNA, 639 bp, Acinetobacter baumannii
atgattacactacatcatttagatcaatcacgttcttttcgcattttgtggttacttgaagaaatcaagcagccctatgagctgaaacgctattatcgtgactcaagcacgcatttggcccctgactctttaaaaaccattcaccctttagggaaatctccagtattggaatgggatggcaaagttattgcagagtcaggagcaatcgttgagttattaattcagcaacttgcgccgcatttagcaccagatatggatgaacctacctatgtcgattatctacagtggattcatttctcagaaagctctgccatgctgccatttttgttaaaaacgtttaatgcgatagaaaccaagcagggtacgaagttggtatttctagaaaattatactcaagttgagttcgataaagtatttagctatttaaatgaatatttaaaagataaagaatttctagtcgcagaccgtttaaccggtgctgactttatgatgggctttggattacatgctttagttcatcatatgggacaaggtgaaaattatccccatatccaacgttatgtagcaggtttaagccaactacctagctggcaagccgcagtacaaattgaacaaaatggtgtgaaaagtcaaaaatag

SEQ ID NO: 45091 - DNA, 1020 bp, Acinetobacter baumannii
gtgaaaacagttattaatcaacgcatcgttttagctaaacggccagtgggtgagccaaaacacagcgattttcgtattgaacaagttgaactcaatgaacttaaacaaggcgagatattgttaaaaaccatttacttgtcactcgatccttatatgcgtggtcgcatgagtgacgctccttcatatgcagcaccggttgaaattggcgaagtgatgatcggtggaacagtcagtcaagtggtggcctctaaaaacccaaaattcaaagaaggcgagtgggttctttcaggaaatggctggcagggctacgcaatttctaatgggactgcatgtcaaagcttaggtatgcaacctgaacatccatcttgggcattgggtattttgggaatgccaggatttactgcttatatggggttgttggacattggtcagcctaaagctggtgaaactttggtcgttgccgctgcaacgggacctgttggtgctacggttggacagattggcaaaattaaaggttgtcgcgtggttggcatcgcaggtgggcctgaaaaatgtcgttatgcagtagaagaactcggcttcgatgcttgtatcaatcatcatgatgaaaattttgcagaacaattacaacaagcagttcccaacggtattgatatttattatgagaatgtagggggtaaagtgtttgatgcggtatggccattgcttaactctgcggcacgtgtaccggtgtgtggtgtggtttcccagtataacgctaccgagcaagcacaaggcccagaccgtttaccgggctttatttccacccttttaaaaaagcgtattcgcatgcaaggctttattatttttgatgattatggcagtcagtatccggaattctatcagcaaatgtctgaatggttgaaagacggaaaaatcaaatataaagagcatatggtgcaaggtttagataacacgatcaatgctttcaatagtatgttgaaaggcgaaaactttggcaaagtcgttgtaaaaatttaa

SEQ ID NO: 45092 - DNA, 609 bp, Acinetobacter baumannii
atgaagcctactcctattaaaaagtctgaagcgaagcgcttacacattcttaacaccagttcagacctgattttgcataaaggttttactggcgtaggattacaggaaattttacagagctgtgaaatccctaaaggctcgttttatcattatttccaatccaaggaagctttcggatgtgaattggtacagcattatgtagacaattaccaagtccgtttaaatgatgtatggcgtagtgataaatccccttatcaaaagctgattgagtattttaatttatggatagaagatcctgaaacacagtgtggttgggcggatagctgtttaattgtgaaacttgccgcagaagttgccgatctatccgaagatatgcgctccattatgtccgctggcgtcgatgatgtaatccaacgtattgctggcttaattgatttgggaaaacaggatcagtctatccaagcagatactgaggcctcgaccttggcacaagtactttaccaaatgtggttaggtgcagcattactgagtaagttgcaaaaagataaaacaccattacatcaagctctgagtgcaactaaatttctattaaaaagtgaagattcataa

SEQ ID NO: 45093 - DNA, 231 bp, Acinetobacter baumannii
atgaattctcctcctaaagccctcatgactcgtattttagtcggatatttaggtttatatcccacactattactggtactcactttattaaagccaattactgagcatcaaagtttcccgatgatggtgttgattgaagtcatagtattagtgccagtaacgcaactgatttctttcccactggcaggttggctcattacacagctaaaaaattttaagaacttgttttaa

SEQ ID NO: 45094 - DNA, 1128 bp, Acinetobacter baumannii
atgaaagccagcaaactttttcaaaacttaagcttaggcccttatgttttgcaaaaccgtattgtattgccaccattaacgcggtcgcgcagtactcagccagggaatattccaaatgaactgatggcaacctattatcaacagcgtgccggggcaggatttatggtcaccgaaggtacgcaaatcgagccacgtggtcaaggctatgcttggactcccggtatttacagccctgaacagattgctggatggtgtaaagtgacggaagcagtgcatgctaaaggaggcattatttttgcacaactttggcatgttgggcgtgtttcacatacatctttgcaacccgatcatgcatcaccggtcgcgccttcggctattagggctgatagtaatgttaaagtctttattgagaccgggcccaatgcgggggccttggctgatccttcaatgccacgtgctttaagcaatgcagaagttaaagaattagtgcaactctatgctcaagcagcgcgtaatgccttggctgctggttttgatggagttgaaattcattgtgcaaatggttatttggtgaaccaatttatctctgcacatagtaaccatcgtgaagatgaatatggtggatcactaaacaatcgtttgcgttttttacgtgaagtagtagaggcagttgctgaggtggttggtgcagatcgtttaggagtgcgttttgccccgctatttgaaagtacagaggaagatcgtgtttacatggggttggttgaagatgatccacatgtcacttatattgaggcaataaagatacttgaagaagttgggattgcctatttatctattgcagaagctgattgggataatgcaccagaacttcctcatgattttcgtagagatgtcagagacactttcagtggtcggattatttatgcaggtcgatatacggcagaaagagggactcgaattttagaggcaggtctggccgatttaattgcatttggacgcccatttattgcgaatccagatttacccgatcgaatcgccaatggctggccattgaatgcagtagatgcaagcactatgtatggtgggacggaaaaaggctatattgattatccggcttacgcagattaa

SEQ ID NO: 45095 - DNA, 678 bp, Acinetobacter baumannii
atgaaaattttaatcgttttaacctcacatgatcaacttggcaatactggtaagaaaacaggtttctggctagaagaacttgctgcaccgtattacacctttattgactctggtgctgaagttacgctggcgtcacctcaaggtgggcagccaccactagatccgaaaagtaatttagcagaagcacaaactgaaaccactcatcgttttgaagctgatccaactgcaatgcaagcattggcacagacgcataaacttagcgaaatctctgtaactgattatgatgcagtgttttatccaggcggacatggcccattgtgggatttagcagaagatccgatttcaatttctctgattgaacaggcgattcagtctggcaaacctgttgcagcagtgtgtcatgccccaggtgttcttcgtcatgtgaaagcgagtaatggagcgcctttagttagcggtaaattagtgactggtttcaccaatactgaggaggccgctgtaggtttgactgaaattgtaccatttttagttgaagacatgcttaaagaaaacggtggtcattattctaaagtggatgattggcaagtatatgttcaagtagatggcttgctggttactggacaaaatccagcatcttctgctgcaaccgctacagcattacttcaattgttgaaataa

SEQ ID NO: 45096 - DNA, 1158 bp, Acinetobacter baumannii
atgctgaattttaacttttataatccgacccgtattatttttggtggcgatacaatagctaaaatcaatgactatgtgcctacagaagcaaaagtgttaatgttgtttggtggtgaaagtgcacgtaagaatggtactttagctgaagtgcgtgaagcattaggtgcaagagaaattcatgaatttggcggaattgagccgaatccgagttatgaaaccctcatgaaagccgtagagctgattcgtgaacaaaagattgatttcttgatggctgtcggtggtggatcggtaattgatggtactaaatttattgcagcagcagtcaattatacaggggatacatgggagattttagaaacccatggtactaaaattactcaagctttgccttttgcgagtgtactcacccttccggcaactggttcagaaatgaatagcggtggggtagtcaccagaaaatcgacccaagccaaattgtcatttagcagtccccatgtttttccgcaattttccgtactcgatccgaataaaacttttagcttgccgacgcgccagttagcaaatggcgtggtcgatgcatttattcatgtcatggaacagtacttaacttaccctgtcaatgcacaagtacaagatcgttttgccgaaggtctattgcaaactctgattgagattggaccgaaaatcttggacgattcagcagattatgacacgcgtgcgaatttgatgtgggctgctagcatggcactgaatgggctaattggagctggtgtaccacaagattggtcaacccatttgattggacatgagctcacggctttacatggtattgatcatgctcgtaccttggccattgtgtttccggccaatctacaagtgcgtcgtcaagagaagcgagaaaaattactacagtatgcagctcgtgtctggcagattgtcgaaggtgatgaagaacaacgtattgatactgttattgctcgtactcgagccttctttgagcaacttggattgccgactcgtcttagcgattatggactggtggagacagatattgagatcatcattacgcaacttaaatcacacaatcttacacagctaggcgaacataaaactgtttcattagagatcagtcgccaaattctcgcgacgagcatctaa

SEQ ID NO: 45097 - DNA, 303 bp, Acinetobacter baumannii
atgcttaaaacagctttatatgtccgtcttgaagctaaaccgggtaaagaagacgaagtggaagcttttcttaaagccggtttacctattgtaatggaagaacctgcgacagttgcgtggtttggccttcgtcttggtcctacaacatttggtatttttgatgcatttcctgatgaggcgggtcgccaagcgcatttatctggcaaggttgcagctgcgttgatggctcaggccgaagagctattttcagagccaccatctattgaaaaagtagatgttttggcgagtaaactaccagcttaa

SEQ ID NO: 45098 - DNA, 831 bp, Acinetobacter baumannii
atggaaataattgagaagcatgcttcttttggtggatcgcaagaagtgtatcgccatcagtcaatagcattaaactgttcaatgaaattctcaatatatctgccacctcatgacaaagatgagcggttgccagtgttatattggttatcaggattgacttgcaacgaacagaactttattactaaagccggagcacaaaagtatgcggctgaacataaagtcattattgttgcaccagataccagcccacgtggagaggatgtaccagatcatgcagattatgatttaggccaaggcgcaggattctatgtgaatgcaacacaagcaccctggtcgcagcatttcaaaatgtatgattatattgtggaagagctcagaaatctgattgacctgaattttccgaccaatcaagtccaaagtattatgggtcatagcatgggtggtcatggtgcattagtaattggattaaaaaatcctgagctgtataaaagtatttctgcttttgcaccaattgttgcacctagccaagtaccttgggggaaaaaggcttttacacactacctaggtgaaaccgaaactttatggaaaagctatgatgcgattgaattaatcaaaaacgctgaagttcatttacctattttagtcgatcaaggaacagctgatgattttcttgaagaacagttaaggcctaagcttcttagtgatatttgtttggaacaagaatatcctcttacacttaacctaagagaagggtatgaccatagctattacttcattgcgagctttatagagaaacatatagagtttcacagcaaattcctagctaaataa

SEQ ID NO: 45099 - DNA, 1113 bp, Acinetobacter baumannii
atgaagtcacgtgctgctgttgcgtttggtcctggtcaacctcttcaaattgttgaagttgatgttgcaccaccgaagaaaggtgaagtattaatcaagatctcccataccggtgtgtgtcatacagacgcatttactttatctggcgatgatcctgaaggtgtttttcccgctattctcgggcatgaaggtgctggtgttgtagttgaggttggtgaaggcgtgactagcgtcaaaccaggtgatcatgtaattccactttacactgctgaatgtggcgagtgcgtattctgtaaatctggaaaatcgaacttgtgtatttccgttcgcgaaactcaaggtagaggcgtaatgccagatggtaccactcgtttttcctacaatggtcaaccgatttaccactatatgggctgctcaacgttcagtgaatacactgtagtggcagaagtatcattggctaaaatcaatcctgaagccaatcacgaacatgtctgcttactgggttgtggggtaacaacgggtatcggtgcagtacataacacggctaaagtacaagaaggtgatagtgttgcggtctttggtttaggtggtattggtttggcagtcgtacaggccgcacgtcaagctaaagcagggcgtattattgtggttgacatgaatccagataaatttgcgctggcaaaagagtttggtgcaacggacttcttgaaccctaaagattacgataaaccaatccagcaagtaattgtcgaaatgactggctggggtgtagatcattcatttgaatgtattggtaacgtgaatgtgatgcgtgcagcccttgaaagtgcacaccgtggctggggacaatccgtaattattggtgtagctggcgcaggtcaggaaatctctacccgtccattccaactggttactggtcgtaaatggctaggttctgcctttggtggtgtaaaaggtcgtacgcaacttccaggaatggttgaagatgccatgaaaggtaaaattcaattagaaccatttgtgacacatacgatgggcttggatcagatcaatgaagcctttgatctaatgcatgaaggtaagtcaattcgtactgtaattcattacgaataa

SEQ ID NO: 45100 - DNA, 276 bp, Acinetobacter baumannii
atgcctaatcaggttgaagacaaaaaaaagattcttctacgcgtcagaaagatcaaaggtcagacgcaagcgattgaaaaagcgttagaagacaatgtggaatgtggtgcaattctgcaacaaatatgctctgtgcgtggtgctattaatggtttaatgaatgagatgttggaggttcatttaaaggacactttagtatcaggtgaaaccacagaacaacaacgaaaagaagaattggctgaaatcgccaagattctaaaatcatatttaaaatag

SEQ ID NO: 45101 - DNA, 996 bp, Acinetobacter baumannii
atgaataagatgatgaatgctcttatcctagaaaattttggtgatcatgaatttaaacgtgtagaactccctatacctcaaccagaggctgggcaagttctagtacgtattcatgctagtggtgtaaaccctattgattataaaattcgtcttggtgaagcaccatatgctatgccagagcttcctgccgtgttgggaacagatatggctggggttgtaactgctgttggtgaaggtgtcacccacttcaatgtcggagatgaagtttacggtctgattggtggcgttcgtggtcttcaaggatctttagcagaatatgttttagcagatgctgatctgatcgcattaaagccacgcaatatctctatgcgcgagtcagcagtactaccattgacgttcctcacggcttgggaaggtttagtggataatgcgaaggtccaaccagggcaaactgtactggttcagggtggtgctggtggcgttggctatatggttgttcagcttgcaaaagcacttgatgcaaatgtttgggcgactggtcgaacagctgatcaatcactgatttcagaactcggtgcaacacctctcgattacacaacagcatcttccgatgacattattgctgcaagccctgagggtcaaggttttaacattgtttacgacactgtgggtggtccagtactcgaagcttcactttccatgacaactcactatggccacattaccagctgtgctgcatttggtaatcataatttagcgagttcatctctacggtgtgccacagtgtctggcgtattcgtcctaatgccgatgttaacaggcaatcgccgtgctcatcatggtgatatccttaagatcgcgactcgtctcgttgaggaaggtaaactgcgtcctattgttgatcctcgtcattttactctagaccaagcgattgaggctcatgatgctgttcaagatcgctctgccaatattaaggtcgtgattgatgtcatttaa

SEQ ID NO: 45102 - DNA, 1017 bp, Acinetobacter baumannii
atgtcatttaacgcacttcaggccaagacttggcgcttcaatagtattggagatacagatgttctggcattagaaacacttcctgttgctttaccagcagcaggagaagttctaatccagatgaaaacgatcggactcaaccgggctgatgtaatgtttcggcgtggaacttatattcaaaaggcagtattcccttctcgtctgggatatgagggagcaggcatagttctggcaataggtgaaggtgtacgccaattttctccaggagatgcagtatcgattcttccgactgacaatctagccaaatatgggacatatacggacaagcttctgattccagaaacttttttagttcacaagcctgatagtttaagctgggaagaagcttcttcaatctggatgcagtatttgacggcttggggtggtgtaatccatgctggtggagtttcgaaaggaaaaacgatcttgatcacagcagcttcaagtagcgtaggactagctgcgatacaaatagctgaagcagcgggtgctaaggttattgcaagtacacagacgatagagaaaaagcaacgtttactggatctcggtgttaaagatgttatagccagtgaagatgaaccagatttgtatgaggcgcttgttttacgtttaggtggagaacatcttgatatcgtcttcgatgctgtaggagggccacatattgaacagattgcaaaagcgatgtctgtgggaggaactatggttatgcatggtgcgcttagcccggagatcacaccattcccccttaaagttgcattacgcaagagcttaactatgcgaggttttttgttccttgaggttctccacgaccctgttctaagggagcaagccagacgatttattcttagcagtataggtgcaggatatcttcgtcctgtgatcgactgttgctttaactttgaggacatgcatgacgctcagcgctatcttgaatcaaatcagcaaataggaaaaattgtagttactctgaatacatga

SEQ ID NO: 45103 - DNA, 900 bp, Acinetobacter baumannii
atgcataataaattggaaatgatgcgtatcttttgtgtcgcagcagagtctcgaaattttaaagaggcagcaactcagctgggtatttccccacaggcagtaacacgggcaataaaagagctagaagagcagcgcggagagattctgttttacaggagtactcgacaaattaaaattaccgctgatggtgagcgtctggcaaagcaagcacgttttgcggtgggatcgatcgatgctttgtttgtaaaagacaccaaggaaaaacgagatgaaatgcgtgggactgtccgtcttactgtgtcgtctgtgttagggcgcaaattggtagtacccgcactagcagaatttgccacacgttatccagatattgtcgtggattgtgtgctaacagattcacactcggatgtgatcgatgagcggatagatatcgggatcagatttggatttttgccggacaatcgatatgtggcaagggaattggcgaaagtgaacttttattctgtgggtacgccagagttaattgataaggttggaatgcctaaaaaaattattgaccttgataaataccctctaacagcactagtcgatcataaaacagggcgttactggccatggacattcaccgaaagtcgaagctttacgccatcaaagccccgttttattacagatgatctagaagctgaatttcaagctattctcgctggcgttggattcggacacatgcctggatttctagttttgccgtggcttaggagtggtaagctcattcagatacttcatgaggaaacctctcccgtttggcgcctgtatttatatcgtccacagcggggcccgacacctttgcgaatccgagtattgtttgattacttagcggaagtgctgggccatatagaaaactga

SEQ ID NO: 45104 - DNA, 741 bp, Acinetobacter baumannii
atgaataatatagaaaataaagttattgtgatcactggtgcaagtagtggtttaggtgaagctactgctcgcttacttgctaaaaaaggtgcaaaggttgtacttggtgctagacgtactgaaaaattagaggctattgttcacgacattcgtgctgaaggtggtcaagctgaatttattggtatggatataaccaaaccacaggaagtacaagcacttattgaaaaggcattaagcgcatttggtcaaatcgatgtattggtaaacaatgctggattaatgtctattgcaccattaagtgagctaaaagttgatgaatgggatcgtatgatcgacattaatattaaaggtgttctttatggtatagcagctaccctacctgttttccaaaaacaaaactttggacactttattaatctcgcatctgttgcagggataaaagtatttagtccaggaggtactgtttatagcggtactaagtttgctgtaagagccatctcagaaggacttcgtcatgaagttgggggaaccattagaacgactactattgagcctggtgcagttgagtcagaactaaaatttggttcttctcataaagaaagctcagagtttgttactgatttctacaaacaagccataccagctgactcagtcgctcgagcaattgcttatgcaattgaacagcctgcggatgtagatattaatgaaattgttttacgcccaacgagccaagagttttaa

SEQ ID NO: 45105 - DNA, 999 bp, Acinetobacter baumannii
atgaaagccgtatcgcatgttataaataaccatgatgattttaaaaattcattggtagatactgaaaaagcgaagcctacgcttaaggagcgtgatgtactggtaaaagttcaggcaatctctgtgaatccagttgataccaaagtgagaaaaaattcgtctgaagcaaataatcgtattttaggttgggatgccgttggggaaattattgaagttggcttaaaagttacctcgtttaaagtaggagattctgtttggtatgctggcgatttaacccgagatggtagtaatgctgagtttcaagcagtcgatgaacgaattatcagtcttaaaccaattacagtatctaatgcagaagcagcagcattgccattaactgcgataacagcatgggaaatgctgtttgatcggtttcaaatttcagaaacagaagttggcagtattttaattattggtggtgcaggtggtgtaggatcaatcgctatccaactcctaaaagcaaaaacaaatctgaccgttatagcaacagcttcacgtgaagaaacgaaatcttgggtggaatcattgggtgccgaccatgtcatcgaccatagcaaagatttaaacgaacaaatcgaagcactaggtattgaaaaaccaaaatacgtattctctaccaatcatacagaaacatataccaagcaaatagtttctctgattgcaccacaaggcaagcttggattgatcgatgatccacaaacatttgatattatgccgtttaagactaaatctatttctatccattgggagttgatgttcacccgttcaatgtatgaaaccgatgatattgaaaagcaaggtgaactgttgcaacaggttgcccaattagttgaccagcaaaaaattagaagtaccctcaaccaaaatctaggcaatattaacgctgcaaacttggagaaggcgcataagttgcttgaatcaggtaagtcaaaaggcaaaattgtactagaaaacttctaa

SEQ ID NO: 45106 - DNA, 285 bp, Acinetobacter baumannii
atgactatttcagtaattgcgaacattaaggcaaaatcagatcaaaaagaaacgttagaagcgcttttaaaaagtgtaatagagcctacgcttcaagaagaaggatgcttgaaatatgagctttatattagcgaaaatgactcgagtagatatttcttcttagaagaatggcgtagcagagaggatttagatatccatctagcctctgattatattcaaagtttatttggtaatattcaatcgctcattgaatcaagtgatattgtagaaatcaaaaaaatatag

SEQ ID NO: 45107 - DNA, 270 bp, Acinetobacter baumannii
atgattttagatgccattcttagttcaactgataccgctcaagatagcggtcatgctaccgctcaagctggcgatcatgttcaacggttaatttcagcaatgaagcaaggagactatactttcgctgagttgatgcaattggtcggattgactcatcgagcaacgttccaaaagaattacttgaatcctgccatagaagctggctcgattcagcgtactattccagataaaccgaaaagtccgaaacaaaagtatagattaaaaagataa

SEQ ID NO: 45108 - DNA, 810 bp, Acinetobacter baumannii
ttggttcattttgcagtagatacttgtgacgtctatatgaccacgaagttggatggagagaataccttttttctacctttcaacaaaggttatctaaatggtaaaggtaatccacctgtagaaggcgatgtacgcacgcattatctgtggacagaaactttagctcgtcatagttttatggaaatctttgctcgatatatgcatttgagtgtagaaaccaaaaagattagaactgatactggctttcgatatatagaaaaagaaacaatgattttcccacgctaccatcaattagatgctgtgcgtaaactcacaaaacacagtaaagccaatggttcaggtcataactacttaattcagcattcagcaggttcaggcaagtcaaatacgattgcttggctcgcacatcaattggcatcgatgcataatgcagatgatcagaaaatttttaattccattattgtgattactgaccgtattgtattggatcgtcagttacaagaaacaattgcacagtttgagcataaagatggtgtggtacaaaagattgatgagaacaccttacagctcaccaatgccttagcttcgaatgtacctatcattattactactatccaaaaattcccatacatcatgcaatctattcgcacccaagcgaaaaaaggcattaaggttgatttgagtacagaaggtaagaatttcgctgttattgtcgatgaagcccacagttcacaaagtggcgaaacggcaatggaattacgtaaaattctaaataaagatgggattgaatctgcaattgcccaagagtga

SEQ ID NO: 45109 - DNA, 291 bp, Acinetobacter baumannii
ttgaatattcaaggtactaacgatgatgtatgggtcaaagcagatcgttatttggatggctttgaacaagagccatctacagatttacagcatgtaaaaaatgtaggtaaatatattcggaaggtagttaaagctcggcaagatatcaaaaagacagtcaattattattctgaattttataatgaaattatccatgaacaagaagagctttacattaagtttgcaatgaaaagatggtcgttaaaaggctatataggatataaaaagcaagtagaagaagtggaagattga

SEQ ID NO: 45110 - DNA, 864 bp, Acinetobacter baumannii
atgtcaaaaaaatttgaagactttaataatccaagagaaaaagcattgcaggggatgaaagatagtattcccgcttcacaatgggaagaaaacttacagtttctcaaacaattaaggaataaaattgcgcaattaccagtaagtaaacaccctgcaattgaaatattaaataacggttatcttgataaacaaaccctgactcgtattcatttagaatatcgtcatgccattgttcagatttttaccgatgctttattaaaggcgcagtttctgacaaagcaattggaaccaaagcttcactcgggtgctaaaatgtttccacgggtgttgttgagcttaaatatattagatgaatttggttttcgaccgggtttagataaagataattattatttaggcaaccctgaatatgcacattatccattatatgaagatttgctaaatgactatggtttgactgaggctgaccgccgtaattataaaccttcaaaaattgcagatcaggtgagaacatttttagaagcttcttacgatcgttatattaatgtggtggcattattggcggtggcagaagaagaagttattctttttagcccaccattgcgacaagcaaccaagtttgtaaatatcgatgttgagggtggtggttattaccatgtacacggcgtttcaacagatgaaacagctgaagctgctgatgatgaccatcaggatgacctttggtttgcgttggctcaagccattaccaaagatgattatgaaagcttgactcaactatgtcttgattattgtgcactgtggactgagttttgggatgcacaaattgccgatgtccaatttattgaagaaaagaaattggcataa

SEQ ID NO: 45111 - DNA, 1119 bp, Acinetobacter baumannii
atgatatttatatattatttcttgtggtttggtttggcacctatatttgcggatagatataattatttagattattctgataatatagtttataaatcttatgtttatttgtcttcaagttttataactatgatattagtttctatgtgtatagaaactaaatacgaaaaaaagttttcttttataaaagttgattatagtaatgtaagaatcgatggtaaaaaactaacttttacttttatatttagttttcttttttttcttttgtatttatttaatactggaggatttagttactggatagcaaatattgatcgagcttttttgactaggcaaggggcaggagtatactatttaggcttttcattgtttttccccgtatttatattttttactagatttaagtataaaaatttaattttattaagtacattaagtttattagtgatagctttaagtccatttataggtagtaaacaaaaaattatttattgttttttattactgttttcttccttaattttgagaagaaagttgacactaagtaattctttaatgattggcttgcccacaatctttttatttgtattagggaattattttagaaatgtttcatggatgacattaagcgatgttgcttcatattcatttaattattttgatactttagattctttattgctatttttatataacagacattacccatttgaaattatgtcagtaggactccctttaaataaaattgttaatttatatacaggtggcgatgaattttttgatgtaagtgcatattatactaatatatactttcctgatgcttggaatatacgagcaacagtacaatttcctgtggaagtagatttatttttaagttttggtttttgggtgggattaattcctttaggaatttttgttggaatatattcattaattttcattaaaatgttatctagtgaaaaaattgtatatggttttatatggtttaatttatttttctatttgttaagtcacatgcgtggtggattatttatttggacggatttatatttatatccttatcttattttagtatattttctttttaaagaggttaaagttaatgtgcctaaaaaataa

SEQ ID NO: 45112 - DNA, 459 bp, Acinetobacter baumannii
atgtgcctaaaaaataagaaatatgaaattataaaaaaagctattgaaaatgaaatttcagtagataattatctttttgagaagctaaattatggctcgaaaaagctatctattttcaaaatgctacgattcaaagataaaattcctttatggatttctgtgctatcttctattttaataccaatttattttgctattgaattttttgttttttttggaaggagtagaaatacatcaaatcttgaaaatgatcaatattttttatctttttctaactctccaaaagtaattgcaatttatgaagaatatgcttctgatatagagtttttgcaatgtattaataataaagtttattgttttgttggctatttaagtcctctagttatcctgaagagttttattcattcaattatacttcactgccttaacctcaatacttcttccaaatttattttatga

SEQ ID NO: 45113 - DNA, 546 bp, Acinetobacter baumannii
gtggtaaatcattatgataggtggttaactgttttgtcaaatattggtaattttgatattgagataatacagcatggaattttaacagaaaattatgttgttaagcataaaataccaaatatttcttttttaaaagtttttgataaatctcaattgagtatttttctaaaaaatatattagagggtatacctaataaaattgattatatgaaaattagtttagatatcaacttttctgataaatgtgaagtattgataattagtaatccattttttataaatcaggaactgttattatataaattcttgaaagataaagggattaaagttttttttagacctcatccactttatattaatgaagaaataaaaagtgtagttgaaaatgatgaattatgtttaggaaaaagatttccatatcctaacgtttgcttatgtaatgagtctactttgggtaaagaatatgaagcaatgggttttaaagtattatggtggaatcaaaatacagattttcataagatatggaatttagttaataatgcgtaa

SEQ ID NO: 45114 - DNA, 1272 bp, Acinetobacter baumannii
atgcgtaattttattttatatggtttagcttctgcttttaatagaggtggagtttttcttatactccctttactagctgctttactttcagttgtagattacggtaaattttctctctatatgacagtagttcaacttttagtgccgctaataagtctaaatatttctttattggtgggtagggaaatttacgaaaaacctattgtagttaaaagctttgttgtactatttaatagattttctatttttacaataatagttttttttactttaaatttttttattagaaatattattttattgattttaatttatacctttttggaagctatttttttggtgaattctacatatattcgctttaagtatggtgcagatcaatttttctatgtttgtttttttaaaatttttattctttcttttttattaggaagtttctttatctatgataagcagataatagtatcaataaaaaatcttatcatgatcttttctttttctaatttatcaattgtatattatcttgtaaagacctctttttctttcagttttaagagaatgtttgtaattataagcaactataagagtatgctacttttttctattgggttattacctcatacactttctcaatgggtaagttcaagttcagaccgtttttttgtcaaactttatacaaatgatatagaactagggtactactcattttcatactctctggctgctatatttatgattgtaaatagttcattagctctcggaatacctcaattatgtgttaaaaattttatttattttaattccaaaaaattttactcaatattcttttcactagtgtcaatcttatgggttctatttttaattatttatattgggatattatattatttttcagacaagtatgatgttaaatatatatttaaaattggatatgtaattctagtagggatgtattttttatcgttctattattattattcgtcttttcttttttatgatagagcatctaaaaagttatcttatattactttttttgtggcagttttaaatgtttctctagtagtgcttcttactcctttgtttggtatactaggtactgccttcagtacattaatatcctatttaatatatgttttaatgtcctataaacatgcaagtgttaattatacggtaactaatttgtatgctcctttatctttcatagtaattatttcagtatctatatttgtttttttatacttctttaaaataggtggtgtgagttatgtttaa

SEQ ID NO: 45115 - DNA, 1035 bp, Acinetobacter baumannii
atgtttaaaaataaggttttattaattactggtggtacaggatcttttggaaatgctgtattaaaacgatttatagatagtgattttaaagaaatccgtatctttagtcgtgatgaaaaaaagcaagatgatatgcgcaagaaatatcaatcagctaagcttaaattttatataggggatgttcgagattttaattctgttttaaatgtaactagaggtgttgattatatttttcatgctgcagcacttaagcaggttccttcttgcgaattttatccaatggaagctgttaaaacaaatgtgttggggacagaaaatttattagaagcagccattcaaaacaatgttacaagggtagtttgcttaagcacagataaagctgtatatcctattaatgcaatgggcatttctaaagccatgatggaaaaagttatggtcgcaaagtcacgtaacctagaaggcttagatacagttatttgtggcactcgttatggcaatgtgatggcttcccgtggttctgtgattccattgtttgttgatcaaatacgtattggtaaatctattacaataacagatccgaatatgacacgttttatgatgactttggaagatgcggtagacttagttctctatgctttcgagcatggtgaaaacggggatatttttgtacaaaaagcacctgcggctactattgatactttagctagagctattactcaattattagataaacctgaacatccaattcatattattggtactcgccatggagaaaaagcttatgaggctttattaagtcgtgaagaaaaagcatgtgccgaagatctcggtgattatttccgtgtaccagcagaccaacgcgacttgaactacgaaaagtatgtagaagatggtgatttaaaaattactgagttcgaagattacaactcacataacaccactcgtctagatgtagagggtatgaaacaattattgcttaaactagattttgttcgcgcattaacaagaggcgaatatatttcaccagaggcgtaa

SEQ ID NO: 45116 - DNA, 1110 bp, Acinetobacter baumannii
atgaaagttttagttaccggttctaatggttttattgcaaaaaactttattcagtttttatcagagaaggctgaagttgagattttaaaaactcatcgtgaaacaacagatcaagagttagagcaatcagttcttgcttcggactggattgtgcatttagcgggtgtgaatcgccctttaaatgaaagtgaatttgcggaaggcaataccactttaacagaaaagatcagtcaaattttgcagcaagcaaataagaaaacacctgttatcttatcgtcttctattcaggtcgagcgtgataacccctatggtaaaagtaagctaggtggagagcaggcactggtcactcttcatcaagcagaaggtaatccggtttatatttgccgtttagccaacgtttttggtaaatggtcacgccctaattataactctgcagttgcaactttttgccataatgttgcaaatgatttgcccttacaaattcatgatgaaaatgctgtgattcgtcttgtttatgtcgatgatgtagttgaaacattctggaatattctgaatgggcaacaagttgaacaaattttccaagtcgaacctgaatatcaaattaccgtaggtgatttggctaaagttttaaatggctttaaagcatcaagagatacacttattaccgaccgtgtgggaacaggtcttactcgtgcactttattcaacttatttgagttttttaaagcctgagcaattcgattacagtgttccaaaatatggtgatgctcgcggtgtattcgttgaaatgctgaaaaccccagatgcagggcaattttcttactttactgctcatccaggaattacccgtggtggtcattatcaccatacaaaaactgaaaagttccttgttattaagggtaaggcattatttaagtttaagcatgttgtaacaggtgaattttatgagcttgaaacacaaggcgatgaaccacgaattgtagaaacggtgcctggttggacacatgatattactaacatcggtgatgatgagatggtggtaatgctatgggcaaatgaaatttttgatcgtgataagccagatacttatgcgatgccaataacaaattaa

SEQ ID NO: 45117 - DNA, 1131 bp, Acinetobacter baumannii
gtgaaaaagttaaagttaatgacagtggtgggcacacgtccagaaattatccgtttgtcttgtgtaatggctgcgtgtgatgaatattttgaccatattattgttcatactggtcaaaactatgactatgaattgaatgaaattttctttactgatttgggtatccgtaaacctgaccatttcttaaatgcagctggtgcgacaggtgcagaaacgattggtaatgtaattattgcggttgataagattttagatgaagtgcaacctgaagctttacttgttttaggggacacaaacagttgtatggcagtattacctgcaaaacgtcgtaaaattccaactttccacatggaagctggaaaccgttgttttgatatgcgagttcctgaagaaattaaccgccgaattgtcgatcatacggctgatattaatttaacttacagtacgattgcccgcgattatttattggcagaaggtttaccagctgacttagtaatcaaaacgggtagtccaatgtttgaggtacttcaccattacaaagcaaaaatagaagcttctgatgttcttgagcgtttaaatttaaaagagcatgaatactttattgttagtgctcatcgtgaagaaaacattaactcagatcagaacttcttagatttggttgaaatgttaaatgcagttgcagagcgatatcagtaccctgtgattgtatcgacacatcctcgtacgcgtaaacgtattgaagagttaaatattgattttcatcctttgattcaattattaaaaccactcggttttagtgactacaacaagttacagctttcagcaaaagcggcattgtctgatagtggaacgattaacgaagaatcatcaatcttgaatttccctgcacttaatttgcgtcaagcacatgagcgtccagaaggaatggaagaagcggctgtaatgatggtaggtttgaaagccgaacgcattttacaaggtttggcaattttagaaggtcaaactagaggcgaaaatcgtcttttgcgtttagttgaagactacagtatgccaaatgtgagtgaaaaagttgtgcgtatcattatgagttacacagattatgtaaatcgagtgatttggaagaagtattga

SEQ ID NO: 45118 - DNA, 1188 bp, Acinetobacter baumannii
gtgaagaagaaggtctatttaatcacggaatattatcatccatatcaaaatacgacaggttacttgttaggaaaattgtatgacaccttgaatgtacaaagtgatatagaccttgttcttattgcaaaagaggatacaaactgtcctcaacatgcaaatgcacactttattaaagctaaaaagccaaataaggcaagtttgtttaaaagatttttatatgaactaattatcgcttttagttttttaatgaagactttgcaagtagtgaaaaaggatagtatcgtttttacaggtacgactcctattttactgctttttgttttatttattattaaaaagtttctaaattttagatggatattattagtccatgatgtatttcccgaaaatttagcagctgctaaaattttaaaaaaagatcattttttatttaaaatcttaaaaagcttatttgataggatttatgcaagtgctgatgaggtgattgtcattggcaaagatatgaaagagttagtacatcaaaaaacgcatcaaagtaacaatattactgtagtgcagaattggattgactcatctgatattggtacagagcctaaaactaataaccgaattttacaagaattgaactggttggatagtgaaactacgatttttcaattcttcggtaatattggtcgtgtacaaggcgtagaaaatattctgcatgctattcagaaaatgaaatatgcacatttggcaaaattcatttttattggtgatggtgcatatgttgctcgtcttaaagagcaaatacagtctttgggatctcaaaatattctttattatggatctttagatcagaaagaaaaaacaactggtttaaatgcgtgtgatgttgcattgattactttggctgatgggatgttaggtttaggggttcctagtaaatcttatttttctatggcggcagataagcctttgctagcaattatggatagggagtcagaagtagcagatatgattaatactcatcatatcggttgggtagtcccacctaataatgaagaggctttggcaaaacaacttgatgaaattgtgttagcaaaatactgctatgcattcaattcatcaagagaagtattaaatgaattttattcagaaaaagtagcaatgagtaaaattctaaatattattagaaaatttacttaa

SEQ ID NO: 45119 - DNA, 324 bp, Acinetobacter baumannii
atgaatatcttgattacaggaagtagtggttttgttggttcatacttatgtgaatattttacgacaatgccagaatatagtgttctggctcaaactcgtaaaaatacacaaaagttaagtaatgatataaagactataacttttgatataaatgatgatctaacttctttggacttgagctcagtagatgtcattgtgcattgtgctgggcgtgctcatattatgaaggaagttgaaagtgatccactatctatttatagaaaagtaaatgtagaaggaacactgaatttagctaaaaaagcagctaaagctggtgtaaaatga

SEQ ID NO: 45120 - DNA, 603 bp, Acinetobacter baumannii
atgagtagtattaaagtaaatggtgaagtgagtgatcaagtaccttttactcctcatgataatattataaatattaaagatccttatggattatcaaaatatgaagctgaacaatctctattaaatttagcgcaaaactcgatgatggaggtggtcattattcgcccagctttaatctatgggccaaatgttaaggcaaattttaaaagtatgatcaatctggcggctaaaggaattcctttgcctgttggatgcctcgataataaaagaagtatggtcagtatttataatttaagcgatttcattaatatttgtttatcacatcctttagcaaaaaatcaggcttttttaattagtgatcaagacgatataacagttaaagaattatttacgaagttagctaaagttcagggtagaaatcttattgctgtgcctatacctaaagtattaattaattttttaactaaacttcttaataagagtgctgtcgcttcaagactttgttctgtattgatcgttgacacctcaaagaatatagaactattaggatggagagctccttttagctttgatgagagcttaaaattgatgttcaaaaagtaa

SEQ ID NO: 45121 - DNA, 1011 bp, Acinetobacter baumannii
atgaatgttattatatctttcatcattctttttcttatttcttttgtattaacttttagtgttcgaaaatatgctttaagaaaaaatattattgatttacctaactttagaagttcacatatgaagcccacaccacgtggtggtggagtagcaatagtgataagtgttctaatggctttattatatagctatatatctcagtttataagtttgaatgattttttcattatagggaggagttgtttgcttattgctctccttggtttttgtgatgatcatgctcatatcaattctatgttgcgcttaagtattcattttattactgcaacatttatcgtatttagtttaaatggctttgcccaagtctctgtttttaataatttaaacttaggtttttttaccaacattcttgctattctttttctggtttggatgcttaatttatataactttatggatggtattaatggtattgcaagtatcgaagcaatatcagtcggactaagtctagctttattatacagttggtatgacatcaataattttatattacttgcaatcacttctattgtctgtggttttctcgtatggaattttccaaaagctaaaatctttatgggagatgtaggtagtagttttttaggttttttattcgctatattagctttatatgctttaaaaatagactttaagttatttctagcttggatcatttgtctaggggtttttatagtagatgcaacctttacaattataaggagaatactaagaggggagaaaatatatcaagctcatcgaagccacgcttatcaatacgctgctaggtattttgatagtcatacacccgtaactttagcagttttaatcattaatcttatatggctcttaccttgtgcattttttgtattaaataaagcaatttctccattagtcggtttaataatcgcatattttcctttaataattttagctatttattttaatgcaggacagttagaacataaaacttaa

SEQ ID NO: 45122 - DNA, 621 bp, Acinetobacter baumannii
atgatgaaacggatagttgacatcgtaatttccttaaccgcattaatcattttgtccccaatctttatttgggtagcatataaggttcgtaaaaatttaggttctccggttttcttttaccaagaaagaccaggaaaagacggaaaattatttaaaatgattaagttccgttctatgaaagatgcatttgatgcacagggtaatccattacctgatgaagagcgtattactccatttgggcataagctgcgctcaaccactttagatgaaatgccacaacttattaatgttttaaaaggcgatatgagcattgtgggtccacgtccacagttagccgactttctagaacactatacttctcgacaaatgcgtcgtcatgaagtcagaccgggtatgacaggtcttgctcaagtaagtgggagaaataatttaagttgggaagaaaaatttgaacttgatatcgagtatgttgaaacccataatttatctttagactttaaaattatgatgaaaacagtcttggttatgttgaaaaaagaaggaattaatgctccagatcagttagtaggtgcaagccgcttttctggttcagcgcgtgatgaagacaaagcaagtttataa

SEQ ID NO: 45123 - DNA, 939 bp, Acinetobacter baumannii
atgaggtttagagatagaaacttaaaagatattgcagactgtattgtgggtgacaggcaatattttccttatagaagtagtttttatattacacagttttttgatgaatgtgatttaccttatgtacatgatggtagtactagatggtggtggacagcagaaagattaaaggagttattggaagaaccttgtgcaaaagactctttacctgagaaatttatcaatctgcttaggatattaatgtataagtctgatgcaacagaagatgatcctgaaagaataaatgcattaatggaattgaataaaccattaggtcgggaaggattcgaagctttttatggaaacgataatattttatatgtaagaaatataagaaccaataatttaataaaaccaaatgaaaatccacatagaccattcacagaagatgagctaaagaaaagagaattacttataaactttttagagcgatgttcagaagatgagttaattgaaaaaattttattacctttatttagaatattgggttttcaaagaatcacggtagctggacataaagacaaagctttagaatatggaaaagatatttggatgaaatttacgctccccacccaacatataatttattttgggatacaagttaagaaaggaaaattagattcttctggaatgactaaagcagggaatcataatattgctgaaatttataaccaaactacaatgatgttaggacatgagatttttgatcctgaaacaaataaaagagttttagttgatcatgcttatattattgcaggtggcgaaattactaaagcagcaagaaattggttgggaaataaacttgatgctaataagagaagtcaaataatctttatggacagagaagatattctaaatttatttacggttaacttaatcgaagttccgcaattatcttag

SEQ ID NO: 45124 - DNA, 510 bp, Acinetobacter baumannii
atgaccgttatgttggtaaaacctcatttaagatttaaagagagctataacaactatattaatgaattagcagatgaagatcgtcaccctttgacaacggagtttgaccatacagattttgaaagttttttgaataaactaagagattatgaaaaaggggagtccctagaagaagggcatgttcctaacattacatattggttagtagaagataatgaagttattggtgcatctaacttgcgccttaaactcaatgaacagattgaatattgtggtggacatattggtttaggtattcgtccctctaaacgtggacagaattttggctcgaaattgttagagcttacaattcaggaggcatggaaactaggcctaacggagttacatatacattgttataaatctaatttagcttctgcaaaaaccattcaggcaaataatggtcgtcttcattccgaaattactctcaaccaagtagttcaaaggtatgttgtgaataaaacagtataa

SEQ ID NO: 45125 - DNA, 348 bp, Acinetobacter baumannii
atgaattacacatgggatgaatttgagcaaagacttatcacatatagagatgcatggattgatctggcaagaattttagatgcgtatgagcatcaaataaaagaacttcttcaacaaattcaattattaacttatgaagattctttgcctgtatttaatcagttatatgaaatacaagatcatttagctactgccaagtttcgctatgacctcgacttaaatgaagctttagatatattcgtttatcatttcgatagagatgacaaagcgctgataagccaatattggtacaaaaaattcaagcaaaacaaagatattctttggcctttaccccaagatgaatattag

SEQ ID NO: 45126 - DNA, 261 bp, Acinetobacter baumannii
atgaaaataaaaaagtctgctttttatatatttaccatgattttttcgcttcattcttcagcatttgctgagccgagtgttgctgatgttcaatatcgtgcacagcaaggacaaccgattgcacaatatcatcttggcatcatgcttttaactggtgaacaaggtgttgttaaaaactatgaacaagcttttaaatggtttcagcacgctgccgatgcaggtgattcggatgctaaagaaatgcttaaaagtttagaatag

SEQ ID NO: 45127 - DNA, 1347 bp, Acinetobacter baumannii
atggaaagagatgttctaagtgagatcaatcacaataatatgagccgttatcaatggttcatcattttgatctgtatttgtctcaatattattgatggctttgacgtgatggtaatggcttttaccgcgccatccgtgtcagcagaatggtcactttcaggcgcacaaattggcttattgctgagttcaggtctttttgggatggctgctggttcaatttttctcgcacctttagccgataaaattggtcgccgtttacttatcttggtttgtcttgtgattgctggtcttagcatgttgggctgtgctttagtgcaaagtcacggcatgttggccgcacttcggtttattaccggaattggggtaggtgggattcttgcgagtagtaatgtcttggcaagtgaatatgccaatgcacgttggcgcagtctcgcagtgagcttaatgtctacaggttatggcattggtgcgacactgggcggagtactctcactggccttgattgagcatttaggttggcgttcaatctttttggcagggggtatcacaaccatagtgatgttactgattactgcatggttattacctgaatctttagattatttgttggcgaaaagaccaaaacaggcactagaacgtattaacacaacagtaaaccgtatgggtttaactgctttaaaagctttaccttattacggccagaataatcaaaaaaatacaggtgatattggtaaattattttcagggcagcaggggttccagacactttgtctttggtttgcattctttttagtgatgtttggcttttactttgtcatgagctggacaccaaaaattctgatttcaatgggaatgtcgcctgaacaaggcgtaagtaccggtattttaattagtattggtggtattttcggagcagccattattggtttacttgcttcgcgtatgaaaattttctatgccctaagcttatttctgggattaaccgctgtctgtgttttcctatttgtcgccgtttcatctcaagtgagcattgctctcatagtcggtttattacttggcacactcattaatggctgtgtggcaggtttatattctatttctccaacgatttacgatgctgaaatccgtagtcgcggcgtgggttatgcaattggttttggtcggattggggcaatcttatcgccaacgattgcaggcattttcttagataaaggtattgcacctgcaacgctgtatgcctattacggtgtggtgtttattttggctattttcctgattttgagtttaggtagcgctttttaccgaagtaagaaagagcaaaacttctcacttaaaacagcaccttaa

SEQ ID NO: 45128 - DNA, 1686 bp, Acinetobacter baumannii
atgaaactcaaaagagtaagccagcttacattgggacttttttttgccagccaattgttttacacaacgcaagcagcatctccaaaaaatcagccactacccaacatcatgattattttggccgatgatcttggattttcagacattagtgcctatggcagtgagattaaaacacctcatattgacagcctgttaaagcaaggaaaaatgcttttcaattttcatgcttcatcaatgtgttcacctactcgtgcacagcttatgacaggtgcagataaccacttggtaggtttaggtgccatgtatgaaacttctaaacgacaagaaaaattggttggcgccgatagtccgcgtgcactgctcaaaattgatggatattcaggtcacttaacgcaaaatgcttatacactcgcagaaattttaaagactaaagattattacaccttcatggtcggtaaatggcacttaggctatgctcccgaacaaaaccctaaagcccgtggttttgatcaatcttttgccctgctcgatggtttcgatttacactttaaagaccaacctaaaaactatccgcgcaacacccaatacacggaaaatggtcaaaaggtcacactgcctgacaactactattcaaccgacttttttacacaaaaagcttttgagtacttagataaaaataaagcgcagaaaccattttttgcctacctagcctatacagctccacactggccaatacaggcaccagctcattatagagacttatataaaggtaaatacgatcaaggctacgatgcgattcgcaaacaacgctttgaacgtcaaaagaaattaggattaattcctacaaacgcagaatacccaactgaaagtggtaatcaggctttaagcactaaaagctggaatgaactcaccccacaagagcgcaaatatgaagcgcgtaaaatggaagtttatgctggcatggtcacccagttagacgaccgcgtgggcgatgttgttcaatatcttaaaaagcatcatttatatgacaacactttgattgtgtttatgtcagataacggcgctgaaggtggtgatcataatttcccaatgggtgatgccgacaatcgctatgaaaatataggcaacgccagctcatatgtttatatgggaccacgatgggccgaagtcagcagtacaccattcacctattggaaatcagctgcttcggaaggtggagtacgtgttccatttattgttaaatcgcctgtacaaatttctaaacaacgtggaatcaacattaactttgcgacagtaagagacatattcccaaccgttatggaactagcgggtattcaaaataatcaaatctatccagcttcaagcactaaaattaaaccgtctggttttagcctaattcctgcttttaaggataatactgcccgtattcgccctgttaattattatgactttaaagaattgcatggcagccgctacgccaaaactgacgaatggaaacttgttgaaaactcaccttctaaatttaaaagccacggttgggaactctacaatttaaaaacagattttaatgagcaacataatgtttatgcagaacatcctgagatcgtcaaagtcttaaatgataaatatttaagatatgccgttgaaaatggtgttgtggattttgagcaatacaacaaaaagtag

SEQ ID NO: 45129 - DNA, 969 bp, Acinetobacter baumannii
atgaaacaaatcatgatgctttcatcgtttctcttacttggtgcatgccaaaaaaccacgcctcaactagaacagaccaccttgcccgacttaggcagcaaagctaaatgtaattcttattcgggccttccttcgggttggcctaaaaacaaagaagccggcatggtcaagcttccgcaaggaaaaattgttttaggcaccacacaaggttatgaagacgaatgcccattaaacttacaggcaacttccgttcccgcttttttaattgatgcaactgaagtcaccaatgctcaatttcaagagtttgttaaacaaacgggttatgtcaccgatgcagaaaagcaaggtggtgcagctatgtttgtacaaccagatcatcctgttgaagaactacaatggtggcgctttgaaaaaggtgccaattggaaacatccatggggcccaaacaaccctaaacaaccagcacctcatgagcctgttcgcatggtgacatggaatgatgcctacgcttatgcaaactggctaggtcatgacttaccgactgagcttgagtgggaatatgccgccaaaggttttcagcaaaattccgatattggccctacccacgaaggccatattgtagccaatttctggcaaggcgaatttccatacaaaaatgttcaggaagatggttttaaggatgtagctcctgttggttgttttagcaaaaacccatttggcttatacgacttgattggcaatgtatgggaatggacgcaaacaccctatacaggtccaagagatcatcatatgggagaaccatcgaaatatcggcaaagtcacgaacagattttgcaatacacgattaaaggtgggtcttatttatgcgcaaccaactattgcgcgcgttatcgtgctgccgcgaggcacccacaagaactcgaccttgccaccagccatgtcggatttagaacagtaaaacgcttttaa

SEQ ID NO: 45130 - DNA, 1188 bp, Acinetobacter baumannii
atgaagcatatttttatttatgggattttcttctcagggacgacccttgcctgctgtttagctcatagtgcagtcgatgttaattttcaaaatacactcacgctaaaaacattcaacttcgacagacaatatgaaaatgggaccagccccgatactcatagcttgagccaaggtctgatctatcgtggcgactggtcaaccaaacttaatgaggttcagctacacctcaatccaagcattcaatatgcttatcgcctaagtagtgaccaacacaccaatgatatggtcataccctttgaccctaataccaaaaaacaagcacaagactacgttaaatatggcttaggagctggagttgaatatcaaaactttcacatgaatataggtgaaattattcccgactcaccacttaccccacaagtcgacacacatcaattacgcgtgaactacaaaggcttggaattaaaatataagacaccgcaacaaaatttcgagctgggtttgattaaccgttattcacccaaaaatgaggaggactaccacaaactcgccatatcaaaacatgaatctgacggactctatttctttcaatgggatggcaaaacaccacggtaccactggaaattttataatggttacttaacagatctcatcaatcaaagttaccttgcttttgattatcaatggacaaagcagcacactacaaaattacgtgtgtttcgccacgacgatgtcggtaaatcaaagcttggtgaatatgacaatacatccataggcgctatgcatttcatcaaacatggcaactttacaaccggaattggctatcaagaaaactttggcaaagatggtattccaaaactcgacaatatacccatccctcacatggtgaactggaccttaggcgcgtttaccaaagcagatgaaaagtcttatcattttgttgtttcctatgactttaaaaactatatcaagggtttaaaagtgacctataaatatatttatggcgactcttttcagaccataaatcaaaacgattttgagcaagaaagtgatgtgttgattcagtacgacctaaatgcttggattaaaaatcttaaatttcttttcttaaatattaactacgacaccagacatggcaaaagtctggatgaacagcgcatgatgcttctctacactgttaatttctaa

SEQ ID NO: 45131 - DNA, 345 bp, Acinetobacter baumannii
atgaaagatattttgaaagttcagaaagaatattgtgatcattatgaagaaaaaatttttcctgtagagttagatcagttggttgtagtatctaatggtgttttagagggagaaatacctatagaaggtgttagatatagatcacctaaacatatgagtggttggtggttaacggctgataaatatgatggtgatatagaaactcttaagaatgttcattttacacatatattggaaaaaagacctgatttagcaatttatatggcattaccttacggttataggtttatattagggggggaagaggagcatgtttggtttgatgagaatgctttagatgaataa

SEQ ID NO: 45132 - DNA, 270 bp, Acinetobacter baumannii
atgagtaaacagtttcaaagagattttggagtttattgctgtccccatatatttcataaagaaaaacctgttttattggtaatccgtgatgaagatgaagattggcagttcttatgtgggaatgatgttgacgatgaatgtcactatgttggagtcggtcatcttttagatagagataattccttagaagtattagttaatcttgaaaaaaatacaggtgctgaacgtgatgatactaatcaggtttggaaatattttaatttggactaa

SEQ ID NO: 45133 - DNA, 729 bp, Acinetobacter baumannii
atgtataatcaatcattaagtaaagtattaatcgctttgctctgttcatttttaagtataagttgtttagcccaagaaacttctaagcaagttgatatagctaacttaatgaaccctacgtcaacatttgtttctttaacacttctaagctttattcctctagcaatgatagcgacaaccacatttattagaaatgtaattgtattatcaatcatgaggcaagcattaggattacaacaaactccacccaatattgtattaatcttattatcattttttttgatgatgattgtgatgggcccttcatttgaagtgattaataatacagcttttcaaccttatcttgaaaatagaatatcattgcaagatttttttatgaaagcgtgggaacctttaaaggctttcatgattactcaaactcatcaatcagatattaaattaatatatgagctatcgaaaacttcatttcccaatgatatggcagctatttcaccaattaaattaatacctgcttttatgttaagtgagctcaagatcgcatttcaaatagggtttgtaattttactaccttttttaattatagatattattgttgcttctatactcatgtctttaggtatgatcatggttcctccagtaactatttcattacctataaaattacttcttttcctattaattgatggatggagccttctttttgaggtgttaattagaagtactcactaa

SEQ ID NO: 45134 - DNA, 318 bp, Acinetobacter baumannii
atgatttttaagcaagataatataatttcctctgaatatatattatatgtattaggaattacgttcatactattgttagctacttatttaattttattttttttcaaaaagaaaattgtttcaaaatttgagctaaattcgggaattaatcgtaaacttgaagttcaaaaattatcttcgaaaacaactttatatgtctatgataaaatagattatgatgtgattattgttgagtcagaccaaaaagtttctgttatgcatgtttctaaatgcactgaaaataaagtcccaaatgatgagcagagtactaatgtataa

SEQ ID NO: 45135 - DNA, 315 bp, Acinetobacter baumannii
gtgaaaacacagatcaatgatataaatttacctagtttagatgggcagattagtgaaagttcaaaagatttgctagaaaataaactgtctatagtagatcatgtcgaagttgaattagtcgtagaagtgggaagcgtaaagttaactgtaagtgatttatttagtttaaaacaaggcagtatcgttaaactggatcagtcagttgaagagcctttgaagctttatcttaaagatcgtttaatcgcacatggaaagcttgttgctgtcgatgatgtattaggttttcaagttactgaagtaataaatagtctttaa

SEQ ID NO: 45136 - DNA, 288 bp, Acinetobacter baumannii
atgcttgaaattaataagccattagatcaactggttgcaggtaatagtttaaatctcactgctattaatgatgaagttacttcattatctgttagctttccattagataaactttcaataactgactttcttgatttacaagtaggtgatgttattaaatcgaaacactcaattgttgaaccattcagtgtaacgagtagagataaggaagtggctgtgggatttttagggcaatcggaaaatcaattagcagttttgttaagatccaaagaagattatagaccgtga

SEQ ID NO: 45137 - DNA, 588 bp, Acinetobacter baumannii
atgataattgagatagaaacccatccactgcaaccttttttaccagaaaatgcccgtttattaatgttgggaagttttccaccaccacgtaataaatggaagatggacttttactatccgaactttcaaaacgatatgtggagaatttttggtttaatcttttttcaagataaaacttattttttaagtgagaaccaaaaaagctttaacgaagaagctatccgcagctttctgattgagacaggcattgctatttttgatacggcgtatcaaataaaacgcctaaagggcaatgcttcagataagtttcttgaaattgtcactccgacagacttagcggttttattgaaacagattcctcaatgtcacactattatgactacgggcgataaagccacagataccttaatctcagttttacctgagaacacggaaaaacctttaattgggacatctacatcaacttattttgcagaccgcgacattaatttatatcgattaccgtcatcttctagagcatatccattagctctcgagaaaaaagcagaagcctaccagaaattttttaaggaaatcggtttcttgtaa

SEQ ID NO: 45138 - DNA, 1560 bp, Acinetobacter baumannii
atgatcaatcagctatatgagcagtatagtactatggccttaagtgcttggggctttactgatttaccttcttataaagataaatatgatcctaatgagaaagatatagtgataaagacaaataattggttgaatgatgaggcagcagaggaaaaaactcagcaaggtcttactgcctttgtagctattgatgacgcattcatgagtattgcatcacggatttatttaattagaaatgccaaggaaacgattgatctacaatactacatttggaccaatgattttgtggggaaccttattttacatgagctgctcaaggcagcggatcgtggcatcaaagttcgcttattaattgatgatcaaaacggtataaagcttgatggtatattaagaagccttttacagcataccaactttgaaattagattatttaatccttataaatttcgttacttacgtatcttcgattatctcttccgatttaaaaaagtaaatcatcggatgcacaataagctcattattgcagatggatcgattgcagtaacaggcggtagaaatattagtagtgaatattttgaagcaagtagtaagtttcaatttacagatatggatatcttattttacgggcatgcagtgcgacatgcccaagctgtatttgctgatttttgggaaagtaccctaagtgtaaatgcaactgacattatcggaacttgtgctgagcaccatttaaaagctttaagagagcactatcaacaactccaccacgaagaccatagcctcactgaagataagctttacgatgcgcagagttatttaaaagagcttttagagcataaccctattcaatggtctaaggcccattttgttgctgactctccgaagaaaatactgggcactgcaactcaacatgaaatgctttatggccaagtcatgtctattatgggtaaacctaagcaacatttagaattagcttcagcttattttgtacctacccaacaaggcacttattacttaaagcaactacgagttgaaggtataaaagtccgcgctttaacaaattcttttgctgcaaacgatgttgcgatcgtacatgccttttatagccaataccgtgtagaaatgcttaaaagtggtattgaactgtatgagtttaaacctgttctagaacgacgacgtagaacgtggtacgaaatcgtaacaggcagcgttataccagcaaaaggaaaaaataagtcgagcttgcatgccaagttttttgatgtagatggtaaagtctttataggatcatttaactttgacccccgctctacctatttaaacaccgaagtaggtttggtgattgagtccagtcaattacaaactcagatttctgttatgttagatcaacatttacctcaagtagcttatcaacttaagctaaatagccaaggccaaattacttggctagattaccaagccaacggacaagtcattgaatatgataaagacccgggaaccagccgttttcagagaacaatgattaaagctgtctcttatttgccaattgagtggatgatgtaa

SEQ ID NO: 45139 - DNA, 918 bp, Acinetobacter baumannii
atgagttcaggcgcaaaaattcgattatatgcttgtgaagaagcagttttaggaacaactccagcaaacccgatctggtacacagttcgccgtgtaagtgatggtttatctgaaaatgtttctactgaagaaagcagtgaagtggttgattcacgttttcgacaaggtggggtagttactgaagcagaagtagcaggtcagttagagtttgaattatcacttggtacctttgatctattcctaagtgctttagccttcaataactgggcgacaaacagcttaacaattggcggtgctgttcgaaaatcattaacgttagttaaagttttcgaagatgttggccaagtctttatttatcgtggagtacaggttaattctggtgaaattactatccagaccactggaaaaattactggtaactttggtcttgtaggtagctcgtttactcgtcagcaaactaaccctgtagtgaatccggtggcagcttcaacacgaccactggtcagcatgccaaacgttgaaaacttgctagttaatggtcagtctattcaaggtaaagcgtgtctacagtctcttaccatttctatcaataacaaccttgaagcaatccgttgtatcggttcgggtaagtacacaccagagttctacattgaaaaaatgatggatatcgaagcaaatgcttcattcatgttctcggccacagctgctggttggattgatgcaatcaaaacccgtgatgtgtttacactgaccttcgacatcagagacagcaaaggcagtaaatactcgtttaacttccctcaattagaagtcatggaagccaatcacccggatggcggtggtgacgacatcattactgtagacatcaactttgcccaggttcgtacagcgccaacaattgtacgtgctcttgtgtaa

SEQ ID NO: 45140 - DNA, 1149 bp, Acinetobacter baumannii
atggcaaatcttgtatttaaatttaattgggatcatcggccattcccgtataactcggctcagggaaaacggcaattcatgctgccattcgcttctggcattcccaatctagcacccaacttttcgcaagtccaaggaacagcggcaatctctcaaggtggtacaggggcaaccactgcagcagaagctcgaaataatcttggtgctgctgaaaaaggtgtaaatactgacattactgaactcaaaggcttaactacagtgctttctattgcacaaggtggaacgggtgcttcttctgcagcaggtgctcgtttagctcttagtttaggtgatatagggacttctggattttttggaagtaaaattagcgagctatatgacaaggtgtcggttccacaatggatagctgtattaggtgataacaagttcactttcctatcaagtggcgactggcaagcggggaatacaaataacccacttaatatgcctagccgatatggttctttaatgtcgtatttgggatcaaactcatatggaacgtattcatggcagatttttaaggcagtatcgggtggacagctttcctaccgatatggtgcaggaaatgatgtctggtcaccatgggggcattttaaaactagttttaatacctcagtcgatgcaaatggattcttaaagtcagcatcaccagttgtgaagttatttaaggatcatattgagctaaatagtgatgcagaaaagcagcctattgaatttaagaaagtcgatgtaggcgactatttacttaaaggctctttaggctttgctcaagaaggttggtatatcgaagtacctaaagacgcaaacggcaacacaattgtcgctgtagtgtatgacaccttagaaaatggtgatctatccatcaagacttacaaacgtaagtttgattttgaacttgctgctgtagttgcagacttggaaataccaacagatattcctgaaggtcgttggattgacattcgcttgcatgaagagcctgaaccagagcctgagccgcctacaactgaaacaccttttgatttccaacctacaaacttatccgaggctgtagccgctgcaatggttggggtggaaccgccagaaatctcagacacagacgaaacactttaa

SEQ ID NO: 45141 - DNA, 354 bp, Acinetobacter baumannii
atgagcaattttgtttttaagcgtggtgacactttcaacttaaatcttcagctagttgatatggatgaaactttgcaatatccacccgatgatgttcgccgtgcaattgatctaaccggttacacctttacttcacagattaaagctttggctgatggagcagctgtggctaccttgacttgtgctgcattaaatcaaagtacacagaaaggttggttaaatgtgaagtcgggaagcagtacaacagcatggccgttaggtttgtgtcagatggatattaaggctgtcgtgaatggagttacccagcatacagatactttgattttccaagtgattgatggggtgacagcataa

SEQ ID NO: 45142 - DNA, 399 bp, Acinetobacter baumannii
atggcaatgactttagagcagacaaggcaagctattatcgatcgtatgaaagcttttaccggtattacgcaagacagaatccagtatccaaatttaccaggctttaatgtacctaaagatgatgtttggtgccgcttaacgattgcaggtggtcccagttttacttctggcattgcagataagccatgtactcgccgtaccggtaatatcatgattcaatgctttgcacgtcccaattcaggaataattgaaatcacaaaattgagtgatgcattacttgctcattttgaatatttcacaatcgaacacttagaatgtttgaatggccaatctatttatgcgggtaaagatgctgacttcattcaatacaatgtatcaataagttttttagttaactaa

SEQ ID NO: 45143 - DNA, 369 bp, Acinetobacter baumannii
atgggatggaaggggaaaaagccgactagctttagtctggatgtggctaaatcagtgcaagatcaagtgaagaaaatcaccatggataccgtgcaatccttagttaatttaagtcctgttgatactggtgcataccgtgcttcacatattgtttcggttggatccgctgactacggtgtacgtggacctgaaacaaacgccgttcaagatgccgctatccaagctgtaaagattaaattgggcaatttggtctacatacagaacaaccagccttatgcagagcgcttagaaaatgggtggtctgatcaagcaccacaaggaatttacaacaccacctttacctttatttctcagaagtatggcggctaa

SEQ ID NO: 45144 - DNA, 405 bp, Acinetobacter baumannii
atggttaatcctgattatgttcctgaatggtatatctcgccttttcaacatgtgcagtacacgcttgctcgaaatcaactacacatggatttgttatttgaagatatggataaggccgatcaatttttggatatgggagcggatgcgcaagttagtactttttctgatggcgcatatgcaatcgtccaaattggtgatacggcggataaagaccgaattcaagtttatggattgcttttacatgaagctgttcatgtctggcaaatagtaaaacggagaatgggtgagcgagagcctaatgtggaatttgaagcttattcaattcaagcgatcgctcaagaccttttcgaaatgtatgaagaaagtgaggtaaagcatgggatggaaggggaaaaagccgactag

SEQ ID NO: 45145 - DNA, 414 bp, Acinetobacter baumannii
atgcaagttttaatggctttggcattccactttacagggcatgatatgggcttacgtgacgaaattcaggcagatattgctgaagcatttaatgatgatttagcagatgccgtacatacctttacatgtgaacggatctcaaaaacgaattgggatcctaaaactgaaacgtatgttgaagttaaagaaaactattctggccgtggcgttttgttcggctcttacagtcaatatgagattcagacgcttggagtgctggctactgataaaaaagcaactgtgctgcaaaatgaagtatccatgactccaaaaattgacgatgaatggctaacagctttaggctcatttcgagttatccatattcaacaagatccagccagtacaatctggaaatgtcagcttcgaaaagtgtag

SEQ ID NO: 45146 - DNA, 390 bp, Acinetobacter baumannii
atgagctttattactgtagatgacgcaaattcaattttgggcagcgattttgcaccagacagtgataaagctcgtctggttcaactggcaaatgtctggatgaaaaaacggattggttttgtaccagatccaattgatccacttcttaaagatgctgcatgtgaaattatcaaaggaattctggccaaggaaatttataacggcaaagaccagcagttgaagcgtaagaaagttaaagctgattctgttgagtcagaaaaagaatatcaagacggatctgaagcaatctctagctttgaacagatagcaattgattttattgattcacttgatttgaaagatccaaatgcaagttttaatggctttggcattccactttacagggcatga

SEQ ID NO: 45147 - DNA, 648 bp, Acinetobacter baumannii
atgaaagcaaagtcaaaaaaaatctattttactaatgatttctctgcatcaaatgtgaataagcttcagggtgatggctgggtattacgaaatgctcgtttagctgctgcagatacatctattgaggtggcagatgaatatggtggtgatgtgccaagtcactataaaaatgcttctggagcattggcaactgtaaatttagctgtaggaatttcacctgaacttcaagctgtgattgatgatgcaaaggctgaatgtgaaaaggtagttgaagaaaacactcagcttaagcaaaaaattgccatcttagagcaggccggtggtaaccagtcagagttgttatctgagaattcacgattaaaagatgcagcagtcttagcagataaagctctcaaagatgctgaagctcaagttgtcggtattaaagctgaatttgaagcttttaaaaacgatattcctgcaatgcaaacacgtattgctgaattagaagctggaaaagcggaagaaaatcctgctacagaaacagcagctaatgattttgaaaattggtcaaatgatcaattaaaagagtatttggctagtaaaaacattggctacaagccatctgcaacaaaagcagaactccttaaattaatcccgaaggaataa

SEQ ID NO: 45148 - DNA, 957 bp, Acinetobacter baumannii
atgccttttgatttacaggtatttaataaacaaacttatgtttcaatgactgaaacagtttctcaagacgttaataagtttaatgaagcatcacaaggtactatcgtacttcttaatgagccatttaacggtgactttgacttaaaggcatcttttaaggctatacaagggcttgtacgccgtcgtaatgcatatggaagtggaaccgtagcatctaagcgtcttgaacaaatgctcgatgtagcagtgaaggttgctgcaggtacaccaccaattgaatatgaagttcagcaatatcattggatccttcaaaaccctgaattagcagcattaacaattggtgagcaactaggtaaagctaaaattgcagatatgttaaatgcaggtattcttggtactgtttcagcaatttctggtaatacggttgcagtggaaggggatggaactgcagatccaagcttccgtttgttaaatcgaggtgctggccgcatgggtgatcgttcaggggctttacgttcttggattgttcattcaacaactattcacaacctttacgataatgctttggccaacactgaacgtttattccattatgatggtgtgaacgttattcgtgacccatttggccgtgtatttgtaattacagattcaccagctttagtgggtgataatgctggtacaacatattacaactcattaggtttagttgaagaagctatcgttatcaaagataacaaagactttaatgctgaattggtaccaactactggtggtgagaacctcaaatatacttatcaagccgaatggacttatggtgttggtgtcaaaggttacgcttgggatatggctaatggtggtaaatcccctaatgatgcgtcaattggcacacctacgaactgggatttgattgcaagttcaattaaagacactgcaggcgttctggttaaatctaaataa

SEQ ID NO: 45149 - DNA, 756 bp, Acinetobacter baumannii
atgaaacttaaaacagtaactattgaaggtaagtcttacgcagtaatcaatgaacagggccatcctgtttatattcatgatgatggaaaggaagtcggttttgatgcgccacgtgcgatttcaaaaattgatgagctggggactgaggctaaaaaccatcgtctagctaaagaacaagcggaagcaagtttaaaagcatttgaagggattgatgacccggctgcggccaagaaggcaattgaaactttaaaaaactttgatgataagaaacttgttgatgcaggtgaagtcgaaaaggttaaagcggaagccattaaagctgtagaagaaaaatacgcgcctatcgttaaggagcgtgatgaatatcaagcccaactgcataacgaacttattggaggtggctttgctcgttctaagtacattcaagaaaacctctctgtaccggctgacatgatccaagctcaattcggtaaaaacttcaaaatcgaagagggcaaagtcatcgcatacggggcagatggtcaaaaaatattttcacgcgttcgacctggtgaagtggctgatttcgatgaggcattagaaagcttgatcagtggatatcagtttaaagattcaattctcaaaccaagccaagctagcgggggcggttttcaagggaaaggcggccaaggcggtgcaactgccaaatcattagctgattgcaaaacagatgctgaaaaaattgcatacctcaaacacgtcggcgaacagaattaa

SEQ ID NO: 45150 - DNA, 315 bp, Acinetobacter baumannii
atgatcaaagaagtaacagagcaagagttagctgaaaagtctgtggcaccccgagtaactaaagcgcaaattgattcattgatggagcgtgttacatatacggttgagcaacgccccggaggcacaacatctacttttgtccatgcatttttagatggaaagttttttctagcaacgggttttagtgcatgtgtgaatgctgaaaactttgatgctgaaattggtgagcgtatggctcgtggaaatgcagaaaagtcagccgaaaataaactttgggagctagaaggctaccgtttatttgcaacaaatttctaa

SEQ ID NO: 45151 - DNA, 216 bp, Acinetobacter baumannii
atgtctgaaatatcagtcgctcaatatgtaaagagaaaagaagagttagaaagaaccctaacatttcaacttgctgaattgatcagtaaatttgaaaaagatacaggcgtaaatgtacaagatgtttatgcgaatttttctagcgccacttgtttgggtggttctgaaaaacactttctaactggtgtgacggttaaaacctcaatttctaattaa

SEQ ID NO: 45152 - DNA, 225 bp, Acinetobacter baumannii
atgagtgaatcacgacatttagtacttaagcgtcacccaaccttgaaaggctttttagttgtgtgtgatgaagaaactggaatgccactggcagggcaaaaagcggttcatatgaatagtgatgctcaagatggaccaacaacgattagcgtaacatttgaagcttatggtgagaatggaatccgtttagttggtgatgagccaagagcactttcaacaaagtaa

SEQ ID NO: 45153 - DNA, 1104 bp, Acinetobacter baumannii
atggcaacagatatcaaaaaactatttgaagcactcactcagcaccaggcctacctttatcgtgcttcgtcaaaaacggtaaatgagcttttaggtttattcaatgatgatacgagcaagatgttatctaagcttcgggatttattggatgagcttaatgagtcggagaaagttgctttagcaggtggtaaatatacaactccaaatctcagggaaattaaagatttgattgcccagtggtttgctagtgttaatttagcattacctgaagcttttgccgtttcagctacggcactggctgtttatgaggccaattacgtagctaagctctatggagcaaagattaataagcctgaagggggaaaactatttttatccgctaaaaaagttccgttggcaggtggcgctcttgtcgatgatctgctttcaagaattgctgaaagtgcccgtcaaaaggttgagtatgcaattcgagatggtattaattcaggcaaaactaaccaagaaattgttcagcgcattcgtggtaccaaaaggcttaattatgaggacggcattttaaacggcaccaagacggatattgaacgtaccgtaagaactttacggagccatgtagccaatcaagcctacctaaatagtttcaaccaaattggctttgaatatgtccgatttgttagcgttttagatggacgaacttctaagctttgcgcttcattagatggttcagtgtgggagattaatgatcctgcaaagcgtgtaccgccgttacatcctaactgtcgtagtatcttggttccggtcgagaaggacggtcaacttgtaggcgaacggccatttgtaatggacgaacgtcgagttaaagacatcccgaaagatgagcgcagccaattaatagggcaattggatgcaaacaccacattcaaagagttcttcaagaagacagacgatttctttcaaagagaatggttaggaccaaagcgctacaagctttataaagaaggaaagtttgattttgaaaagttcttcgatcctgaaggacgattgtacacattagaccaacttcgtaagttggatgagcaaacctttatggagctgggattatga

SEQ ID NO: 45154 - DNA, 1443 bp, Acinetobacter baumannii
atgagtgacgtaacttttaagcatgcagagtatgttaaaaacgtaggactctggcaaaaaattgatgatgtgtgtgatggtgaagacgctgtaaaagaacagcgtgagaagtacttaccgaaacctaacgcacatgacaaaacaccagaaaatgatgctgcttacgctgcttatctaactcgtgcagtgttttatgaggtaacagggaccactttaaatagtttggtaggtgcagcatttgcaacggatccaagctttaagtttacacctgaactggagcatttagagcgaaatgctaatggtgctggattaagtgcttatcagttggctcagactggtatccggcatttattgaagcactatcgttgcgctctatatgtggattatccagacgtaattccggctagaaatttaaaggagcacaaagagcaaaactcttatccgatgattcatttattgaatgccgttgatgtaattaactgggattcaatgatggttgggaaccagaaaaaactctgcttagttgtcatacgtgaagttgtttctacccgtggaagtgacggatttagtaaagaggatcgtgaacaattcagggttttgcgtttagagccagatgaaaacggtgaatttgcttactctgttcagatatataccaaaaacgacaagggcaaatatgaaggaggacctaaaaagtttccaactgatcatagcggtagaacttggtcttatattccatttacttttgtcggcgcggtagataattctgaagaaattaagaaacctccattactcgcattagctaatctaaatttagctcattatcgtgacagtgcggactttcaagagtccgttttttatatggggcaacctcaatactatgttagcggtgtgaactggcaatggttcgatgaggcaaaagctcgaggcatttacgttggagcgaaggtgcttttaccattgcctgaaaatggcaaactcggcattgaacaagcaaaccctaatactctgtcacgtgaagcaatgaaagataagtggaatcaaatgaaagaattaggcgcacgcttaattgaaaagggttctgctgctaaaacagccacagaagctaacaatgatgatgccgttcagcattccgttttatcgctatgtgtcgtgaacatgaatgaagccttgtctatggctttgcgatggtgtgccaaatacgtaatagctaatgttgatgctcttaataaagatgacctgatgttcgaaatcagtcaagaatttaacaaacagggttatttagctgagttagctcgacagttatttgaagcagctctacaaggccgatcttcatttaaatcgtggtgggaatacaaccaaacaggaatgttccctaaacaaaaatatgaagacgagctacagaatgtcgaagcagagcaagatggaactttaaatcaaaggtag

SEQ ID NO: 45155 - DNA, 1428 bp, Acinetobacter baumannii
atgagtactgatgcggctcgggataaagccatccggatcgaggcgcaagaagatttatatttcttcacaaggtacatgtttaaggagcgccgtggttataaatggatgcaaaattggcaccacttagaaatctgcgaagctttaatgaaagtttatcgcggagagataaagcggttaattattaacgttccaccacgatattctaaaactgaaattgctgtaattaacttcatggcttggtgttttggtaagaatccagactgtgagtttattcatatcagttactcggcaatgcttgccgcaaataatgcatttcagactcgtaatatggttcaagaaaaggcttataaaaaggtctttcctgatcttaagttacgtgaggatagtaaagctaaggatttctggcgcaccgatgcaggcggagtctgctatgcgactggtactggcggtaccattacaggttttggtgcaggcaaaatgcgtgaaggctttggtggttgcatcatcattgatgacccgcataaggccgatgaagccaaatcaaaaactatccgtgaaggtgtaattgactggttccaaaatactctcgagtctcgtactaactcaccagaaacgccaattattgtcattatgcagcgtcttcatgaagatgatttggctggatggttgctaggtgatagaaaagacggcattcctgtagctggtggtaacggtgaggtttgggagcatctatgtctttcggctattcaggaagatggatcagcactgtggccagcaaagcacaatatccaaaaattgaggctaatggagcaagccgcaccatatgtatttgccgggcagtaccgacaaatgccatcaccgccagcaggcggtttttttaagcccgacaatattcaaattgttgatgctttgcctgcagatgtagtgaagcaagttagggcttgggattttggggctaccgaaaatgagggcgactttacagcaggtgtgcgagaagctcttggtgcagatggttttacttacattgtcgatgtaactagaggacagcttggccctgacaatgtgaataagcgcttagaacaaacagcaaaaatagatgggaaaaaagtttctgtgcgtctaccacaagatcccggtcaagctggtaaatcgcaagctagttcatttgtgaagcttcttgcgggttatagcgtgatagctaagccaatttcaggtgacaagcttacacgtgcacaaccatttgcggcccaagttaacgtaggaaatgtacgaatgctcaaaggtgaatggaataaggattttattgatgagcttcgtcattttcctaatggcacacatgacgaccaagtggatgcagcttcagatgcgtttaatgaattacatgaaggttttgagaccttctttgccaaaatgggatttgctcgatga

SEQ ID NO: 45156 - DNA, 471 bp, Acinetobacter baumannii
atggcgacactaaaagagcctgtgaaaatctttatagttcagtctcttgcttgtcgtgatacacctcaagaagtggctgaactcgtaaaacaagagtttggcgttgatatagatcgtgttcaagttgcaacttatgaccctacaaaggttgctggtaagaacttaagcaaaaagtatgtcgaactatttgaaaaaaccagagatgagtttgataaaggcttaattgatattccaattgctaataagtactaccgattgaagcaataccaaagacaacttgagaagactagaaacgtcaaaacagccttaaaaattcttgaacaagccgctaaagacattggtggtcaatttactaatcgccaagaaattacaggcaaagacggcggaccagtccaaacagttaattcagaaattccagttccaatggaagattacttaaaagcgcggagggaagtcttagatgagtactga

SEQ ID NO: 45157 - DNA, 642 bp, Acinetobacter baumannii
atggagcaaataagaccatttccaccgactgattttatagaccaagcagatgaagaggaagcgatacgcatagtacctgcgcctgatctaaaaaaatgggttgttgctaattacttaactattggtggacctctttataaccccgatcatgatcacatagctgagctgcttcacgataatgaagaatttttagcatttgcttgggcctcttctgcatataaaagcaagcaagctatggtgttaggccagtgcgaaaaagtcatgttcaatgttggtggatggcgtaaggccagacaagagcaacagatgcgagactggttcggctttgtgccaacatacttaataactgtcgacgcttctttctgtgagcgtgcaaacgatacagagttctgttacttacttgaacatgagctttaccacattggagtgatgagagacgaggacggagaaattgtttatagcgatagttctggtcttcctaagcactatcttgcaggtcatgacgttgaagagtttattggcgtagttaaacgttatggaccaagcaaaaatgttaagcgacttattgaagtcgcaaagaatccgccgtttgtttcgaatcttgatatttcaaaatgctgcggcaactgtgtaatcaattga

SEQ ID NO: 45158 - DNA, 435 bp, Acinetobacter baumannii
atggataataaagattatttttggcttacacgaaaaaaagaacctaaaacaaaacctaaaagccggcctttgcctaaggcgaagcaaaaatatctcgaggctgaggcaacacttaaggaagaacttgaggatttggcgattggttttgaaagtaagtttcaaccgatccataccaaacactggcgctttgattttcatattgtgaaattgcgtttgctcattgaaattgagggtgggccctggtctggtggacgtggtggaaagctggcaaataaagcatggagtcttgatcgatatgatcaagctgaagagatgggttataaaatagagcgctttcatccagattctattttgtcgggatatgtcatcaactggataaaaagtgaattagcgagaattgaagatggagcaaataagaccatttccaccgactga

SEQ ID NO: 45159 - DNA, 993 bp, Acinetobacter baumannii
atgttccataaagaagcaaaagatcaacattacatttcagtatcagaacaaaaactaaattctataaatccaaatgaaacagatcgaaaaaagataaaaatttatagtttcaaattgatagaccgtgaaacacataaaattgagctatgcaacccgagcttagtaaaagcaataaaaaacttatattatactgatttatatacctttgaaatattagacaaaaatcaacgcttatgttttgaaaatttgtttgaaaggcttgaaagaaaagtaggatctcaaactaataaaatattagataatgatgaatttactgtaggtgattttttagatgttattaaaactaaatttttaaatatgattagaaatccgtattgtataaaatttacgttaaacaattttagtgccataaaagatctatatccaaaagatacagatttaaactctaaatttaaaaaaattgaagctttaaaagtttccagtgagattctagaaaagtttgtaataactgagaaagattacaaggattggttgaaaattatttttttaatgattacaccattgaataggaatagatatattcttgatgatgttgtagagaatttttttaacttagaaaaattttatcatttgatatatctttgtaagtttacaaataaaacctgtttattgtcagatagaggttatgtaaatttatcagagttgtttgaaaactcagatggaatgtcatttgggtttaatttgaggcatgattcatttatttatctaacattttttccaaatgatttggtgaaaattgctaaagatattattggtttaagcggagaaaatgttgctaggatcttaaaggagaaaggagtaacaaaaattcaaactggtttatccattcagttgtctattgataatctagaattattgaaaagttataataaacatgtcatttaccagtgctttaataatgtatttgcagcaaaaccagaaattttgaaatag

SEQ ID NO: 45160 - DNA, 144 bp, Acinetobacter baumannii
atgactgaatttcaaaaaattacgcatgagattagacagctccaagtagagcttaatcatttgggaagttgcacaacgaaaggtctaacttcagaacagatcgctcacttagatgagcgatttttttggtcattaaaaagttga

SEQ ID NO: 45161 - DNA, 246 bp, Acinetobacter baumannii
atgttgtttaatggttcagaagagcttgttgtgatttccaatgatggtattcgaagagctttgaagtcttgtagaattgataatgaagaaacaatcttcacaagtgactctacagatggcgtaagtattggagatcgattaatcaagaaattacaaaatggttcaaatcgagaatatttagttaaatctgttaaggatggtgtaaatatgtttggacatagagagattagagttcagcagatttaa

SEQ ID NO: 45162 - DNA, 219 bp, Acinetobacter baumannii
atgaatatttgtgttggtggtgaactcaatgggcaagtgatagaaaaagaaggcagattactaaaagcttctgacattgatccatcattcaaaactgagtactacaaacagatttacaaccgtgacaatacggtgttccatttctggttaccaattggatctgacttacatgacatgtcagagaaagtactaactattcttagagcacctaaaaactag

SEQ ID NO: 45163 - DNA, 675 bp, Acinetobacter baumannii
atgcgggctttaatattttctggggctatcatgtcggctgaaattgcatctattacttctgcttttattcaaggatggttcaccattatgggagcatttttgggagcagcagcattaataggtaccttttggtttggtgctaaatccgctttaaatgcacacaaagccgataaattagcagaagcgaaaagagatagttatttagaattagtcaaaagttggtttaatttcatattagtattttcttcgtatcaaaaaattaatgaagatgatgatctaaatactcagatgaatgatttttttgataaattgagtttatcttttaaagatttaactacagccttacatcaatctagctttatttctgaacctttaacaaaagaaaagattttagattttacaatgaaacttagtgaggattacttcttcttaactggaaaagttgcacagtattatctgataaaagaagaaaggaatgagatataccttcaattaatggactttatgaataattacggacttaaatgtcttgaatcacaaaaagacttaagaatagaaattggtatttcagaagatgatgtaattaattctcgaattttgaaaaagcagaaagaatttgcagaaaaaatgaaaaacaaaattatgaaaattcgtggtcatgattttgggctttaa

SEQ ID NO: 45164 - DNA, 492 bp, Acinetobacter baumannii
atgaatatgccagtacaacacattttacaatcggtcgattggtctaaatatagttttgaagagtggtgccgccagcttggagcttggcttaacggcgataccgaaacaatggtcaaaattgttaagacgatgccaacaaaacgcatcactcaaaaacaacgtgaaaaattaatagctatgtacatgagcgatgaaaatttaaaagatcgcttatgtattcgccgtaagggtacttgctgtgagttaaatgacaatgaggcacgtgcaatccatagattgattattgatattaaattaatcgaagacaacattttacaagaatggatttcagcaatttggtcacatcatgttatgggtaattcattacgtgatattgctcaaagtaacgacacttcagttaatcaaatcagacaggatttaaaatgtggtatggcttatatcaaaagtcgaaatccgcatttcagatttgaaacttttgaaaaaaccgcttga

SEQ ID NO: 45165 - DNA, 396 bp, Acinetobacter baumannii
atgtcatcagtcagcattgctgaataccgtaagttatttcctattaagaaaaataaaaagcggcgttcagcaaagcaagttgctagacaaccaagtgtgggtgaaatggttctggcaacgcatttaagagcatgcaagatcggttttgaacaggaatataaattccatcccggacgtaaatggagagcagattttttaataacgggtacaaagattttgattgaggtggaaggcgggatctggagtggaggccgtcacacaagaggtaagggctatttaggggatatggagaaatacaactccgcagcaatgatgggttttacggttttacggttcagcacagagcaagttaaagcaggcgtggcgattaaacaaattgagcaattggtgggatga

SEQ ID NO: 45166 - DNA, 216 bp, Acinetobacter baumannii
atgagtgagtttgagggtaaatctggaaagtgggcttgggagattcaaaaagaacaacaagcgaatttagatgagctaagaagttcaattgaaaacctagttcaaaagtataaacacgatgctcatgcttcaagccttttaggtgatcaggataaatcacgtgtttataactgctttgctaatcagttggaaaatttgctgaaaggtggtgcttga

SEQ ID NO: 45167 - DNA, 402 bp, Acinetobacter baumannii
atgaaactaactaaacaacaacgtgctgagctaaaacaaaagtttggtggacattgcgcttactgtggtgagttgcttggcgataaatggcatgcagaccatatcgaagcagtgagacgagatttaattcatgttggtggcggtaagttaattacgggtgaaatgactagaccgcaaaacgacactttagaaaacatgaaccctgcatgtgttccttgcaatacaaacaaatcgtctatgccgctggaagggtggcgaaaaatgcttacacattaccgtgatgtgcagttactacgcgatagcacacatgcccgccatttacttcgtttcggtttgattgaaattaagacaaaacctgtgacgttcttctttgagaattataaaggagccagtcatgagtga

SEQ ID NO: 45168 - DNA, 963 bp, Acinetobacter baumannii
atgagtctagatgcaacagtttgggcttggaaaacccgtcaaaaacaaaaggtgggtggagcattaaaaccactcaaaaaattagttcttctttcactagccgatcgagctggtgaaacacatgaatgctatccaagtattgctcgtttagttgatgacacggaaatggaccgtaagaccgttttaaaaatcattgatgagttaattgaagacggatttattatcgatactggtaagcgcgaaggtaaaactaagcaggtaaaagtctatcttttgatcggagttaaaggtcgggaaacagtaccaacaaaggtacactttgacactgaaaatgatgatttaaacaataccaacaatggaacagttccaacaacggaacagttccaacaattccatgaaagagtcccaacaattccgttaaacagtcccaacgttgggacacggaatctttcaaagaatctatcagaagaatctaaaaataaaaaaacatggttgagtttgaaaaaacttggtgaagaaattcttttggcaactgatcaggaaacttacgagcagatcaaaaacgcgacttggttcgatcgagagttacgagcatttgaactctacaacgccgagaagaatctttgcgatgaactcatgaattaccactttgcagattggttaatcaacgcatgtggaaaataccaagcacgtgaacaatctaaaaaaccaaattctggaacgcaggtccgagtcccgcagggagaatcaaatactcttagttcaaaacagatttactcatttgctcaaaaactttctgtacatcctgagtttgcaagcaaatacgctgaaggtaacgagagctatgaacaacttgctgcacgtgtcgcagtgaaacttgcagatccagagcaacaacaaaaattgatgccatacctcattcaggttggatttcaacaaaaaggtaaaggagaggcggcttga

SEQ ID NO: 45169 - DNA, 294 bp, Acinetobacter baumannii
atgagtgcctttgaacaacaacaaaagcatattcaatcctggcatgaaccagcattaagaactttgtctggtttgttgaaaaaacgtaaggaaaatttagcccgccaaaaccgtgacgaaaaaaatgctgctgtaacacgtgatgaattcatgcaggctttggttgacgagcatggaaaacatgggatttatcttattcatgctggcccgatcatctcaagtttatatcgagctaaacggatccgctatttgggtagcacattcattcagttgaatgaagagggggataaatga

SEQ ID NO: 45170 - DNA, 276 bp, Acinetobacter baumannii
atgaacacaaacaatttatcagaacaaccaatcgaactcaactcacctgattttttaataggtgacgttgtagtgcttactaaagagtgccgtactttcaaatcaaatgatttgtttgaagttaaaaacaaaactttgactagtttatggaccatcaaatcagagaatcatttgattctagtttcttcaaaagaaatccgcacagcaacagttgctgaacttaacgccaaacgccgactaacaagcgctgagcaagcattagcggaggtgtcatga

SEQ ID NO: 45171 - DNA, 264 bp, Acinetobacter baumannii
atgagccttgaaaaagaagatcttcgtttgaagatgctccctgacatgatggaacgtttgagattgattgcggatgtccgtggaaatgagtatgcacatcaagctgtggtcctcttagaaaaagcccttatgggtgaatatcatgaagttagcttaatgcttgaaagagccgaaaaaaataggaagaaaagggagcgtctaggattaattgggacagttggggtaaacccagattcccaaattttagaaataaaaaaagcctga

SEQ ID NO: 45172 - DNA, 177 bp, Acinetobacter baumannii
atgcgaattgagatgaaaacatcagatgttttggctcggttcaatgcgccaaaaatcgcaaaaatcttaaaaattagccgtcaagcagtttaccagtggggtgaatttgtgcctgaagctgctgcttttaagctacttgaacaagaaccaacactaccatttaagagagtttcatga

SEQ ID NO: 45173 - DNA, 690 bp, Acinetobacter baumannii
atgagcactctacaagagcgaatgtctttagctataaaacactatgagtctgaaacaggtaaaagattcaagaatactgatttagctagatttgctggcgttagtagagctaatgtcgggctatgggtaaatgggccaacacaagaacttgaaggctcaaatttagtaaaagctgctgagtttttaggtgtttctaaagattggcttgctggtcaaagcaataaaatggatgctacaaaaattgataataatgtctccaagaaagtagcaactttagcacctgttctttcatgggttcaggctggaacttttaccaatgtgcaatctgttgatctatctatggttgaagaatggcttcctttgccagatgaatgcactaattgtttttatctaaaagttcaaggcgtaagtaaccaacctgactttctggagggtgattacattcttgttgacccagatgtttactacagtgacatgcaatctggcgatatggttgtggtcagaagatttgaagatgcaacttttaaaaagcttgttattgagacagatggatctcgttatctacaggctctaaatcctaaatttgaaccaaatatcattcctttggatgaacattgttattttgtaggtcaagtagttgactgtatgcgatatacatatagagcaaaaagaagatctagaccaaattga

SEQ ID NO: 45174 - DNA, 1863 bp, Acinetobacter baumannii
atgtcgtattttaaaaatacatcggtaaatattgtcggcaacaacaagttgagatcacctcaaattgaagcatatttaaagattcagaactattttgaagaaaatccgaatggagaagctttagttgtactacccactggaacaggaaagtccggactaatttctattgcaccatatggtgttgctgatggcagagttttaattattactcctgggttagttacaaaaaatagtatcagtaagactcaagaatcattacaagataatttttggataaattttgatgtaatatttggcttaaataatctcccagttattaatgaatatacttctgagttaacagatgagcatttagaatctagcaatattatttattcaaatattcaaagaattgttggtgattcagataggtgtttattaaatagggtttctaataatttttttgacatgatcatcattgatgaatcacatcattctgcagccaatagttgggaacaagtcctttccttctttggttctgcaaaaaaactacatgttacaggtacaccttatcgtggtgatggacaagaaattcctggtgtgcgaatacatgaaacccctttatctgaagttatgcgtgatcgttatgtaaaatatcttaaaaaagaaaccattaatgcgcagaatttgtttttcacaactcctgaatttccaaacgaaaagctaaccatcgaaagggttttggagtttaaagattccgaatggttacaaaagagtgtagccttatccaaagaatgttcaatggatgtaattgaacatagcctatcaaaactagctacgttaagagaaatatctcctaatgttccacataaaatattagccgttgggtgcagcattgcacatgctgaagatattcaaaactggtatacatcacgtggagttaaatctatccttatccatagtgaaatggataagatttcacaagaacagaagttccaatctattgaaaataatgagtgcgatgttgtggtgtctgtgaatatgttaatggaaggatatgatcataaatacctgaccattttatctatttttagaccatacaaaagtttgaatgcatttgcccaggtaatcggtagggttcttcgcgcaattccaaaagaagagattactgctttcgaaattgataataatgccactgttatattccatgaagaaattggccttaatgacatgtggagtgagtttcaaaaagaggttgatagagctaaagcggaaagaattaaagactatacttctcaagaattgaccaaagagtatgagagaaaagatcaagttcttggctcggttgaaagtgacatggtatacctgagcgatcaagattcttttttaaaaggttttgattttaatgagttatttgaaataaaaagacaagaaattaatgaattagttaaaaacaagcttcaaaaacttgcagagttaaatgatttcgatgatgaagatttagagctttttgcaaaacaacttacagagaaagaaaatagaaaaatttctaaagattacgttgatcctgtacttcttgaaaagcgcccagcacaagctagagaacagctaagaaaacttattgtaaaaaaagtggaagatgaaatctcaagtttgcttgtagatttaggttataatcctaaaggtactgagttatggcagtcttttactcgccatttaccatatctaaaaccaaataccgccaatgatggcactttagttaattacgtaaatctaaagttatccaacaagtttggtcgcgttatttcaagagataaccctactcttgtgaagtcattagaccacataccttcactcattgaagaagttaggaagatgctatga

SEQ ID NO: 45175 - DNA, 438 bp, Acinetobacter baumannii
atgaacgacctatatcttatccagctcattgataaattaacagctatttatttaatgcaaggggtacaaccctctgaacttgctgatgctatttttgatgacccatatactaatatgagtttaatcaagaacatgaattatattgaagttattctatcatttaaagagcaatgtgatcagactcacaatgaacacatcagaaaggtaaaatatctttataatcatgataggtatttaattcaaacaagtgaggcaatcgactcaaaagcatttaagatctcttgggacagagaaaaaactataagtaaaattgttagtgatatagaaaaaaggctcaaggaaattggctatagcccaaaggaaatgaaaaaaattctctccacgttaccaactccgccacaattagcaaataattccaagttaagtttagtttcgtag

SEQ ID NO: 45176 - DNA, 441 bp, Acinetobacter baumannii
atgaacgtaaaagttaactcattcaactcatttgcatttgtcagcatggctgctcttgcaatctctggtggttctttagttgcttgccagctacaaccagctttccaaacaaaagaagcacctactcttttcacccctaaaactcaatcaagtacttacggtgttttaaccgcaaaaatcacaggtaaacattctggcgttgctgtaattaaattagatagcttccgtttaaacgttagctttgattttgaagctcatccagacagttacggcgttccgggttctgaattcactgctgttgatattactcaactcactgtaaatgaaatcactgatattaacggtaagtcatataacgatttcaccgaatttgaagacatccgcaacatcaatgaccttctaaaaggcttcatcgaacgtaacaagttggtggaggcttaa

SEQ ID NO: 45177 - DNA, 324 bp, Acinetobacter baumannii
atgactcatttcaaaaagcaccccgacggctacaagtcatttttaggccgtgatgataaagggctgtattcagttcgcattggctggcaagtgtacgcatctaatgctaatggctcagttctttacaaagttaaagacggagttaagacgcctttaaatgtgttcaggttccaaacttcttatccaaaagtttggaatgaacccacccaagaaatcgattttcagcgcagaaagcagctcgctataaaactgcgtgaaacaaatatccctacttatgaccgcaaagcatataagcaaaaacgcggttttacaggctcaagataa

SEQ ID NO: 45178 - DNA, 975 bp, Acinetobacter baumannii
atgaatactctactaactgcagctgaagcatttgcagctcttcaaaaaggtaaaacagtactttgtcgttatgctggtgatggaacacttaaagctgataagtcattcagcaccttagatcaaatgccagcaacggtatttggtctacccaattatgagttttgtattcagcttgaaactattgaactggctgggattactttcacaaaaccattgactattgaagaatatgaagagggtcaggaagtttttgtaatcagtacatattcgccttctatttacgtcgtgaattttaaaaccaccgcattaattgaatctattaatagtggttttgttcagcgtgatgccgaaaacgccaagcttcaattaaaagctttttcaaaagcactcggttttgaaatcaacaatgaattaagtgttattcgtcttggtgaggaacctaaaaaacagagaggcaaaaaatcaaaagcagaaaagcctattgaagttatttctgcagaaattcaaccaacaattgttattaccgaacaaacaaatgtcaccacatctgaggatctattaattccagaaactaacgagcctaaagtagatcctgaatatcagaaggcattagatgcccttcttcagcgtgtaaaagaatcaaaaacacctgaagaggtaaatgcagtttatcgctatacccgtacttggactgataaacaaatggagcctttgctacaagctacccataaacgtttgtcagagctttcagataacaaacctgctgagagtgatccgccttcgctaatggtccagatccagaacgcaccagaccttacaacattggatgcactggaaatagacgtagctgctcgtgatccgcagattcaaccgaagctcatgggctatataagaaaacgccgctttgaattagaaaatccagcagtttctcaaccagaagtagagcctgattatctattagtggatggcttctaa

SEQ ID NO: 45179 - DNA, 246 bp, Acinetobacter baumannii
atgaaagatcagtacaagaaagtaagccaaaaacacatgcttggttttatgtactacttgcaattgctgggctacgtaatagtccggcaaggcatggatcaagcaatgtttctaaccaagcattatgcggtaccagtcgcttggcgccgcataacgatcgactatcacaaccggttaaataaaccagctcaacaactttataaagagtttgttgagtggactaaagaagaatatttgagggcttag

SEQ ID NO: 45180 - DNA, 570 bp, Acinetobacter baumannii
atgattgatttaaaaactaaacaagcattttgggctgagcaaatgcctatttttaaagaaaaatattggattcccgaacatttagatgttctcgaatttgatatgaatggcggctgttttgatattgctgaaggtgtcaaaactgatctaagtgaagaagacctttttgatatttaccatcgtgtaaatagtggctgggtaatgtggaagaaagccgttagtttcatgcgggaaaaagctcaggcggtaccatcgcagaaatactttagccatgattttaacggcggtggctttaaatatcacgactctttagaagaagctcaaaaagaagcagaggctaatcttgattggtatagagataaagtcgcagatggccatcatgtagctgaggatggtgaattttatgaactttgctatggggttgttattgcatctgcggattacacagttgatgccgtagtaagcgaggatcatcacaaaaacgataaatttactaaatatgaggtgggaacggaaatcttaagacttcattttaataaatgtaatagcaaatcaggagctgagggatga

SEQ ID NO: 45181 - DNA, 345 bp, Acinetobacter baumannii
atgattaatcaattaaaaccaactgagatcatccgggatgaaatgggttgttgggtgcatcctgaatatctgaaatatttggatgacaattatgctgaccaagaatggttgagccaaagcgaatgggatcaacttaagcagcatttcaatattgtcaccgttcgactttatttagaagggagtgtttctgatgatctatttttggagattatggactcctcagacctatctaaatggaatccaatcgcaccgcacggctttttcttaatagatattgggtttacggaagatggtgctgaagcgttgtttgcaaaagaagttaaagcggaaagtaaggatgggtaa

SEQ ID NO: 45182 - DNA, 270 bp, Acinetobacter baumannii
atgttaaaagatctgagaaatctatctgatgcagagcaacaagaatatttggatcgcttcataatggctaatgaagaacagaagttccctcaagaggttgtggcactttatttagattgctcgccttggacattagctagaatgcgttgtgatcaatcatcactgcctttttcgaaaattggaagacgtgtttcatataaaaagaaggacgttttgaagtatgagcaaagcaagactgtgcttaatacagcacagcttgcaacagtttaa

SEQ ID NO: 45183 - DNA, 1263 bp, Acinetobacter baumannii
atgaaactcaacaaatctactgttgatgctattccattaactgaaaaaggtcaaaaaatatttagagatgcagaactgatcggttttgctgttcgggtaactaataaaagtaaaacctatattgttgaaaggaggcatgaaggtgaactctatcgagtgacaattggcaaaactaccgatattcctgcaacaaatgctcgagcaaaagctcagatgattctggcgaaaatttcaaacaatgaatttgaaaagcctatcaaattaaagaatgttgctaatcctttagatattacagtcaatgaagctcttcaaatttatattgataaaaatgactttaggccaaaaacaattaggcagtaccgtaagtactttgatttatatttggggtggggcaacaaaaagcttttccagatatctaagcaagaagtattggatcgatttattgaggtatcagaagtaagtgagtcgtcagcaaatggtgctgtatctcttttaggtactttatggaagtatattcatgttctttattcaacagatgagaacccgatccttaaaagtaatccagttgacattatttccgtaacaagaggttggaataaaatagcaagtagggatagacatctccataaagacatcattcacaaatattacaatgcggtgcttcattatgaagatgagttgaatctggaaaatactgctaggtcaaacacgcatcgggatattgtattgatgtgcatgtatacgggatgccgtaaacaggaggcatgttgtctaaagtgggctgatgtagatattaaaaatggtaccttaacttttagagataccaaaaatggttcagatcatacttttcctattggtgatcatctacacagtattttgcgtgaacgttggttattaagagaaaacgattgggttttcccagctactaaaatgcctacttcgtggaatatgcatgcaactaaggtagatacattattgaatagagtgggaaaggaagttgactattacgtttcaatgcatgatttccgccgtacatttgccactatatgcaaccttttaagatttaatatttatgtgacaaaaagacttcttaatcacacggctaaaccaagaattgatgtgacaggtggctatgttcaaattcctgatgaggagttaagggcttcaatgaatatggttgaggcggtttatcaaggcaagattgattgctttaattaccaatctgtttggtcagaaagattaaaagaaataaaggcggtttaa

SEQ ID NO: 45184 - DNA, 864 bp, Acinetobacter baumannii
atgtcaaaaaaatttgaagatttcgataatccaagacaaaaggcattactggggatgaagaatagtattcctgcagaacagtgggaagaaaatctaaaatttctcaaacaattaagagcgagaattgctgaattaccagtatgtaaacatccggcgatcgaagttttaaataatggattgcttgataaattcactttaacaagaattcatttagaatatcgtcatgcgattgttcagatctttactgatgccttattaatggcccagttccagacaaaacaattggagcctaaactccattctggagctaaaatgtttccacgcgttttattaagtttaaatgtacttgatgaatttggttttagaccaggaacagacccggacaattattatctaggtaatccggagtatgcacattatcctttatatgaagatttattgaatgattatggtttgagtgagaaggaccgtagagagtatcaaccttcaaaaattgcagatcaggtaagaaattttctagaatcatcttatgatagttatattaaagtagttgctttacttgcagtggccgaagaagaagtgattctttttagcccaccacttcgtgaagcgactaaggctattggtgtagatgttgaaggtggcggctattaccatgttcatggggtatctactgacgaaacctcagaagcagcagatgatgatcatgaagatgatctctggtttgcgttagcgcaagcaataactaaagaagactatgagagcttaacaacgctttgtatggattattgtgctttatggaatgagttttgggatgcacaaattgctgatattcactacttagaagcaaagaagttagcataa

SEQ ID NO: 45185 - DNA, 2154 bp, Acinetobacter baumannii
atgatccacgctggcaatgccattaccgtccaaatgcttgcggacggaattgcagaattccgctttgacttacaaggtgagtcggtcaataaattcaaccgtgcaacaattgaagatttcaaagctgctatcgcggctgtaaaagctaataacgatattaaaggcttagttgttacctcgggcaaatctacattcattgttggtgcagatattaccgaatttggtcaaaactttgcacaaggcgaaaaagcgattgttgactggcttatgcctgttcacgaaatcttcaatagctttgaagatttagaccttccaaaagttgctgctattaacggcatggctttgggtggtggttttgaaatgtgtttagtttgtgactatcgcgtgatgtcagaagctgcacaagtcggtttaccagaaatcaaactcggtatttaccctggtttcggtggtagtgttcgtttaagccgtctcattggtattgataatgcagttgaatggatggcaatggctactccaaagaaaccggctgctgcacttaaagatggcgctgtagatgctgtggttgctgcggacaaattacttgacgctgctactgatctggttaagcaagcgatttctggtcgtttaaactggaaagcaaaacgccaagaaaaacttgaagctgtaaaattgaacccacttgaacaaatgatggcgttcaacacagcaaaaggtgcggtacttgctaaagcaaatcctgctcaataccctgctccaaaattattacttgattcattacaagctggtgcaagccttgcacgtgatgaagcgttaaaagctgaggctgaaggctttgccaaagcagccgtaactcctcaagctgaagcattaattggtttattcattaatgaccaagttgttaaaaaagcatctaagcaacatgaaaagggtgctcatcctgtaaaccaagctgctgtacttggcgcgggtatcatgggtggtggtattgcttaccaagcggcaagcaaaggcactccaatcatcatgaaagatattggtaacccacaacttgcattaggtatgaaagaagcaaacaacttgttaaccaagcaagttgaacgcaagaaaatgaaacctgcgcaaatgggtgaaacacttgctcgcatccgtcctactttaagctacgaagagtttaaagaagtcgacatcgtgatcgaagcggtaactgaaaatccaaaagtaaaagaaatcgtacttgctgaaactgagaaaaatgttcgtgaaaacacgatcattgcttctaacacctctactatttcaattacacgtttagcaaaagcattacaacgtcctgaaaacttcgttggtatgcacttcttcaacccagttcacatgatgccacttgttgaagttattcgtggtgagaaaacttctgaagaagcaattgcaactacggtcgttcttgctcaaaaaatgggtaaaacaccaatcgttgtaaatgactgcccaggattcttggttaaccgtgtattgttcccttacttcggtgcatttgaccttcttgtaaaagacggcgcagatttccaacaaatcgacaatgtaatgtctaagttcggttggccaatgggtcctgcttatctgatcgatgttgtaggtatcgatacaggtgtacatggtgctgaagtgatggctgaaggtttccctgaccgtatgaagccagactacaaaggcgcgatcgaagcaatgtacgaagcgaagcgtcttggtcaaaagaatgatgtaggtttctacaaatacgaactcgacaagaaaggcaagaaagcaaaaactgttgacccaacagcgtatgaagtaattgctccattcgtaactggcgaaaaacgcgaatttgataaccaagaaattattgaccgtatgatgcttgctctttgcaatgaaactgttcgttgcttagaagacaacattgtagcgactgcgtctgaggcagacatggcaatgattatgggtattggtttccctccattccgtggtggtccatgccgttacatcgaccaaacaggtgttgctgaatacgttgcactttgcgacaaatatgcgcacttaggtaaggcttatgaagcgccacaaatgttgcgcgacatggctgctaacaacaaaaaattctacggttaa

SEQ ID NO: 45186 - DNA, 621 bp, Acinetobacter baumannii
atgtctgattgcactaaaacgaatgagaaagatcaaaaaattctggatgcagcaacaaagttttttctgatccatggttttagtggaacaaccacagatatgattcaaaaagaagcgggcgtttcaaaagcgaccatgtatggttgttttaaaaataaagaagcgatgtttgctgcggtcattgaacgtcaatgtaccaacatgcaaaaacaaattatgtcggtcgagacaaaagccaaaaatttacgttcagctttaaccgaaattgggaaaacttatctgtgctttatcttatcgcattcaggtttggctttttttagagtctgtattgcagaggctgtaaggttcccggaattatccgaaaagttctttgaagtgggaccacaacgtctggcaaatattattgcaggttatcttgaaaagtcggttaaacaaggagaaattgaattaacgtcttcttcggaagtcgcagcaaatatatttttatcactgttaagaagtgatgcccacttaaagtgtttgactcatcctgattatttaatctcagctgatgaaattagtacttgggttgaatacgctgttgatttatttttaaaaaatattaattacaaactagattga

SEQ ID NO: 45187 - DNA, 1578 bp, Acinetobacter baumannii
atgaatatacgaccactcatcggtttggcaggtgcaatttttgcagccatgactgtcgaatttaataaccgaattagcagcattaccttggtcgacattcgcggtgagatgggtattagtgtcgactctggttattgggtcagcagtatttatgccagtgccatgattattgggatgatcctgtccaccagttgggccgttattttttctatgcgtcgggttcttctttttgcgataggactttgcctcttctctagcgttttaattccttttagcccaaatatcgaaatattttatttattacggggcttacaaggactcgccaatggtttaactattcctttattaatggcatgtgcacttagattcctaggacctgaaattcgtctatggggcttggcctgctatgcattaacagcaacttttttcccaaacttaagcgctgcgcttgctgccttttatttagatgtgattggttggaaaatgatatttttccaaaccatccctttttgtgctttaagtgctgcgttagtttacttcggtattccgcaagatccgttaaattactcaagaataaaaacttacgattggactggcgcgattctagccattattggtttggcaagccttagtaccatgcttttgcatggcaatcatttggactggttccattcaaaattaatttgtgttttggctttaatgagtgctattaccctacctttatttttaatacatgaatggcgctatccaacaccattaattaaaccgcaaatgctcgaaatacgaaattttggttatgctgttattgcgttgttctgctttgtggttattggtatgtcaaccagtacattaccccttaattacttaagcgctgtgcatggttataagcctactcaaaccatgtggattggcttacaaattgccgcattacaatttatctatatcccgattgttattaaagttttgaaccaagcttgggttgatagccgatatgtacatggatttggtttacttttggttatggttggctgcttaggtgcaagtcaacttgatacgacttggaaccaagaccaattctatttttggcatgcaatctcatgtttaggacaaacctgtgtagtgctttcgctcctcatgatgggtacaaatagtgtccacccaactatggcaatctatgcttcgcctatgattaacaccccgcgtgctattagcggcgtactcggtgtgtgccttttggactgggtcaatcgagtacgtggtgaataccattcaacacggctgattgaaaataccgcacaacatgtttttcaaaatattcaaggccctgttattaatcctcttaccccgcctgtgctgagtgcagatggtaccgaacgtgtttccggtggtttatctgccttaaattctgcgattcaggcacagcaatcagtattagtcattagcgatcaatatctgattttagcgggacttactgcaattttatttatcgttatgctgattttgccagttagaacttatccaccacgcattgctctcattaagttaatgaatagtcataactcaggaaaatctttatga

SEQ ID NO: 45188 - DNA, 1089 bp, Acinetobacter baumannii
atgagtactctcgaagcccaagatcactccatgaccgagtcacccaagttaacaaagatgcaatatcttaagaaacactgggttatggttattgcatttatagtcgttctagtttccattttatggattttaaaagttatatttttaccttcttccattgttaaaactgacgatgcgcgggtagatgtcgagtactcaaccattgctcccaaagtgtcaggtaatattgaagaaatttatattaaagatcaccagaccgtaaaaaaaggccagcttttggcacggattgatgcacgtgattatcaggcggctttagctgaagctgaatctaattatgccaaagcacaagctgacttaaatgaagcaatgctggcagtagaaagacaaccaactgttattcgagaaacagaggcccagcttagaaaagtagaagccggcattaaactcactaaagataataccgcacgctatgagcaattacaggcacttggtgctgagtctagattgattacacaacagtcaaaaaccacattgaccgagcaatatgccgacttggacagcagtaaagaaaaagtcattgatgcgcagtatcagctcaaccaatataagattcaggtacaggctaaacaagccgctttaaaacaagcccaagctgcgcttgataaagcaaaactgaatctgagctatacagaaattcgagcacctattgatggcatgattgggcaaaagtctgcaaatgtgggcaactttgttggcgcaggtaatccactcatggtggttgtgcctttagatcaagtgtatgtagaagcaaacttccgtgaaattgagctaaaacaaattaaaatcggccagcctgtcactgtttatgtcgacgcttacaatgttgagttaaaaggtgtggtagatagtttctcaccatcgactggtgcattcttctcgccaatttcagcaacaaatgcgacgggtaactttactaaaattgttcagcgtttacctttacgcatcaaactccttgagaaccaacctgatattaaattgttgcgtcctggtctatctgttgtggtttctgtggataccactaaaaaataa

SEQ ID NO: 45189 - DNA, 141 bp, Acinetobacter baumannii
atgaaattgttagctttgattagtatgggagttgcagcgagttattggtataaaactataaaagatagcaagccaactcttctgaaacctaattttgatgaaatagtaaaaaactttgtattagcagaatttaaagcctaa

SEQ ID NO: 45190 - DNA, 252 bp, Acinetobacter baumannii
atgtttccacctaccgtagccgagataaatcctggaatttatcaacttcatgctcaaagcaatgcatttggttcaagggatgctttacgatcaaagctcatcactaaggcggaagaagtatgtaagaataaaggctttgatgagttagatagtaataacaaaattgtaaaccatcatactgcctacaattcaggaatgattattccggtgagtacaaaagcagcgattttgaaagttaagtgtaaagactaa

SEQ ID NO: 45191 - DNA, 1038 bp, Acinetobacter baumannii
atgacacttaataaaactatttttctttttctactttcagctcttatagtgggctgtggtggtggaggaagtagcgatactgttgccacaacaaaagatgaaattcttaatacagagtttgataatactacttcttacaaatggggatctattcaatttgatacaacatttgttgagattacaaagaattcaagaaatggaaatatttggtatgctgattatcctaagttagataaaggtacagaaccagatataggacgcttaatgttaagtacagatggcctttatagaccagatgagacgaagtatccattgggttatagacgttatattttgagatcgacttcgcaagatggaacgacacttagaaaaaccccttataacaaagatggtctaaaaaatattgttatagaggagaaaggacgctggattgatttaaaaaatgtcaggataagtgacagaaccgctgtatattggaatcttcttgcagagaaaattcctacaagtgtattttttcatccaaaacttattggtgatcagtttaaagattttttagctttaaccaagaaaaatacatttccagcaggagcgaaatgttttcaggttgaaagaacaagttattcagtaccttattatgtaattacaaatacggacagcttggcttttattaatggtgttagtgttaataacctttcaaattatatttctttagctggaagtaatgccgttactggaaaatggggcaatgtacagtgggcttatttaaataccgaggcaaatgatccaaagtattatacgatttcagtttatatgaatatagacaataaattagcttcaggttattggcaaaagaatcctaacacttcaattgatagtattgttgcaggttatgaaagatcacttgattcatttaataattatgaggatgtaatttctttccaaagcgcaattgaagaagctaagaatgaatgtacttactataattcagttgcttctcaaaaaattgaatcattgattaatcagagcttagtgaattaa

SEQ ID NO: 45192 - DNA, 636 bp, Acinetobacter baumannii
gtgcctttttttctcccagaaaaggcacaggctttttattctcttttagaaacaacaagaatttataacggtaaaactatgcacaatttaaaaaattcttccaaaaaattacaggttattcatactgccatacgtctatttgttacttacggttttcacacgacgggcgtagacctaattattaaagaagccaaaataaccaaggcgactttttataattactttcactcaaaagaacggttaattgaaatgtgcattgcttttcaaaaaagcctgctgaaagaagaagtacttgccattatttactcaaaccgttatcgcacttcaaaggacaaactcaaagaaattataaacttacatgttaactttaatagcctgtattaccttttgcttaaagccttttttgaaattaaacatatgtatgtgagcgcttaccgtatggcggttgagtatagaaggtggctacttcatgagatttttgacctcatttttagtttagaaacccatgtattaaaacccgatgccaatttggttttaaacctaattgatggcttgatgttccagattttaagcttaaagagtttggaggaaagggatgtggtggtggaggggttttttggcaggttgggccgttaa

SEQ ID NO: 45193 - DNA, 903 bp, Acinetobacter baumannii
atgggttcaggattaattaccgtttttttaccaattgcactcgcaattattatggctggtttgggtctagagttgaccataaatgactttaaacgcgtacgacaacacccaaaagctgtctttatcgcattattttgccaactggttattttagtcggtattgcatttattatttgtaaggttcttgctttaccaccaatgcttgctgttggattaatgctcctttctgcgtcaccaggcgggccgactgctaacttatttagttatctctataaaggagatatcgctttaaatattactttaacggctataaattcggtcattgctgcctttacacttccattaatcgtgaatttcgcaatacaacactttatggaaaatggacaaaatgtaggattgcaattctctaaaatcatacaagtttttcttattattttagttcccgttgggatcgggatgttagtccgtcattttgcaccgcatacggccgaaaaactcaataaacctgtgcgtatctttgctatcgtttttctcgtatcgatcatcatattagcaattgcacgagattatcaaaatctgatgacgtatattgggcaaattggattggcaactttgctgttctgcgtatgtagtttaatggttggctattttgtcccacgattattgggtgtaaatagctttcaggcaaaagcttgcgcgtttgaaattggaattcataacagtaccttagccatgacgattgcttttacagtaatggcaagcagtatggccgctatgccagcagcagtttattcattatttatgtacattgttgcagctatctttggcacattgctaaatcgtctagaaaagaaagagattacacaaatatcaactaaaacgtactcaaagaatcttcagtaa

SEQ ID NO: 45194 - DNA, 1641 bp, Acinetobacter baumannii
atgacaaaacagatctggttagatgaatataagcaatggaatatagaaagtacgattacattgccggatgaacaaacttcacttctcgatttttgggacaacagttttaataagttccagcaaagaaaggcttttatatttgcagatcaatctttttcttatgctgaaatcgatttatatagtcgacaaatagcaacattcttgcaaagtttagggctagaaaaagggacacgtgttgccgtaatgatgcctaatattattcagtacccaattatttcacttgccgtcattcgtgcaggttacattctggtcaatattaaccccctctatacagcacgcgagttaaagcatcagttaaatgatgcaggcgcaaaagtcttatttatattagaacagtttttacctgtttatgaggcagttaaagagcacgtgtcgattgagcagattattaccaccaccatgactgaaatgttggtcgaccaacctactgaattagacaccttagattctaaaaaatacgcttttaagcaaatcttattgaaggcaaatgcccaagactatatacgtcctaagcttgttcttgaggacactgcgcttttacaatatacgggtggaacaacaggtgtatcgaagggcgcagaattaacccataaaaatattgtcgccaacttattacaaaataatgtggtttttaaaagctattttggtgaccgagatgcttatgaagatgaaatagcgatctgtgccttaccactttatcatatttttggttttactgtctgtttattgcacagtgcaatgaataaaggttatgccactgttttagttccaaacccgcgtgatttagatgctctcgtacattgttttgaaaaatatcgtcctacggtttttcctgctgtaaatactttatttaatgcactacttaatcatgaaggctttaataaattggaccatagccgtttagaaattaccactggcggcggtatggcaattttgaaatccacggccgatggatgggaaaaactgacaggacgtattatccatgaaggatatggcttatcagaaacttcgcctgttgcgacctttaacccgccaatctctaatacttttagtggcacgatcggtattcctgtgccgagcacggatattgctattttggatgatgaaggtcaccaattagcgcccggtgaaactggagaaattgcaattcgtggcccgcaggttatgaaaggttattggaatttacctgaagaaacgaaagcggtcatgactgctgatggtttctttagaacgggtgatattggctttatgaatgaaaaaggctataccaaaattattgaccgtaaaaaagacatgattttagtgtcaggctttaatgtttttccaaacgaaattgaagaagttttagcccaacatccaaaaattttagaagtcgccgtggttgggattgcagatgaaaaatcgggtgaagtgcctaaagcctttattgtcaaaaaagatgactctttatcggttgaagaaatccaaaactatgcaaaagaaaacctgacaggatataaacaaccccgtcatatccaatttattaatgaattacccaagtcgaacgtgggtaaaattttaagaaaagaactcaaggtttaa

SEQ ID NO: 45195 - DNA, 1374 bp, Acinetobacter baumannii
atgaaaaagaaaacattagtcatggtcatggcttcattttgtacgagcccactctatgcagcagcatttgatcgaacaggacaatcaatttctgcatttctacaacatggtaattattttgaggcaagtttatctgtttcagatacttcattagaaggacaagaagcaggtacaaacccaacacgtaatagtatttctgatattgcaaactctgattatcgtcccagtgcagccttgaaattacagttagcacctcagttctcatttggttttctttacgatcagccatttacttccgactcggaatattatggaaataacagctttgttgctaagccgagcgatacggttttagtaccgggcattgattcagcaacacttgcccaaaagactggtggagaggtcgtaacagggaacaccaaatcgaattttgttatgcaaaattttagtctgatatttggttatcaaccggataagaactggaatttttatgcaggtcctgtttatcagacgtttaagagtaacgttaatttaagaggtcaagttttcagtttatataatggctatgactttaatgccaaagaagttggagattggggatggttggcaggatttggttatcaaattcccgaaaaagccattaaagcctcattgacctatcgttcagaaattatgcatgaagtgactgccaatgaaaatgcgccactggttgatatgttgagtacacagcaaggacgtgattttcttgatcagcatttagcatatatggtttctataggacaactcactgaatctcgtaaggaggcacttaatcatattgttgcgggcttacccgaagcaggaacatcaggctcaactaagtttagagcgccagagtcagtgaatttggaatttcagaccggattacggaaagggactttattgttcggtaacgtgcgttgggttcactggaatgattttgagtttaaaccgtatcgttttggtgaaatctcagaagttgttggagttctatcaacgccaagtcgtccaaatggttttaatctggttcgttattatgatgatcaatggtctgccaatcttgggattggacaacgcctaagcgataaatggtcaggttcagtttctgtaggttgggactcgggagcaggtgagcgcgtatccacaggtgggccagctaaaggttattacagtgttggtcttggtgcgcaatatagtccaacttcaaaatactttatttcaggtggaatgaagtatctgtggctcggtgatgccaaaggtcagcttggtgctcaggcaggcagtgaatattatgtgggtgaatataaaaataactattcaatcggttacggtttgaaaattggttataaattttaa

SEQ ID NO: 45196 - DNA, 1824 bp, Acinetobacter baumannii
atgagcaatgaattaattctctctcgccgtgatgtcgattttttgctattcgattggctaaaagttgaagaactcagccaacgcgatacttttgcaggacaggaccgttttgaatatacatctgttttaaacgtttacgaggctttggcaaccgatttatttgctcctcataataaaaaaaatgacagtaacgaacctgtttttgatggtgaacgtgtaactgttaatcctgaagtcggggtcgcacttaaggcttttgcggatgcaggtttgatgagtgcagcgtttccgtcagattggaatgggatgaacttacccaataccattgagcgtgcaggtatggcatatctactcggtgccaattcaggaacagcgggctatgcctttttaaccattggtaatgcaaatttattaatggctcatggtgaacctgaaaaagttaagccctatgtcaacgccatgatagaaggcaaatgtttcggaacgatgtgtttatctgaaccgcaagctggttcaagtctggctgatattcgtacacgtgcgattaaaacaaaagatggtcgttatcgtttgtttggaaacaaaatgtggatttcaggcggcgagcacgatatttctgacaatattgttcatttggttctggcaaaaattccagatgaaaatggacaattaccagcaggtgtgcaaggcatttctctgtttaccgtaccgcgcaaattactcgatgaaaatggacagccaagtgaacgcaatgatgtggtattagctggaattaaccacaagatgggttatcggggaacagtgaattgtgtgctgaattttggggaaggtcgtttcacacccgaaggagaagcaggcgcaattggtgaactagtcggcgaagctggtaaagggctggcctatatgttccatatgatgaatgaagcccgaatttcggttggacttggggcagcagcattaggatatacaggttatcttcatgctttagattatgcaaaaactcgagtacaaggtcgctctcgtagtgaacgcaatccaagttctccacaaattccgctcattcaacatgcagatgtacgccgtatgcttttggcgcaaaaagcgtatgtctcaggtgcgttggcactgtgtctatatgcagcccgattaaccgatgatatccactcactcgaagatgccgagcagcgcaatcaagcccatcaattacttgatctattaacgccagtagtgaaaagctggtcttctgaatggggacttgtggcaaatgatttagccattcaagttcatggcggctatggttatacccgtgaatataatgttgaacagttttatcgggacaatcgacttaacccgattcatgaaggaacatttggcattcaggcgctcgatttattaggacgaaaaacacgtcttaatcaggggctgtcgatgaagctattacatgaaaaaatcatgaatacgattgaaaaagccaaagctgagccttctttaaaagatcatgcagatcaattagatcaaaagtggcaactcatccgaaatgtaacggagaaattgcatgcattaaccgatgtagaacttcaactggcaaatgccgccaattatctggaggcttttgggcatcttgtggtggggtggttatggcttgatcaagcggtagtcattcataaactcatgccgaactcaacagatcctgattttctgtatgggaagcttgcagcgtgtgattatttctttggctgggaaatgccgaaaattataagttggttagcggtacttgatccggtagagacgactccactcaatatgtcagaagaatggttctag

SEQ ID NO: 45197 - DNA, 462 bp, Acinetobacter baumannii
ttgacaaaaaatacattaagcattgaccaactggttgagttgcaaggccaagcattaggtagctcgcaatggatgaccattgatcaaagcatgattaatacctttgcagatgtcacacaagatcatcaatttattcatgtggatgaagtagctgctcgtcagacaccttttggtggcacgattgcccatggttttttaacactctctttactttcagcgatggccgctcaggtgttgccgactgttcaggggcaaaaatctggcgtgaattatggcatcaataatttgcgttttattagtcctgtacatagcggtaagcgggtgcggggaaattttcacttaaaaaatgtttcccaaaaaaataagggaagttatcagttgatcatggaagtcacgattgaaatcgaagatcaggcaaaaccggcacttgtgacagagtggcttacacttgtaaatgtatag

SEQ ID NO: 45198 - DNA, 912 bp, Acinetobacter baumannii
atgacaattaatttaagcaatcgagtggctattgttacaggtgcaggcgcaggtctagggcgggaacatgcattgttactggctcgtttgggtgcaaaagtggtcgtgaatgatcttggtagcgatgtaaacggaaaaggtggctcaaccatggcggcccaaaaagtcgtggatgaaattattgcggctggtggtgaggcgatggcaaatggtgcttcagtcactgatattgaacaagttcaacagatggtagatgaaaccattgcccgttggggacgtgtagatattttaattaataacgctggaattcttcgagataaaacttttagcaaaatgtcactagatgactttcgtaccgtgattgatgtccacttaatgggggcagtaaattgcacaaaagcggtatgggatatcatgcgcgagcaaaaatatggtcgtattgttatgacgacttcatcctctggtctatatggcaattttgggcagtccaactacagtgctgcaaaaatggcattggttgggctcatgcagacactggctttagagggtgaaaaatctaatgttcgggtgaattgtttagcaccaacagctgcaactcgtatgcttgaaggattattacccgaagaagcccttaaagctcttgctccaagtgcggtcagtcctgcaatcgcgactttggttagtgaagatgcacctacccgtatgattctttgtgcgggcgcaggtagttttgaagcggcccacattacccttacgcaaggaatttatttaggtacggatgaacaggttccgcatgttttagcacaacgtttagctgatgtttcagaccgaacagatgagtttgtgcctgtcagaggaggcgctcagggtgagcttgagctgaaaaaagcttcattaatggcaggagaataa

SEQ ID NO: 45199 - DNA, 756 bp, Acinetobacter baumannii
atgtacgaacattattcaggtcaagtggtcttaatcacaggtgcggcgagtggatttggtgcattgctggcagagcaactggcaaagtatggtgcaaaattagtgttgggtgacttgaatattgaagggttaaatactgtagttgaaccgctacgccaagcaggagtggaggtggttgcgcaagtgtgtgatgtcagttgtgaagcagatgtacaggctttggtgcaaagtgcagttactcagtttggtagaatcgatgtcgggatcaataatgcaggtatgagtccgcctatgaaaagctttattgataccgatgaagcagatctggatttgagttttgccgtcaatgccaaaggtgtgttctttggaatgaagcatcaaattcgtcagatgttgcaacaaggtgggggcattattctgaatgttgcttctgttgcaggtttaggcgctgctcccaaattggctgcctatgctgcggcaaagcatgctgtggtgggattaaccaaaacagcagcggttgaatatgcaaataaaggcattcgagttaatgcaatttgtccattttatacaaccaccccgatggtggtcgacagtgaactcaaagagaaacaagactttttagggcaagcctcgccaatgaagcgtcttggccatccaagcgaagtggtggcaatgatgctgatgatgtgtgccaaagaaaactcatatctcacaggtcaagccattgcaattgatggcggcgtgacagcttattaa

SEQ ID NO: 45200 - DNA, 765 bp, Acinetobacter baumannii
atggcaacacatttatttgatttgactggaaaagtagccttagttataggtgcaagccgtggtattggtgaggaaattgccaaacttttagcagaacaaggcgcacatgtaattgtctctagtcgcaagattgaagattgccaacgtgttgctaatgaaattattgcagcaaatggaaaggcggaggcttttgcttgccatgtggggaagttagaagatattgcagaaatttttgaatatattcgtaaagaacatggacgtttagatattttggtcaacaatgcggccgccaatccctattttgggcatattctcgatacagatattggagcctataacaaaacggttgaagtcaatattcgtggatatttcttcatgtctattgaggcgggcaaattaatgaaagaacagggcagcggtgcaattgttaataccgcatctgtaaatgccctgcaacccggagaccgacaaggtatttattctattaccaaagctgcggtggtgaatatgaccaaagcctttgcaaaagaatgtggaccattgggcattcgagtgaatgctttattgccgggtcttaccaagaccaaatttgcttcggcactatttgaaaatgaagatatttataaaagttggatggacacaattccattacgccgtcacgcagaaccacgtgaaatggcaggtaccgtattgtatctagtgtccgatgctgcgagttacaccaatggtgaatgtattgtggttgatggcggtttaactatttag

SEQ ID NO: 45201 - DNA, 936 bp, Acinetobacter baumannii
atgaatgaaatgaataataatattgtctctcttgctcgtattgacctgaatttatttcgtgtatttgtggcaatttataaagaaaaaaatctaacacgggccagtgaacaactttatctaagtcaacctgctgttagccatgctttggcacgtttacgtgatcattttaatgatccattatttattcgagatggacacggtgttgttccatcacctttagccaaacgtttatggcctaaaattgaacagtcattacaacttatacatcaagcaattcagagcacacatgactttgtgccagcacgagatttaaagcatctcacaattgctatgaatgatgagtatgaaggaatttttttaccctctattattcagcacttgactcaatttaatcctaatttgcagttaaatagcgtacgcattgatcgtaaaaacttaagacatgagctttctacggggaaaattgattttgcgattgatgtacaacattcggttgaagatagcattggttatgaatgccttactaaagatcaatttgtagtaataagtcgtaagcagcatcccttattatccaaaacaaacctaaccaaagaaatttatttagaagctaagcacattacagtgtcctctcgtcctacaggtcgtgtttttgaagattttttcttatctaaacaaggtatcaaaagaacgattagtttccgctgccaacaatatgaaacggcaatccgtctaatcacacaaatggaccatttactcacgattcctcaatgtcaaattgctcattttaaagatacttaccctcaaattaaggtacatctgttacccattgatatagctggttatcaaatgaatttatattgggatcagcaaaagtcccatgaacaccaaataatatggtgtaagagtcaaatattgcagcttatgaatagtttataa

SEQ ID NO: 45202 - DNA, 570 bp, Acinetobacter baumannii
atggctcgtcctcgtagtgaagataaacgtaatgcaattttaagcgctgctatcgaaacattggcagagcttggcgagcgtgcgtctacctcaaaaattgccaaagttgctggcgtagcagaaggtactttatttacctattttagtaataaagaagagctgcttaaccagttatatctttcgctaaaagctgagttacgtcaggtcatgatgcatgattaccctgtcgattctgacttacaaacacaaatgtcgcacatttggcaaagctatttgaactggagtttagaagctccccttaaacgtaaagtgatggcgcagctttcgacctcggaacaaattactgagcaaagcaaacaaattggtatgcaaaccttttgtgattttactcaaaacattcaagaacgtattaacgatggcaaattaagagattacccgccgttatttattgcttcaattttaggtgcgcttgccgaagttacacttaattttattgcccaagacccttctcaagccgagcgttaccgcaaatctggttttgaagccttttggcatgcagtttcaatatag

SEQ ID NO: 45203 - DNA, 1020 bp, Acinetobacter baumannii
atgactatttcaaacacaacagacttgcctgctccctcaatgccatctcaacaacacaatggcaaatttagaaatacgcgtccaaaccaacaccagccttcgtttggcaaaacgcttcaactcatgtggaagtttctatttaacaaaccaaaagataccgttccgaacaaagaaattcctgttttaagtttgtcaaaagaacaattattaagtgcacccgatcgctctctatttcgtttgggccactcaactattttactaaaactgcaaaatgaattttggttaacagatccagttttttcggagcgtgcctcaccttttcaatggcttggaccaaaacgtttccaccagcccccaattagcattgccgaattaccacccattaaaggcgtgattttgtcgcataaccactacgaccatctagactaccatgcggtcatgcagcttaacgataaagttgagcatttcttaacaccacttggtgtaggcgacacccttattaaatggggaattccagaagaaaaggttcagcagctcgactggtgggataccacacaggtagagggactaaaattagttgccacccctgctcatcatttttcaggccgtggtatgggtgatagcaatgcgacactttgggcttcttgggtgattattgataatgacttgcgcgtattttttagcggtgacacgggatattttgacggttttaaagagattggacatcgttacggtcctttcgatctgaccatgttagaaactggtgcttacgaccccgaatggcccgatgttcatatgcaaccagagcaaactttacaagcacatctcgatttaaaaggtcatcatttgttgcctgtgcacaacggtactttcgacttggcgcttcatgcttggaacgacccatttgaacgtattgtcgctttggctcaacaaaataatttagcgattagcacaccgcaaatgggtgaattattgaacttagagggaccaagtattgaaaattattggtggcgttcgtaa

SEQ ID NO: 45204 - DNA, 549 bp, Acinetobacter baumannii
atggcttatatcactagtagcgtcgagtatgcgattcactgtcttctttttcttgtgaacaatgaagataaacctttgagtagtaaggatcttgctgaattacaaggagtctctccgagttttatggctaagatttttcctaaacttgaaaaggcaggacttgtggttgcacaagaaggtgtgcgcggcggctatttactggctcaatctgctcacgaaatcagctttttagatatcgtgaatgcaattgagggtgaaaaaccgctttttgagtgccaagaagtgcgtggtaaatgtgcagtttttaacaatgccccaccagattgggcaaccagtggtgtgtgtgcagtacatgctgtcatgctacaggccgaaaaagccatgcgaaacgctttaggtgctcatacacttggtgatattgcagaccgttttggccgctacgcacccgacgtattttttagtgatgtaaatggctggatcaacgagcgcattgaaggaagaacagcaaaaatgcgtaaaagtaaaatatcgcgggatactcccgactaa

SEQ ID NO: 45205 - DNA, 1206 bp, Acinetobacter baumannii
atgagtaagcgtattattattgctggttctggctttgcaggtttatgggctgcactcgctgcacaaagagcaatccatttagcatcacaagaacaaaacattgaagtgatgatggtttcccctagtccaaatgtcgggattcgtcctcgtctttatgaagctgtgcttgaaaacatgaaccctgatatttcagagttattaagcgtggttggggttaaatttctggcaggttgggtaaataaaattgatgtcaaccaacaaactatcgaagttgcaaccaccaatggcaacaagcaaaatttaagctatgactgttttgttctggcaaccggaagtacgacttttatgccccctatatcgggtctaaaagaatatggatttagcgtaaatacattagaagatgctgaaaaactggaccaacatcttaaaaatttagccaacaaacctgcaaatgcagcccgtaatacggtagtcgttgctggtggtggtcttactgggttagaaactgtgaccgaaatgcctgaacgtttgcgtagcattttaggtgaaactgatgtccgtgtggttttggttgattcctcaacagaaattggtgccgcaatgggcgaccaagctgctactgttattcgagaggcccttaacgaactcggtgttgaaggtaaagctgggctaagagttactgcgctagatgccactggcgtaacgctttctaacggcgaaaaaattgaaacagaaaccgtgatctggtctgccggcatgcgggctaaccccctcacttctcaaattgctggtgaaaaagataatttaggccgtttgattggggatgcttatttacatgcacctgaagcaaaaaatatttttgtgactggtgatactgtaaaagttccaaccgatgatttaggcaattttaatgtgatgtcgtgtcagcatgctatgagcttaggtcgtgtggcgggttataacgctgcggcagaattggttgatttaccacttcatccatacagccaaccgaagtatgtgacgtgtgttgacttgggtccttggggtgcactttataccgaaggttgggatcgacaagttcaatttgtgcgtgaagaagcgaaaaaaattaaacaggaaattaatactgtatggatttatccaccagtggcagaccgtgaagcagtctttgcaatagcaaatcctgattttgtgattgttccttaa

SEQ ID NO: 45206 - DNA, 693 bp, Acinetobacter baumannii
atgtctaaacgtatattacacgtcgtgaccaatgtttcacgctataaagatgtcgatgaaccaacagggctgtggttaggtgagcttactcatgcttatgatgagtttgaaaaacaagggtatgtgcaagatattgtcagtccaaatggtggcaaaaccccgattgaacctaaatcgcttgcaccgctagttgctgataaatctgttaaagaccgagaaaaagatcaagcttttattacgctgttagcaaatacctttaagccctcagatattaattggcaagattatgatgtgatttattacacgggcggtcatggagtgatgtgggattttttagataaccctgaattgcaagaaatcaccaaaaatatttatgaaaaaggcggcattgtttcaagtgtatgtcatggctattgtggcttacttaatgtacgactttcaaacggcaaacgactgatagaaggcaaaaagttaactggttttgcatggagtgaagaggttttggcaggagtggcaaaaaaggtaccatacaatgctgaagagttagcgaaagaatatggcgccgattatgacaaagcctttgttccctttgcaccgcatgtcgttcaagacggtaacttaattactggacaaaacccgttttctgctaaaaagacggctttagcaataatagaagagctagaaaagtcataa

SEQ ID NO: 45207 - DNA, 417 bp, Acinetobacter baumannii
atgaatattagcgagttatcaaaactaagtggtttaagtacccctacaattcgttattacgagcaaatcaaactcttgcctaaagcaaaaagaaaatcgaatggctatcgtgaatataccgataatgatttgaaacaactttctttaattcagcaagctcagcaagttggcttttctttagcagaaattaaatcatttttaccgtcaaaggtaactacttggaaccatgacgcactcatccaaacgattgaaaccaaaattcaggaaatagagcttttagaacaaaagctaaaagtcagtaagcaaaacttacataccattattgatgcaatcaacaacaaacccgatgaaattacctgtgaagaaaatgccgaacgtctcatgaatctctattacgataaatcaaaaactccgtaa

SEQ ID NO: 45208 - DNA, 807 bp, Acinetobacter baumannii
atgtttaaagtgtggaattttcaacgttgtttaagcattatttttgccattcttttatctacaaatgcggtttatgccgcaggttcagataaagctcaaagccctgcaaaaataaatggaaaaattttagtcgtcatgactaatcactcggcttacccttctcgttcggataaaacaggactgtggttgactgaactcacccatttttatgatgttgcatcagctgctggctatgaaatggattttgtaagtcctttaggcggtcaagtgccgttagatgagcgtagtttaaagtctatttacttagacaaatccgctcgtcagcgtttagctgacccagcatttatgcagaagttgaaaacgacattggctccaaacacgattaatcctacccagtataaagctatttactatacgggtggacacggtaccatgtgggatttcccaaacaataaagctttgcaaaacattagcgaacagatctatcgccaaggtgggattgtttcagcggtctgtcatggcgtaggtggtttattacctctacaggatgacaatggtaaaccactaattgcgggtagaaaggttactggttttgcaaatattgaagaaacattatcgggtattaagtctcaagttcctttttcttcacagaatgaactcattgaacgtggggcaaactacaaacaagcatttattccgtttacctcatatgtagtttcagacaacagaattattactggacaaaacccgcagtcgagtaaagaaattgcagaagcagtcgttaagcgtttaagcagcattcaataa

SEQ ID NO: 45209 - DNA, 1068 bp, Acinetobacter baumannii
atgacaaatgcgaacgattcaaactggataatttatggagcaaatggctacacgggcgagttaatcgctcgtgaagctgtacgccaaggtctaaaaccaactttggctggtcgtaacaaagctaaggttgaagcacttgctcaagagttagggcttggttataaggcttttgggctagataacgtggatgcggtaagtgaacaactccaaggttttaaactggtcatgcactgtgcagggccattttccgcgacatcgaaacccatgatggaagcttgtataaaggccggtgctcactatctagatattacgggcgagatctcagtatttgagttggcacagtcacttaacagccaagccgaaaaagccgatgttgtgctttgtccaggtgttggttttgacgtgattccgacagattgcgttgccgctgcgctcaaagaagctctgccagatgcgacccatttggcgcttggttttgattcaaaaacagggctttcaccgggtactgcaaaaacaagtacagaaggtatggccgaaggcggcaaaattcgtaaagacggaaaaattaccactgttccattagcacattatgtccgtactatcgatttcggtgatggtaaaaaaagtgctatgagcgttccgtggggagatgtatctacagcgttttatacaacgggtattccaaacattgaagtatttgttcctgcgcctcccaaaatgatttttggtgcgaaaatgatgaactgcttccgccctgtattaaaactcaatgccgtgcaaaagtttattaaatcacgtattgaaaaaacgattgttggaccaaatgaggaactccgcgcgaaagtacccacctatgtttggggagaagcaagaaattcacgtggggaaataaaaaccgcccgcatccaaacagaaaacgcttatagccttaccgtaaatgggtcactgactgtggtgaattatttactcaacaataccgttaaaggcggtacatatacacccgcaaaactgatgggttataaactagtgactgagctgccgggttcaggtccactggttattacttaa

SEQ ID NO: 45210 - DNA, 1239 bp, Acinetobacter baumannii
atgaaagtgttcgaaaaattagtattcccaaatggctcatatgttcctaaccgtattgctaaagcagcaatggaagaaaacatggctgatttaaaccatgcaccatcagaagaattaacgcgtttatatcaagcttgggcaaatggtggcgtaggtctaatcattaccggaaatgtaatggtagaccgccgagcgatgactggaccgggcggcgtagtgcttgaagatgaaaagcatctagatacttttaaaaaatgggcacaaattgggcgctcaaaaggcgctcagatgtggcttcaaattaaccatccgggtcgccagatgcaagctaatcttggtcagcagacgtgggcaccatcagctatttcacttgatcttggcaaaatgtcaaatcgcttcaacacgccaattgaaatgactgaatctatgattgcagaggtgattcagcgttttgcaaacacggcgcgtttaggtgaaaaagcaggatttacaggtgtagaaattcatgcagcgcatggttatttattaagccagtttctttctccactgagtaataaacgccaagatcaatggggtggttctttagaaaaccgcgctcgcattttaattgagattgttaaagctgttcgtaaagtggttttgcctcagtttactgttgcagtgaaactaaattcagccgatttccaacgtggtgggtttagcgctgaagatgctcaacaagtggttaaaatgctaaatgagcatgtagtcgatttggttgaactttcaggcggtagctatgaagcacctgcaatgcaaggtcaagcatgtgatggccgtacacttgctcgtgaagcttactttttagaatttgcgcaagagattcgtaaagttgccaaaatgcctgttatggtgacaggtggcattcgccgtaaacaagtggcagagaaagtaattgaaagtggtgtagatatggtcggtattgccacagctctagcaattgaacctaatttgccaaatgcttggaaacaaggccagaatcttactcctgagttaaaaccaattacttggaagaacaaaacacttgcttcacttgccaatatggctgtggtcaaattccagttacgtaatttaagtgcaggtaaaaaaacaaaaccaaatgtttcaccagcttgggctttaattttgcaacaatcagctatgtcatgccgtactcgccaatacaaaaaaggcatgcgtgactattcatttgcttcttaa

SEQ ID NO: 45211 - DNA, 831 bp, Acinetobacter baumannii
atgggatatgtaacaacaaaagatggcatagacattttctataaagactgggggccacgcgatgcccaagttttattttttcatcacggttggcctttgagttcagatgattgggatacacaattacttttctttttaggacaaggctaccgtgtggtggctcatgacagacgcggccatgggcgttcaagtcaggtgtgggatggtcacgatatggaccattatgcagatgatgttgcagaagtggttaaacatctgaacattaaaaatgcaattcatattggacactcaaccggtggtggcgaggtagtccgctatattgcacgtcatggtcaggaaaacgttgcaaaagctgtacttgtcagtgcagtaccgccactcatggttcaaactgaaaataatcctgaaggtttaccaaaagaagtttttgatgaccttcaaaatcaagtactcacaaaccgtgcgcaatttttccgtgacctgccatctggtccattctatggttttaaccgccctgatgcgaaaccatctgaaggtatcatttcgaactggtggcgtcagggtatgacgggtagtgcaaaagcacattacgatggtattgtggcattctcacaaactgacttcaccgaagatttaaagaaaatcacggttcctgttttggtattacatggtgatgacgaccagatcgtgccgtataaaacttctggcgtaaaatctgctgagttacttcaaaatagccaactcaaaatctacccaggtttttctcacggtatgttaaccgtaaaccatgaagtgattaatgctgacttgttggcatttattcgtgaataa

SEQ ID NO: 45212 - DNA, 897 bp, Acinetobacter baumannii
atgaatataaaacaacaatttactgaggttgaatttggacaacaaaaaatcaaagtaccaaaaggtggttattatgaccgttttagaatgaatcccgatttagatgaagtcgctcaagaccctgctgctggcaatatcgactttttccgtcatattcctaaaaaattagttgaatcaagagttggacctgtttgggcacccaacttttattatcgtagcgcaaatgtacaactgctcatgcttgcacctattaaacagattaaggcaaaacttcctgctgacttaacgccattacaaccatttccgggttatgggttggtcgcagttacgttctttagctattcggtttgtgacaatgacccgtataacgaggtgtcgattgcgattgttgtacgtaaacccaaggctcgtgggcctcacatcgcagagttaatgaaatcgttgcgtcaacgccactttcatgcacatgttttagctttgcctgtagatacagaaattgctagagtccgtggtgtatatggttaccagttaccaaaatggttaactaaaattgacgtcaacattaactcaaaagaagtccaagccaatatttttgattttaatggcaaattggatttaagcttaaagacctctgtaccgactttaaaacatgttgattctgaaacacatattaataaagcaaccatgctacatatagtcgatgggaaatggcatcaaacagatgttcaatcaaatgtactttcttttgcgcaaaagctttttccaaagaaagtacaatttgtgaaaaatgaaggccctttgacaaagttgctaaatgaacttggcgcttcaaaaattctccgcttagatgttattcaagatgcccaagcagtccttaatttgcctactccgttataa

SEQ ID NO: 45213 - DNA, 915 bp, Acinetobacter baumannii
gtgggtgaacctttagtgaagcatcctttaatacaggctgtgggttttaccggttcattgcgtggcggacgggctttatgtgatatggccgcagcccgtccacaaccgattccggtgtttgcagaaatgagtagtattaacccgatgttgatgttgcctgatgccttaaaaaaccgtggagaaaaaattgcacaggacttggcagattcagtagttttaggctgtggtcagttctgtactaatccgggtttaattttaggtattaaatcagctgaatttagtcagctcattagcaacctgaccgacattatgggggctaagcctgcgcagactatgctcaatgctggcaccttaaaaagttataccgctggtcttgagcacttaaccgagcatcaaggcatcaagcatttggcaggtcaggctcaacaaggtaatcaggcgcagccacaactgtttaaagctgatgttgagcttttactggcgggtgaccagcttttacaagaagaaatctttgggccaaccacagtcatcattgaagttgaagataaagtccaactcattcaggcattacaaagcatgaatgggcaactgactgcgactttaattgccgatgaagctgacttaaccgagtttgcagatgtagttcctgtattagaagaaaaagctggtcgattacttataaatggctatccaacaggtgttgaggtgtgtgatgccatggttcatggtggaccatacccagccacttcagatgcacgaggtacttcagttggaaccttggccattgaccgttacttgcgccctgtgtgttaccagaactatccgcaaagcttattgccggaagccttaaaagacagcaacccgttgcagattttaagattggtgaatggtgagatgaccagagaagcgatctaa

SEQ ID NO: 45214 - DNA, 684 bp, Acinetobacter baumannii
gtgttgaaacgaagtattttaatactttttttgactggaaacattatcggtctatcatatgctcaagcagcagaactagagactgtaaaacttaaaaaaagttgtattaagaagaaccctctagcagaaggccaaaatgaccctgagctattgaatatttttaaacaagtttgtgatagtgataatacaactcaaaaaaatgatttattagctaaagctgctatgcggttttatcaaaccaatcaacctgttaaagcattgaatttagcaagtcaattgcaaagtcaaaatatacgcggttcattaatcacagatgtcttatttttatctggtgtgagcattgcaaataattcattacaacaaatgcgtaatcaggaaatgcgatatttaacgaatgatataacatatcctcctgcaaagcagttagttgaaaatattcatactgcaatgccggctcctgatccatcgagtttcaaaactaacaactcggaaagcagttcaactgataatgaaaaaagaagttataaaaaacagtacgcaacgcgtaataaagtgagtgcttctagaacgtcaaataaacgagtagtaagtccagcaaaggccaccgcagtaaaacctaaaactgcacctgcagccactgtcaataaatcaaaaagttcgccttttgaccctttaattaaataa

SEQ ID NO: 45215 - DNA, 504 bp, Acinetobacter baumannii
atggctaagagagaaagcgtacaaaagaagcttcagcgaattcgacctccacgtgttcagcttacatatgatgtcgaaattggtgacgcgaaagaagcgaaagaactaccattcgttgtaggtgtaatgggtgatttttcagctgcatctgagcttgagcgtacaaaattaaaagataaaaaattcattaatgtcgatttagataatattgatgaagtaattgaatctctgtctccaagagctgcttttcaagtagacaatacgttgacagaagaaggcggtaaaatggctgttgatttaacgtttaagtcaatggaagattttcgcccggaaaatgttgtacagcaagttgatccattaaagaaattggttgaggcgcgtgagcgtttaaccgatttaagaaacaaaatttcaaacagtgagcgtttagaagatctgcttgatgaggttcttaaaaatactgatcaaatccgtaaattaagtgcggaggccgatcatgaataa

SEQ ID NO: 45216 - DNA, 1482 bp, Acinetobacter baumannii
atgaataatactcaatcagcagcaatgccacttgttgaaaatgaagaagttaatcttttagattcgattgttgaacaaagccgtattgcacgaaatgaagaagaacattctcgtgctaaaagcttaattggtgagcttgctaaagaagtaatggcagggaccattactgtttctgaaaatatgactttatcaattgataagcgtattgcagaaattgatgctctgatttcaaagcagttaagtcagatcatgcacaatgaacaattccaaaaaattgagtcaacttggcgtggtctttattacttttgtcaggaaacgccttcaaatccgctcattaaaattcgtatgctcaatacgactaagaaagagttggtaaaagatttccaaggtgctacagactttgatcaaagcactttgtttaagaaaatctacgaagaagaatacggttcttttggtggtgcgccatactcagcattaattggtgattttgagtttgaccgtactccatctgatatgtatttgcttgagcaaatctctcatgttgcagcggcagcacatgcaccctttatttcagctgctagtccgagcattttaggccttgaatcatttacagatattgatcgtcctagagatgtttcaaaaatctttgaaaccgctgaatatgttcaatggcgttcgttccgtgatagtgaagactcacgttatgttgcattgactttgcctcatgtcttgggtcgtctcccatatcatccaaaagaaggtactgcgacagaaggctttaattttattgaagatgtttctggtgaaaaccataatgaatatttgtggatgaatgcagcttatgcttttggtactcgcttaacaaatgcatttgatatgcatggttggtgtgctgctattcgtggtgttgaaggcggtggtttagttgaaggcttgccagtacatacttttaaaacacaagatggcgaagtggtattcaagtgtccaactgaaattgcaatcacggatcgccgtgaaaaagagttaagcgatctaggcttcattccgttagtacattgtaaaaatacagattacgcagctttctttggcgcgcaatcaactcaaaaacctaaaaaatatgacaatgatacagccaatgcaaactcggctttatcaagtcagattcagtacatcatggctgtttcacgtattgcacattacttaaaagcaatgatgcgagataaagtgggtagctttgcttctgctggaaatgttgaagcattcttaaatgagtggttgtcacagtatgtcctacttgacgatggtgcttctcaagaagcaaaagctcaatacccgttacgtgaagcatctgtaaaagttgtagaagatcctgctcaaccaggtcactacaaatctgtggttttcttgcgaccacatttccagctggatgagttgtcggtttctttacgacttgtcactgagttacctcagtcctcaaattaa

SEQ ID NO: 45217 - DNA, 504 bp, Acinetobacter baumannii
atgaaagatatatacgttgagtttcgcggtaaatataaagttgatggagaatctcgtgattctgagcacaaaggttggttagaagttaactcttggtctcataacatccgtcaacctaaatctgctacttcaagtagtgtaggcggccacactgctgaacgtgttgaacattctgacatggttttcgtgaaagacttagacgcaactagccctaaattatgggaagcttgttcagctggttatacatttgatgaagtacaaatcgacttctatcgtgcaaatggcgataaacgtatcaagtacttacaaatcaaattgaagcacgttctagtttctagtgtaactccaactgttaacgaagaaggcgttcctacagaagcattcggtttgaaatatgctgctgttgagtggacttataaccaacaagatattaacggtactgctaaaggtgctgttactaagaaatggtcactttctaataatacagcttcttacgcagcgtaa

SEQ ID NO: 45218 - DNA, 477 bp, Acinetobacter baumannii
atgaacttagatcggctttatccatacggatttcgttcaactttatttgatcgcttaattccagaaagtgaagattatgcaaaaggtctttctattcagcaattaagagaatctgtagcaaaggatttagaagatttgctcaatagtcgggtagcaaagttagatcatgtgattgatgactatccacttgtaaaaaaatcgatacttcagttcgggattattgattttgtggggctttctacagccaaccctctggatcgggataaaatttgccaatccattgagcaatcaatagcagctcatgaacctcggctaagacaaatacgggtagagatgttattagatggacataatatgggcgcattatgtttaagtattcaggcttatctaaatattcaccccttatatgaacctgttgtatttgatgcattgttaaaaccaacaacgcagcaatatgtaatttcagcaagaacttaa

SEQ ID NO: 45219 - DNA, 1812 bp, Acinetobacter baumannii
gtgatagaagagcttttaccgttttatgaaaaacaattacaagaatttggtcaacaatctcgggaatttgcccaaaaatatccaaaaattgctcagcgcttatctttaaatcaagagcaaattgatgacccacatattgaacgtctgattcaggctttttcgctgattgctgctcgaatcgataaaaaactaacagacagttacgatgtttttactcgttctttatttgaggtgatgttccctcaatacttacgacattttcctgcgtgttcagttgttagctttgaagatattaataagattaaacagcttacagaacctcatcttgtacctcatcatacggttttgaaatctcgtagtttcaagggagtacagtgtgagtttaatacaactcaagatgttagattactgcctattcatttaagtggtttagattttaaaactacacctagtgcacatatgcacttaaatcaaaatgcgacgttgagccttaaatttgaaatttttaataatgctcatgcttgtttaactgatgagaagcttcctatttatttggatgctatctctaattttcctctacaggtccttgatagtattttcaaaaaaggaaccagttttgcgattaaatatggacaaataattgtagaattgagcaagaatccattcgaattgactggttttgcagaacaagaaagtttattaccgcttgatcaacatacccatcatgcttatcgtttgttgatggaatacttttgtttcccggaaaagtttagttatcttaagcttgatttagattttttaaagcgaatacctcagcatgtatccgaatttgagcttttaattcatttcaaattaaacttaaatgatcaagccgttgttagaaattattctgagctaaatattgcaaactttaaattatttactaccccagtaattaatttatttgaaaaatatgctgaacctcagaagatagttcacaagcaattagaatatcctttagttacagatgcacatcatcctgagttttatcaggtatattcaatacttgagatgaatatggtgcgtgaaaaaacaaatcaggaagaaagctatgttcctgttttgcctttttttgcgatgagccattaccacaatgatacagctcgctttttttactcagtaaactatcaaaagttacagtccaatttcgttgaaatgggctattcgattatttctaaaaatttaaatccattttcaacgcgctcagattttattagtaccaaattattatgttcaaaccgtgatttacctcatgaagcactgggtcagtctaataacgtattaaatttaaatgatagtagcttggcgagacgtgccattgttttaaaacgacctacaaagccttataagtttgaacaaggccaaagtgaacagtggcgtgtgatctcgcatctttcattaaatagcttagcacttatgaaaggggatgctgtttctcatgttaaagagctgctggctttatataacttaccgcagtcaaaagaaaattatttaattatagaatcaattaaaaaattagaattttcgcttacccataaacttgtagatggcaaaccatttccaatgtttgtaagaggagtgaaagctgaattacaaattgactcatcagtatttagagggcatagcttatatatttttagtcagttattaagtcgtgtttttaatttaaaggttcaaattaatagttttgttgatttggtggttaaggattattcatctcagcaggagttataccaatgcagtcagaacgttggtggcaagactcttctgtaa

SEQ ID NO: 45220 - DNA, 999 bp, Acinetobacter baumannii
atgcagtcagaacgttggtggcaagactcttctgtaacggctgagttgtttcaacgccctaagtcttttgagtttattcaagcaacacgtttattgcgtcatatgcctgccattgacgcagctttgtcatggtctgactattttaaatttgagacctcatttaacttaaactttccagccactgaaattgaaagtttagagttagtagatgagcgtgttcatttaacaaacctgatcgttggtctgactggtatacaaggtgcattaccttatacatatacaaataaaattaagcaggctccaaggcaacaacgcgctgaaacgaaagagtttttaagcttatttaatcataagttgaccagtcagtatgtagagtcaagtattacttatcacttgcctgtacgctatgaaattgaaaataaaaatgattatttggatattctccatgcattgaatggctatgttcgctcacaacatcagcaacaagacttggatgaatatttcgctgaattttcaggcctaatgcagggacaaaataatacggttcatgctttaaagacgatgttgagttgtatttttaagcatgaaattacaattaaagagtttgtacaggaatcgtttaagttagcaagtgatcagctaaccactttaggtggaagtcaaccgagcttacttggtattaacacattttgtggggaaacgattcaacaaattgatggaaaaattgagattcaaataggtccgcttaagcgtcagcaatatttaaaatttttacctcatcaagagcttagcttaaagctcaaaaaaatcgtagaaacttggtgcagtccaactttatcgatagatttaagattgatattggatgagactgaaatacaacctgttcgcttaactcaaggccaagaaagtggtctagggcaaggcgcttttttaatgtctcgtaagcctaatacacataacgatgaaacatgttatagccttattggagagcaaatatga

SEQ ID NO: 45221 - DNA, 1413 bp, Acinetobacter baumannii
atgattaaaaaaatattactctcattcatcgctatttttacagttgttagtggatttatcattttctactggcgtgatgttcaatataatccaaataaaagcgactttttcctttattttttattattgccagcaatcattactttggtgatcttgtcaccttggttaatttatagtgtttataaaagctacaaagaaaagaaagagcaggcagcaaatcaaagtcaagaggatgatagccaaaaaccatatgctgcaattgaacaacctctagaacagctggattttaatgtatattccgcttttgccatacatgccttaggcgagaatgaaactattattgaagaaatacaaaattttaaaagccccgagcttgatgagcaattgttgaattcgtatggattgcctcttttatcttatcgaattaaagatctagttgagaaaaatgatgaggatattcaatacgctgcttcaccaaggcaagttcgtatcatgtctttaatcagacaacaactagaacaaaatatagagaatttgtatcgtttggctgaacatttaaagcgctcaattttattttatgaatctcatcagatccgtgaatatcatatgcatcctgcatgggtcgatccaaatagcgaatatgaagatgtggaaacaccagtagttgaagtacaccgtttaaatcgactgaatttgcatatttttcttccagaagatttattacatgtttggaatgatgagcaaagtaatgatctgattttagagttttttactgagattggcattatttcccaaaaagttcatatcgaatatcactttttgggtgagcgtgtagcttatcaagaatttattcatttattaaaacgcattcaaaagaaagagcatgaggtatttctcatgctggctgttgattcagagattgatcaagatcttattgatgaaaaatcatggatggtcaaagattatattccggctgaatttgctgcaagctgcctccttgcggacccatcattaaaaatcgaagaactcgaaccagctaaaaacttaaaaattgtggtgggccaagaaaaagcagccaaagttcttcatacgctgaacttaaatgaattacagcagtatgagggagatgagccatatgtacttattctttcagaccagacagatataaaagcagcgaagcaattacagcagcagtttgcacaaacatctgttgaaccacatcactatatttatgtgaaatcttcattggggcatacccagcatttagttgatatttatggctttatgctcagtatgcattttcctgaacatatcgttccttttgtctttggagaaaatacagtgtcagcacatacatttgtgcagagtgtcactgaaaattcagaagatgatgcgatggtgttgaatagctaa

SEQ ID NO: 45222 - DNA, 3825 bp, Acinetobacter baumannii
atgcatacaattttaggctacttgtggcagtacatcacgaatcctaaagcaattatcgccttgtcattgttcgtggcattgatgtcttcctatacttcaattcctcgccatatattttgggctttagcatctgcatatgctttagggctcatcgcttatggaatttattggataattcagcgtaaaaagcatgctgtccaaggtgaagaacttgcgcaagcgattgaaaaggatacacaagcagagtacggcaaaaataaagataaagaagagctgcaacttattagccaacaaatgaaagaatctattcaattgattcgtaagtcaaagctaggcgataaaaaggggaacgcagcactatatgagttgccatggtatatggtcattggtaacccggctgctggtaaaagttctgcgatctataattctggtttaaagtttccttttgaagaaacccatcaaaaaatggtttcggctggtttaagcggtacgcgtaattgtgactggtttttttcgactgagggtattttactcgacactgctggacgttattcggtctatagtgaagatcactctgaatggttaggctttttaaatatcttaaagaagaaccgttctaaggcaccagtaaatggtttaattcttattgttagtattgctgagcttgttagtcagagtcctgaacactcattaaagcttgcgaaaaatttacgcgctcgtattcaggatttaaccgaacgtttagaagtagttgtacctgtatatctagtcttttcaaaaatggatttgattgcgggttttaccgaatttttcgaattctatgaagcacaagaatataatcaggcgtggggcgcaacactaccatatgagcaaaactcttctcataatgctgtagatctttttgagaaacactacaatattctttatgacggtttaaaaggggtcagttcaactcatcttagccgtcgacattctcaaaatatctcacctagtgtgatgactttcccattagaatttaagacattaaaacctgcattaaaaagttttattgcgacactgtttgaagataacccttaccagttccaaccagttttccgtgggttttatttcacaagtgctttgcaagaaggcgtaatagaaagtccaatgactgagcaaattgcacaggaattccagctttcccaaattgctcaaagtgaagtaaaagatcagctaaaaacaacgcctaaccatggttatttcttaaaaggcttgttttcagatgtcattttaaaagataaagatctggttaaacagcatgtcaatacaagcaaaaagcgtcagcgttatattgcatttattggtgctttagctggggtatccattattctgggtgtgtgggtttggtcatatcgtaacaatcaacaacttattgccgaagttcaagctgatttgaataaagttgttcaattggaaaagagttcaggtcaacaattgtcgactcaattagaggccttacttatcttgcaaagacgtctacaacagttagacgaatttgatgaaaatagaccactaaaatttagttttggtttatatcaaggtaatgagctacgtgaaaaattaaaagctgaatatttaaaaggtgttaagcaaattgttttgatacctacacagcaaaatattgctcagtatttgcaacgtgtaaaaaataacgaagcaactttaaaagcaaatcataccaatgttgagatcaagcaaactgctcaaactcagcaatatttggagccttcggataccaaccctcaagatgcttataatgctttaaaagcatatttaatgatgagcaatccacagtatatggatgcgagtcacttaagtgatcaggtaacgcgtttctggcgttcttggcttgatgccaataaagggcagatgccacgtgcagatatgattcaagaagctgagcagatcttatcttacgcaatgacattggcaaatgataaacaattcccgatcttggatgctgactctcaactcgtagatcagacacgtcaagtattgctctctgttatcagaggtatgccagcgcgtgaccgtgtttataacgaaattaaaatgcgtgctgctgtgcgcttcccagctttaactgtgagccagattgttggtgacgcaaataaaaatattgtattgggtagttatgcattaccaggggtatttactcaaaaagcttggaacgagtatgtagaaaaagcaattgaggaagcagcagacaaacctacggatactaaagactgggtgcttaatagccgtcaatctgatgatttaactttctctggtagtccagagcaaattagaaagcagcttactgcattgtataaacaagaatatattgcagagtggagaaaattcttaagtggtattcactatgcaaaagcgactcagtttgctcagcaagttaaaaatattgatgtattgggcgaaccacaaaattcaccaattcgcacgcttattgaacgcgtagccattgaaacaaactgggataatccggttgttcaagcagagttagcagcgcctcaaaaaggatttattgcatggtttaaacgtaaggttctaaaccatgatgataaacaattagcaaatcaggctgtaacgaatgctcaagggcctatttctcaagaatatcaaatgttctatcaattggttcgtaaacgtgatgatcagcaaggtaaatctttgcttgatgaatatatgacgaatcttgccttagtacgtagtaagtttaatgaacttaagaatgcgggtgagatcggaccgaatgcgatgacattggttaagcaaactttaaatgagcagacatcggtatttaaccagactcaaaaaattgtagatgaaaagatggcggttggtttcagtgaaattgatcagcaacttctacaaaaattagtggtgagtccacttacccaagcctttgaaagcttaattacacctactcaagatgaaattaataagctatgggtaatgcaagcctatcaaccatttactgcaaatcttgctaagaaatatccatttaactcaccagcttctttacaagcaacaagtagtgaaattggacaaattcttggtgaaaacggcagtatttcccgttttgttaaagagagtttagatccgtttgttatccgccgtggttatactttaacttcaaaaacatggaaagatttggggattagtttaaacccacaatttgtcatgaacttccaacgttatgtcgcacctacaaatggaatggcaacaggtgagttaaatagccaagcaccagctgctccggcaaccaatcagtctaacttccagttctacccaattcaaaacccgcagttactttcatataccgttgatattgatggtcagcgtatgacttatgaaaatggggtgcagcaatgggttaactttatttggccaaatcaaggcagtattccaggtgctcgtattacggctgtagatttacaaggtcaaacacatactatttttgatgaaccaggcgaatacgggattaaccgtttaatcgatagtgcacagcgtaaagagcaaaacggtggttttgaaatgctttggcgcagtaagacagatccatcactctttgtgaaaatgaacttccgtcttattagtagtaattcaggaagtatcggttcaagccgtggctactctggtatgcaactggttgacaaagtaactgcggataaagctgctcgcgttgtatccgcacagcaagcaccagctcaggctgctgctcctgccaaaactgaaaatccagtttctgcactagcacaacctgctgcgggagttaagccatga

SEQ ID NO: 45223 - DNA, 996 bp, Acinetobacter baumannii
atggaaactaacctctacattcaaggaggagcattgatgcatacattaaaaacaactcctctgtattacgggaaaagccctgcgcgtggtgatttcttaaagacaaaaggtcaatatgccttaatacaggtacttgatcagtggataacagaagcattggaatatgcaatgcagtcaaatatgttcaaagaggcatatagtaatttgccttcattggatttctttattgcaaatccacaagagaacatgttcttggctgctaatttgttggcgagcgaagacagttcaggccgagcttttccgatggtactcagtcatttacttgagattgatttgccatatgaaaatttactatatgcaccttatagctataagcatgtcttaattgatttatttcaaaataatcgtgcattaagagggattaaagattctgatttattatttggtaagctaaatcatttaccaaatcagattcaggttttatctgaacgtgaatgtgtaggtttttatgaaaatcataccatgcattcatttgctcagttaatgaagctaagtatttatgagttagctcaaagcatgattggtttaggattactactacaaccaattttacaaaatgggactagccgtttaaataaagtcttgattctaccgattaataatcctgcttattgttatgaaatagcggcattctgggtcagtattatttgtcggtttttaaaacagcataataccgaagtattaattgggttgttacatcgggagcagccagtattattctttggttttcagggtgctgatattttagctcttagtgatatttttactcagaatatggatagcaaacattgggtttctttaatacaagctcaatggattgatacttatttggaacagaatgctggtttagcaacgctagaacaatctttatgtcaacgccaattaagtttaaatcaaggtttaaaactatttagacagacttttttgggtgaataa

SEQ ID NO: 45224 - DNA, 768 bp, Acinetobacter baumannii
atgaatcaaaaatatcaaattaaactttcacaacttataaaaggctgttttatatatgcaattgcgaattatgctttagcacagcctatagttgtagaaggtgtagtgccaaatgaagcaagtaaacaggctattttaatgaaaatgcagtctgtttatggtgcagatcaagttgtcgataaaatacaagttcgaccagttgccgctccaaatggatggagtgactctgtcacacgagtgattacacctgatcttaaaaaagtttctcagggtaagttaagtgttaatggaacccgatttgaactgaccgggaaaatgctaaatccgacagaaatacagccaaccattcagtcttttcagagtttggtacagcctccatatcaattattttcccagctttctgtaaatcaggctgagcagaagattattgatgatgctttaaaaaatcgaattattgaatttgaatctggtagtgcagtattaactgaagctgggcaaaaaattcttgatgaaatggctgttgctttaaataaagtgggcgggaaaaaagtcaaaattgtggggcataccgatagttctggtgatgcgaccaaaaacttaaaactcagccaagatcgagctttagcagttaaaaattatttaattagtaagaatattcctgctgatcatttatctaccgaaggtttaggttcatctaagcctgtagcggacaatacttctgcggaaggtagaaagaaaaaccgccgaattgagttcaccgttttatag

SEQ ID NO: 45225 - DNA, 264 bp, Acinetobacter baumannii
atggctagcccttacattacgattggatgcccaacgacaggtggagggcaagtcatttctggtaatagcgcatttttaattgatggaatcgcaattgcatgtgtaggtgataaagcaacttgtccggcgcataaaacggtttctacgattgtttccggtgacccaaatatgcaagtgatgggaaaagcagctgcaagagtaaatgattcattatcgtgtggctgtaaattattaccgaaacaaagtttggttaatcaagggtag

SEQ ID NO: 45226 - DNA, 2679 bp, Acinetobacter baumannii
atgagtagtttaaaaattttaattacaaaactttctacagctgcacgcactgctttagaaaaatctgctaatgcttgtgttcttcagcaaaactacgaaattgaaattgaacatttatttttagagttacttaatcagcctttagaaaatgatttaaaaattttattaaaaaaatataaaatctcagccgatgctttagcagatgatttaaaagaaacaatttctcaattaccaaaaggtaatacacgtactccaatttttgctaaatcaattgttcgtttatttgaacaagcttggttattggcttcagcagaacaaaatcctgtcattcgtagtggtcatttactggttgcattattaactgcacctgacctctatcaaattgcaacgagagcttcgagtttatttgatcttttcccgatagactcaatgaaacataagtttcttgaaatttgtgaaaaaagtgtagaacaacaagaagaatcaaaaacatcttcacaagcagatgaattagaacaagccgcgactccaactgcaaaaactcaaaaaacacctgctttagatcaatatacaattaatttaactgaaaaagcgaagaatggcggaattgaccctgttattgggcgtgaatatgaaattcgtttgatgctcgatattttaatgcgtagacgtcagaacaacccaattttaactggtgagccaggtgtaggtaaaacagctgtagttgaagggttggctttaaaaattgctcaaggtttagttcctgaagcattaaaaaatgttcatttgcacgttttagatatggggcttttgcaagctggggcaagtgttaaaggtgaatttgaaaaccgtttaaagcaagttattcaagaagtccaatcatcggctcatcctattattttatttattgatgaagcgcatacgcttattggagcaggtggccaagcggggcaaaacgatgctgccaatcttttaaaacctgcacttgctcgtggcgagttacgtactattgctgcaacaacatgggcagaatataaacagtattttgagaaagatgctgcattgagccgccgttttcaggtggtaaaggttgaagaaccgaccgaagaagttgctgtagatatgttacgtgcaatgattcccgtaatgcaaaagcactttaatttacaaattgatgatgaagcaattgtaacggctgtacatgcctctcaccgctatattagtggtcgtcaactcccagacaaagcactaagtgttcttgatactgcggcagcgcgtgtagctttgacccaaaatgcacagccagtcaaacttgatcaattgaaagcacaagaacataacttaaagcttgagcaacaaattttggaaaatgaacaccgtcagattccaatacatcatgaacgattagaaaatctgaaaagccaactagagtcattacaaagtgagatccaagagactcaggaacaatggcaaaaagaattagagctagttcgtaaaattcaggaattagaagcgcagagccattctaatgagtctgaagcctacgatcagattaatttaatacgcaaagaccttgctgatattcagggacaacagccattagtttttgagcgagtaaactctcagatcatcaatgaaattatttctgattggacaggtattcctgttgggaaaatggtcaatgatgaaattaagcagattttaacgcttgaagataaattgggtgagcgtgtaatggggcaagattatgcacttacacaattagttcaagggattaaaacttcaaaagctaaattagaagatccaaataaacctcaaggggtgttccttttagttggacctagtggggttggtaaaactgaaactgctttagccttggctaatgagttatatggcggtgaacagcatttaatcacgattaatatgtctgagtatcaagaagcacatactgtctcttcgcttaaaggtgctcctccaggctatgttggctatggtcagggtggggttttaactgaagctgtacgccgtaatccttatagtgttgtgttactcgacgaaattgaaaaagcacatagcgatgttcaggagttattctatcaagtatttgataaaggcactttagaggatggtgaagggcgcgttattgattttaaaaacacgacaatcttattaacttcaaatacaggctcgagtgcaattatgcaggcatgtttaaatcagcctgtagaagaatggcctaccgcagaagatttaatcgaacatttaaagccgagtttatataaacagtttaagccagcctttttagggcgtatgagagttgtgccatatttcccattgcatgatgatttattggttcgaattattaaacataaattgggcaaaattactgctcgaattgaaaaacaatatggaacggaagttcaatattcagatgacttggttgagttgctactcagccgttgtactgaagtggatagtggcgcccgtaatgttgataacatcttaaattctacagttttacctgctttggcaactgaaattttagtggcgttggcagatcaaaaattgccgaaattgatcatgattgatgcaaaagatgacgagatccaatatttactagatcctgtggcgaagcctgctaaaaaacggactagtaaaaagttgaaatcagaagtttaa

SEQ ID NO: 45227 - DNA, 1095 bp, Acinetobacter baumannii
atgagtattgatatttctgaactacttaaacccattaatgacagcttactttgtggtgaggattattcattttctaatgaatttcacgagataaagaaagccagaacacaggatgatctattattagatcagggggattgggttgctgaacggaagcaggcagattgggactttgttgcgaagagtgtaagcactttgctcattgaaaaaaccaaagatatccgtctattaacttgggtaatagaagcctggactcatctaaatggttttgaaggcatggtaaagggaatcactttaactcataccatgctgaaccaatattggcaggatattcatccgattattgaagatgatgatttggatcagcgtattggtttattacaaggacttattaatcagttgccaatgctgttgaagaaagtacctttaactaacacagctccttattataacttgcttgattacgataattttctatatcacgaaaatatacgccgtaagcaaacagaagagtacgagagtcagtcaggtccatctgaattagaacaatttgatcaagcgatctttaatacctctaaaacctttcaatactcaaattatcaagagtttacttcggttttaacggagtggaatgttttaaaacagacactcgaccatttaatgggattagattcaccgagttttgctgcaattgattctgcatttgagacaatacacagcactttacgtaaaatttacaaagcagaggcttttggtactgggcttgcgccgagtcaagaacaggccgctgtcatcacgacaccgtctatggaaaaacaagtgcctgtacaaatcgtatcagaccagcctatgtttcagccacaagcacaaactcacttggccaatcgcgagcaagcaatgaaagtgctgcaagaaatagctgattattttcaagcaaatgagccacatagtcctgtgagctatatgctccaaaagaccattaaatggagccaaatgccgctgcatgaatggttagcacaagtgattaaagatgagcatccattgcaaatggttcaggaaatgttaggtgttcaacctaaaaatgaatatgaataa

SEQ ID NO: 45228 - DNA, 1365 bp, Acinetobacter baumannii
atgtttaaagctgaaaaagtcctgtggggcgaaggtttatttttaagacctcaacatttccagattcaagatacctatcatgaacaacgtttaaatcatacggttcgtgctgttgtgccattttcctatggcgttcaaaaacttagttttgatgaagcacagttaagtacgcatattcttgcacttgaatcagtagaaatgatttggcaagacggtgaaatatatcaagcgcctgcttatgacttattacctgaacctattttgcttgatgagcttaatttacgtggtgaaatggtcatctatttggcattaccattattacaagccaataaacaaaatttaatcgatcaaaatcaatcacaaaaggggcgctatcaatcacatttggttgagacccatgatctgttcacaaacgcgacagaggctgatatcagcttattacgtcgtcgagctgtgtttaaattattagatgcacatagtaatcctgatcataatttagatggtttcctgtatttgccaataggcaaaattaaacgtcagagttcaggtgcttttgaaattgaccgcaaatttattccgcccattttgcatgtcgatgcatctgagaccttggtttcaaatttaaaaagaaccttgaatgttattaaggcaaaaattaaaacgattcaaaccaataaccgagaaaatgagcagaaattaattgaattccgttcaggtgatatcgtttcgttttggttggtaaatgctttaaatactgctcatgctggtctgagccatttcttgcaatatccgcaaattcatccggaacgcttattctttgaattgctacgtttggcaggttcattattaactttctcgacagcttatgaagttgatcagttgcctgcatataaacatcataatttgcaagagagcttcacccagctcgacacaattttacgtgatttactcgatacgattatttcgagtcgttacatcagtattgcccttaaagaaattcgcccttcatattgggtgggaagtctcgaaaccgataagattactcgagataccagactttatattgctgtatcaagtagcgtgatgcagacccatgagttgattcaaatcgttcctctacgttttaaaatcggtagtactttagatgttgaacaacgtgttgttgcagcattaccagcaattccattacaccacttaatccaagttccgactgctattccagtacgttcgggtgtgagctattttgaaatcgaaccgcatcatgaactctatcaacgtatgttggattcagaaacgatttgtatttatgttccggctggattccaagatatcagtattgagctgattgcggtcatgaacgcttaa

SEQ ID NO: 45229 - DNA, 807 bp, Acinetobacter baumannii
atgtcacaatctacaggtgctccttctttatttgacgatgggcaaattgggacaggggggaataataatagccagtcccaagtaaagttacaggcaattaatctgattgatttattgcatgatggtttttacttaatctttttaattcgaaatcagtatgtgccagctgatccacagcgctttcgtgaaaaaattctagatttgcttaatcgatttgagcaacaagcgaaaaagttacaattttcagctgatgatattcatgatgctaaatatgcgttttgtgcgctaattgatgaaacgatcgtaacccagcaagacccaagctattttaatttacaaaattcttggttaattagcccattacagttaagtctgtttggttctcagttagcgggttatcaattcttcgaaattttagagcaactacgtagtcgtggaaaagagcgattagctgctcttgaagtcttccattactgcttattattaggttttcagggtaaataccgaattgagtcaattgaaagccttaaccatttggtggcacgagtaggcgatgaaattgattatctgaaagggaaaaaagtggctttttcgccattctcggcaattcctgatcagatacgaaatattatccatcgtgagctaccttttttctggattttgattttcttattgatttttgcattacttacctttgcaggtttaagatttatgcttaataatcaaaatgataaagcattatctaattatcaaaatgtgatttctgccccacaagagcaggcacatattactatttacttaccttga

SEQ ID NO: 45230 - DNA, 603 bp, Acinetobacter baumannii
atggctcaggaaaaaccaacttctattcgagttttgcaatcgaataaaaaaaagtcgagatcaccagtaatctatatcatcattggtattattgcaggcgtttttgtaagtatctcgctgttcctgttcttgtctcaaccgtattcgtcagatcctacaagtgttgagagcaagtcgaatcaagatcaggagcttgaccaagtcttgatgactaattcttctgcacatgaccaagcagtaagtgatcagcaagagcaaactgatccgatgagccatgatggttttgagcaacctaaagagaatgagttaagtaacatttttaagcctgctcctcataaagaggccgcacctaacccacaacgtgtttcaccttttgatgcacagttaacaggtgaacaggttgtacctaagcaacaggctgtagctaaacctgtacagccaaaactacaggtagttcagcaaaaaccggctacccagacgaaagtggttcaagccaaacccgctgaggtaaataaagctccggttgaacaagaggctgatgtggaaccacctaaagcttcggttgatattaagattacacgaagtccatttgctgtgaattag

SEQ ID NO: 45231 - DNA, 954 bp, Acinetobacter baumannii
atgatgatttttctaattttcttttgttttgcttgtcttgctatagggctagcatttttgatgttttatgagttaagaaataagggtagaacatttgttctatctttattacctcaggggcgtcggcagctaaaccaagttagacaatttgctcaaacaatgaatcaggctgcggctcctgaaaaactacaatcacattggcatttacagcaatggtggattgtaattgcaggattttttttatttgccagtattttaatttttgcttttactcgcccaatcagttcaacacgaattgaagccgagtatcttaaaaaaactgatccgcaaatttatgcattattaaatggagaaatattatcgcccccacctgaagtagatgaaagcctgattgaagctgcaattgttgaagcaactcagttagagcagcaatatgcttctcaagaaagtggtgttataaattcttcaccaattgataatactagttttgatggccgtgcgattttagatacgagtttagtcaaccgtaagtgggataaaatgaacccacgctataagcagcgtttgcttatggtctttaaaattatgaaagaacaatatggttatgaacttgttttgcttgaaggttatcgtagtccagcacgtcaaaatatgttggcgggcaatccgaatacaaccagagcaaaagggtatcaaagttatcatcaatttggtttagcggcagatgtggcctttaagcgaaacggtaaagttgttatttctgaacgtgacccatgggctatgcagggttaccgcctatatgggcaagttgctgagtccgtcgggcttacttggggtggtcgctggaaatctatacaagattatggccatacagaatatagaatgccaggcttgaagaaaactcaagaaatggcggaaaagttaattgctgaaagcttaaatgacataagctaa

SEQ ID NO: 45232 - DNA, 852 bp, Acinetobacter baumannii
atgtttgaccctcgtcttcttcgtgcatttgtgaccatttttgaaagtggtagttttacagccgccgctgataagttgcatctgacacaatcaactattagtcagcagttagcacgcctcgaagaatcggttggtcactcccttattgatcgcacagcaagaccattacaattaacagcttcaggtgaatatttaattggttatgctcaaagaattttgacgcttcaacaagaggctgaggcggtcttaaaagatccagctggcagcatccctattcgaattggattgccagaagatatgatgagtactgctatggcagaagttttcggtctatttgctcaagaacatcgtactattcggttagatgtcacttcaggcttaagccgtaacctgacagagcgctatcgtaatggtgagctagatattgttattgtgaaagaatcagcggccagcgccgattgttatgcctcttttcctgaagaaatggcatggtttgaaagtaaaaatgcgattacgcctttgtctgaaccaattcgtttagtgacctttcctcaaggtggactttaccgagatgaaatgtttgaaacattagaacgtgaacggcgacgttggtatattgcttttacaggcagtagtttagaaagtgttctagtaagtgtcgaaacaggtttgggaatatctttactgccagtaagtacaacagaaggccgtcgtgtacgtagatataaatctttaggtgaagcttcacctatggttgtttcaatttatacatgggaaaaagctgggttgatttcccagcttgtcgatcacatggctaccgttttacatgatcgcttccaatcaggctcctag

SEQ ID NO: 45233 - DNA, 669 bp, Acinetobacter baumannii
atgcgtaagtccctcatatggatcaatctgatcattgcgatgggtgctttgggttttacaaatgtggtaaatgcaaaggatgaataccctttacacatggcagctgcaaatgacgatattcagttaataaaacatattttgtctcaaaagaccttaattgatgcacgtgatgaaacaggttcaacagcattaatggtggcaacaagagcaaacaatatacatgctgctcatatgttgattgaggccggcgcagatgtaaatgctaaagataatatacaagatagtccttatttgtatgcaggcgcacaaggttatttaaaaattttacgaatgacactcatgcatggtgccgatttaaagagtactaacagttatgggggaaccgcgcttattccagcagcagaacggggccatgtagaaactgtccgtactttaattgctgcaggtgtaaacgtaaatcatgtcaataatttaggttggacagctttactagaagcaatcattttaggtaatggcaaatccaattatcagcaaattgtggcacttttgctaaaagctggtgccaatccgaatttggcagataaagatgggatcacaccattacaacatgcacgtacaagaggatatcgtgaaattgaaaaacttctgcttgtagctggtgcaaagtag

SEQ ID NO: 45234 - DNA, 483 bp, Acinetobacter baumannii
atgaaagcaaatcaggaatttttacgtcaagccattgagcttgcttataacaatatagaaaaaggtggccgaccatttggcgcagtaattgtaaaagatggcaaagtaattgcttcaggtgttaatcaaattttgacaaccaatgatccgacagcacatgctgaactattggcgattcgggcagccagccaagttctaggaaccgcgaatttagaaggctgttcggtatttgcaagcgggcatccatgtcctatgtgtatggctgcaatgcgtttagcgggtataaaaacagttaactatgcttattctaatgaagatggcgcaccgtttggtttatctacagctgaaatatatgccgatcttgtaaaaccatttgctgaacagtccatgaaaatcgaatatgtgcctgttcgatttgaagaccgtaccgatctttatgtgttttggaaaaattatcaagctaagcaatcgggcctaaagtaa

SEQ ID NO: 45235 - DNA, 759 bp, Acinetobacter baumannii
atgaagcagtctgaagctttcttggctcgtcccatgcttattgtgacagtcgctctggttggacttaatttaagaccttttatgaccagtattggtcctttagtctcaaagattcgactaggtaccggattaagtctacaaggaatagctctactcactttattgcccatgatgttgatgggacttattgcctttattggtccaatcgtacagagcatggttggagaacgcagagttgttttgggctccttactgactatatgtattggatgcgcacttagatttttatttcctacagctgagggtttaattgctagtgcaataattattggtttaggcgtcgcgctgatacaggctgcttttccaggaattattaaacgagagtttagtcaacatatcgggcctatgatggggctttattcagctatgcttatgggtggtggcgcactaggcgcatggttggcacctgtgatttccaatataactggtctatggtcactggggctggctttctttactatacccgctgtattagcattagtatcaacatttatttttttaccctccattgtaagttcgactgcccatctgtcacctgtaaaaacgttattaaagaaacctagaacatggctgttaatgctgtgttttggtttggtcaatggtggctattcttcgtggttgcgtggttggcaccttcgtttcaagatcatggctggagtatttctcaaagtgggaaattgcttgccttacttgccttga

SEQ ID NO: 45236 - DNA, 336 bp, Acinetobacter baumannii
atgcaatttgctggctttgcaggacttgcttttatacctgaatttgcatctgtgttatgggcaatttgtttaggaataggcttgggaggttgttttgccttaacacttattgtggcattagaccattttgaagagccgaacaatgcaggtgctttatctgcacttatgcaaggaggcggttttttacttgctgcaataccgccttggtttgtagcagttttgcatgactttacagggacttataaggcaggttggatttttcatttatgtagtgtgatattggttattgtgttagtggtaaggttagctccaagaagttataacaaaattcactaa

SEQ ID NO: 45237 - DNA, 1158 bp, Acinetobacter baumannii
atgacatcttctttgaaaaaaatagctttattaaaacagggcttaggaaaaaatagtccattcgcagcaggtaggcaaggaacattagaggcgattgagcatttaggttatgtacagattgataccatatctgtcgttgaacgtgctcatcaccatatattgtggagtcgagtgccggattatgatttaagccatttaaacagtttggttcgtgagcggcagattttcgaatattggtatcatgcggcatcttatcttcctatgaaagattatcgatatgcattaccggcaatgatgtctgtcagaaaaggagaaagtcgctattttaatagaggcgatcaacaccttatgaatgaaattctggcacgtgtacgtgccgaaggtaaaattcgattaagggatatcgataagaaaaataaaaagagtttagggaattggtggaataccggtccaggccgccgtgcttttgagcagttatatatgcaaggtgacctgatgatctgtgaacgtaatggtatggaaaaagtttacgatttgactgaacgctgcctacctgaaaatattgatttaagtttgcctacgctttacgaatatgctcagtatttatttaataatacgcttcgagctcatggtgcatttacgtggaaacaattggttcatttaaagaaaaatgatttaaaagaaaccatgcgtgtcgtgctgaaagagcagattgatgcaggtgtcgtatcagcgattaaacttgcagatgggcaaactctatatgtggatgtaactgcaatagagcaacaattggatactgattttggtctaaaaatactttcgccttttgataactctcttattcatcgtgaccgtttaacttccttatttgaatttgattatcggatcgaatgctatgtgccagcggccaaacgggtatttggatatttttgtttgcctattctttatcaaaatgagttagtaggacgaatcgactgtaaagcacaccggacagtaaaagaactagaagtgattagtctacatttagaaaaaacggtaaaagataaagagcatttcttttttgaattagatcaggaactcaagcgttttgcagcatttaatcaatgctcaactgtgaatgataaggtagtcaaactcattcgcagcaagctttaa

SEQ ID NO: 45238 - DNA, 459 bp, Acinetobacter baumannii
atgattcaaaatgaaacgatcgaagtctcgccagttcaacaacaagactatactcaatggttagaatattgggttgcctatcaaaatttctatcaggtcaatttacccctccatatcacaaaaatgacttgggatcgttttttcgatgaaaaagaacctatttattgtgctgttgccaaaaataaagaaggtattttaggttttgtcacttatatgtttcatcggtctacttgggcagaaaataactactgttatttagaagatctgtatgtatcacctgaagttcgtgggcgacacattggtaaacaacttattgagtatgtacagaagcaagccaccgaacatagctgtgaacgtttatattggcatactcaagaaagcaatcaaacagcccaaaagctctatgattggattgcacaaaaacctggtgttattcaataccgtatgtctttgaactaa

SEQ ID NO: 45239 - DNA, 1341 bp, Acinetobacter baumannii
atgtcccctacttctagcttttggcgtagtctcttccgtctcatacatatttatgctggtatttttattgccccatttatatttgttgccgcatttactggcttactatatgcaattacgcctcagttagagcaattcatctataaagatgcattaaatgttcagcctttaaataatgagatataccctctaagccagcagattgaaagcgcaagagaagtcatgcctgtaactgcacaaattacagaagtcagaccatcaccaagccctgtgcaaactacgcgggttattttttccgatcatacacaccatctaaataatgaagccgtttttattgatccttatacgctttctgtaaaaggacaacttgctgtgtatggaaccagtggcgtattaccgttacgaacattcttagatcaattacacagcaatttattattaggaaaatggggacgtttttatagtgaacttgctgcaagttggcttggttttttaactttaagtgggctatatagttggtggaagcgtcgctcaaacttcaaaaatagacaaacaaataaaaatcacttattaaaatggcatagttctattgggttagctttactaccacttttattgttcattgcgattactggtcttacatggtctcaatgggcgggtgataatattcgtattgcccgtcaatggttaaactggcaaacaccaacattgatcacctcactaaatcagatttcattgccagaaatgtctcatcatgaacatcacgaaatgatcatggaaacgccaaatttagacatcatgccagctgaattcgattcagtattagcaattgctcgagcaaatgggattaattcaacagaaatacaaatcaaaccgccagttgctgcgaaccaagcttggactgttgcggaaatacagcgcaaatggcccacacaagcagatagtattgcgattgatatacatgaacacaaggtaatcgataaactcgcttttaaagattattcattagttgcaaaacttacacgctggggagttgatgcacatattggggtactattcggttgggtcaatcaattaattctggttctgtatgcactcgggctatgtgtaatgattgtttatgcgtataaagcttggtttaaaacctccaatgtaaaacttacgacccatcattttattaaccaaactttgttcgtatggaaacatgcaactacacaacaaagaataattacgacattaatgcttgctattctagggctgagtttacctatttttggatttagcttagtcatcaccttatttattttgctcataaaaaaacagctccctcttaaagcttaa

SEQ ID NO: 45240 - DNA, 1056 bp, Acinetobacter baumannii
atgtttaaaaaaacattcattcccacttttattgcttttgctgtagggttaagtagctatgcatcggcttgtacacgtgcggtatatttaggtaataatcaacatattattacagcccgttcaatggactggaaagttgataccggcacaaatttatggattttaccgagtggtgttgctcgtgatggaagtgcaggaccaaattcaattaaatggacttctaaatatggcagcgttattgcaacaggttatgaagtctctacgaccgacgggatgaatgaagctggtttagtcgctaatgtcttatggttagtcgaatctcagtatccagatgtaaaaaattctaataaaccattattaagtatcgcagcttgggcacagtatgtactcgataatttcgcaaccgttgatgaagccgttaaagctcttgagaaagaaccttatacaatcgtaacagacagcgttccgggtgaatctagactaacaacacttcatttgtctatttccgataaaacaggtgatagtgcaattattgagtatattggcgggaaacaagtgattcatcacagccggaattatcaaatcatgaccaactcccctacatttgataaacagcttgcacttgctgaatattggaaacaaatcggcggtaccgttatgcttccgggtactaaccgcgcttctgaccgttttgcacgagcatcattttatattaatgcaattccaaaaaatgacgatatgaaacaagctcaggcttctgtatttagcgttattcgaaatgcctctgttccatatggattaaatacacaagaagagcctaatatttcatcgacccgttggagaactgttgcagaccataaacagatgctttatttttttgaatccgctttatcacccaatgtattttgggtggacttgaagaaaataaattttaaagatggtaaaacccgtagactggatctcggtcccgagcagagccatatctatgctggagatgcgacttctgattttaaaattgcaaaaccatttgcttttttaagcccaaaaactctttaa

SEQ ID NO: 45241 - DNA, 501 bp, Acinetobacter baumannii
atgaaaaaagccctatttttattaggtacttgtttacttacaatagcttgtagcacgacctcatataaatctactaccacgacagcaacatctgagctaaaaacagctggtcatctcaattgcctacctacagaactttgtccaagcttacttgttaaatggaatgaaaaacagaaaaaccaagtccgtgtagatgtacatttaagcagtagttataacttctatgatattaattcattagtatttgatattgatggaaaacaatttagctataacccagctcaagctactgagaaaactactgttagcagatttgttcctaaacactcgagcacgtactttattattccaagtcagttcttacaggaatttaaaaatgcaaaaaaaattaatgtgttagttaagactgataaaggtattattgagcggaatatgtattcaccgcagaaacagtcttcagtgtataaaaatttcgtagaactttatcaaagtttaaaataa

SEQ ID NO: 45242 - DNA, 2097 bp, Acinetobacter baumannii
atgtatcaagtacttgctagaaaataccgtccacgtaatttcaatgagttagtgggacaaaaccatgtttctcgtgcattaagtagtgcattggaacgcggtcgtcttcaccatgcttatttatttacaggaacgcgtggtgtaggtaaaactacaattgcacgtattttagccaagtgtttgaattgtgaaacaggtgtgacttctacgccatgtgaagtttgtgccacttgtaaggcggtaaatgaaggccgctttattgacctaatcgaaatcgatgccgcttcaagaacaaaagtagaagatacgcgtgaacttttagacaacgttccttatgcaccaacgcaaggtcgttttaaagtttacctgattgacgaagtacatatgctctctacgcattcttttaatgcgttattaaaaacactagaagaaccaccagaacacgttaagtttttgtttgctacgacagacccacaaaagctaccgattacggttatttcacggtgtttgcaatttactctacgacctttagctgtcgatgaaattaccaagcacctcggtgctattcttgaaaaagaacagattgctgctgaccaagatgcaatctggcaaattgctgaatctgcacaaggctctttacgtgatgcattatctttaactgaccaagcgattgcttatgggcagggtgctgtacatcatcaagatgttaaagaaatgcttggcttgattgaccgtacgatcatatatgatttgattttagcggttcatcaaaaccaacgtgaaaaagtgagccaattactactccaatttagatatcaggctttagatgtctcgttagtactggatcagctcatttcaacattgcatgagttggctttattacaatatttaccagagctcggcttaaagtatagtgaagaaattaatgccaaaattcttcagctttctaagctgatttctgctcaagatttgcagctttactaccaaatcgcatgtaaaggccgttcagacttgcagcttgccgtaacgcaagagcaaggttttgaaatgtgcgttttacgattattggcattccgtcctttagcaccaaatgaaattttagtttcagagcctgttcaacaaaatgggcaagtagaagtaggcctaaattcacaagctcaaacagcccaagagattgctcctgtaagtgctgttcagcctgttgaagttattagccaacccgctatggttgaacctgaacctgaacctgaacctgaacctgaacctgaacctgaacctgaacctgaacctgaacctgaacctgaacctgaacctcagcctaatcaggacttaatggtatttgacccaaatcatcatgagttgattggacttgagtcagcagttgttcaagagactgttagtgttcttgaggaagatttcattccggtaccagaacaaaagctagtacaagttcaggctgaaacccaagtcaaacaaatcgaacctgaaccagcttctactgctgagcctataggtttatttgaagcatcgaatgctgaattttcacttgctcaagatacgtcagcttatgacttggtttctgaacctgttattgaaaaacagtcattggtgcaagctgaaattgttgaaacagttgcggtggtaaaagagcctaacgcaacagataacagccaactgatgccacaagatattttaaagttgccatcacaaactttggaaggtgagtggacacttgaaaagtgggagttttggtttagaaatagccagctttctccagccgttcaagaacttgctcaacatggtgtgatgactggggaaattggtggcaacacggttttccatattcctcaagaatatgaaaatatgttgactcagctacaacaagccctaattgaagctttaaagcagcagtggccaaatacacaatttacggtcgagtatggtgcagtcaatactgctacaccgtatgttatgcaaagcgttcgtaaagaaaaagctttccatcgggctacagaactattacagcaacaacccgttattaaaagcctcatagagacttttgatggtgagctgcaaaatattcaattaaagccttaa

SEQ ID NO: 45243 - DNA, 615 bp, Acinetobacter baumannii
atgaagaaaaataagttgttaataggaactgctatcgcttgtgtggcgttagcagttttagtctggtttgctttttcacagcaaagttcttctgctttaacgttctctccagaaagtcggcaacaatctggggcaaaaatgatagagagtcaaaatattctgaatttgagtccgtcagaaaaagaaaggttgtctcagcaacaaattgtttttaatgaaatagaaaaagatcaattgcattctaaagctaattttcccctgcttaaaaatgctaaaggtatggtcattaaatatgatccaaatgtgatcgaacttaaaaaagtcggggacactgttaaatttcagatgttggaatatggcattaatcgtacagggaaaattgtagagatcgaacctgttgatcaggatattgttcgatggactggtagatttgaccaaggcgatccgaaccagaatttttttactattactcaaagtcaaaaagaccactatacaatcatgcaaatttttaccgagaaaggaaattattcagctgaaattaaagatggtgtcgggttggtacaaactatggatgagggtgttacagatcaggagttacatcatgatcatccatag

SEQ ID NO: 45244 - DNA, 1782 bp, Acinetobacter baumannii
gtgaattttaaattaaaaacatcactcattattggagcaattgttgcgtcttcacttgtatatgccgcaactgtactttcaccaaatcagaataataatagtggatcaattccatccggttattcagatttagaatttaatctagcaaatgggaattgggtcaaaaacctcactttacccataagcgctaataatttggacaaaattacaattcgttctagtgctgcctatagtagttatttagatacttctaataccaatattccgttagaggttttaaagataaatagtggtgatgtttaccaattcatctttaatagtagtcaaaataaatggatcgctcagttagcgactgtgagtcctaccaatggtgcgacctatgaagtcgttccattaacaactgcatctatgcaaaaagtaatcattcaaaatgacaaatgggcacaaaccattgctttaccgagtgatgtacgtgacggaacaactgtacaagttgtttctacagcaagtacaagttcggacattgataaaacaaatttactattcccgagcagtttctcattaaaaaatggatctgaatattggtttaaatattattctgctttaggaaaatgggttcctgaatatataaaacctcagaagctaaatgttcagcaaatcggaacatctttagcagcagtaaatagtccacttaccgaagtttcatttggagatggaaattgggtttccaatttcactttgccgaccactgcaagtgatcgggatagaattattatcaagtctacagcgacttggtctgcaaaaattaataataccaatattaatagccaagcgactttaacgcttaaaacaggcgatcaatatgagtttatgtatgtaagtgacaaaggatattggcagttgatctcttcaccaacaaaggtgattgattctacagcaacaattcctgcaattttaccgaatatgacccaacccactttaaaggtaaaactgtctacatccaattggcagccgaccttgcagctaccagctcaagctcaagtcggagataaggtggttattgtgtcgaatgcatcggccgacacctatattaatgctgctaatggtttgtcgacagcaattaaaaatggtgaaaaccgccgttttatctacaccgctcaaggttggacagtagatagttatacaattgatatgttgttggtttctagcccagaagtaaactcaattttaggtgaaagtgcagcaaaacttagaatgattgaaggcgtaaatttaacaaacttaaccgctgaaaattcaaatgcacgtttttacttaagagatgtgggctatttaacttataaaatcccagctactactttaaaagaagcaatctcgactggacgagatgacacgacggtacaaaatgagcgtaaacgtgtattggcagacggtgtttattatcaaggtaatgaaccaggggatggcggttgtggctgggcttggattaatgcttcggcatataacatgattggtgcaaatgatattgcaggttgttcttttgcagccatgcgtcatgaagttgggcataatcttggtctatatcataatggctcaaccaatatcggttcaggttttgctcatcccttaggtagtactgcaatgggtggcaataatattaatttttattctagtccatacctttacaatcctaaatatggtgttcgtttgggtgaagaaggaaaaattgatgcggttagtgtgattaacctgaacgcacaaaaaatttctctatataactaa

SEQ ID NO: 45245 - DNA, 231 bp, Acinetobacter baumannii
atgaataacccaatctctaatgtaaaaattatagaagatcctgaatacggtgtgatactagtttgccaggatttggagcttgcagatcaatttgaagattttttaacggaaaaggattctatacttttccatataaagtttgagccaagtcaagtttcattcttttttggtaaaacaaacactacttcaaaggttaaagagttattcaatcaatttatgttatctctttaa

SEQ ID NO: 45246 - DNA, 939 bp, Acinetobacter baumannii
atggaaaacaattaccagaaatttgaacaaaatattgccaatgaaattacgatcgaggctaaggatcaaatgcctgatgcctaccgcaaaacattgattcgtcaaatcgggcaacatggccattctgaaattgtaggtatgttgcctgaaggaaactggattactcgtgcaccaactttaaaacgtaaagcggttttgctcgcgaaagtacaagatgaagcgggtcatggtttatacctgtatagcgcagcagaaaccttaggtgctgaccgtgatgacatgatggaaaagttgattaatgggaaaatgaaatactcatcaatctttaactatccaactttgacttgggcagatgtcgctgcaattggttggcttgtcgatggggcagccattgtgaaccaagttgcgctttgccgtacttcatatgggccatatgcacgtgcgatggtacgtatttgtaaagaagaaagtttccaccaacgtcaaggttttgaagccatgatggctttggcaaatggtacaccggaacaaaaacagatggcacaagatgcagtgaaccgtttctggtggcctgcactgatgatgtttggcccaagtgatgagcactctccaaacagcgcacaaagcatggcgtggaaaatcaaacgctttagtaacgatgaattacgtcaaaagtttgtcgataacactgtaccgcaagtgttgcaacttggcttggaagtaccggacccagatttaaagttcaatgaagaaacaggccactatgagtttggtgagattgactggcacgaatttaatgaagtgattgccggacgtggaccatgtaatcacgagcgtatcgaagcacgccgtaaagcatgggaaaacggcaaatgggttcgtgatgcagcagtagtctatgcgaaaaaacaacagcttgaagcgaacaaagtagcttaa

SEQ ID NO: 45247 - DNA, 840 bp, Acinetobacter baumannii
atgacaagtcagtttaaaaaacagttatctctaatggatcttacattcattggcttaggcgccattttcggttcaggatggttattttcagcaagtcatgtggcctctcaagccggccctgcgggtatattgtcatggattattgggggctttgccgttttaattctgggaattatttattgtgagttaggcgcagccttaccccgagcaggcggtattatccgttatcccgtattttcacatggcccattacaaggatatttattgggttctgtgaccgtcattgccttttcaagtttaattgcaattgaagtcgtcgctgcccgcgaatatgcagcagcatggttcccttctcttaccgccgtacatgatggtgttcgaactccaactaccattggatggttgtttcagtttgcacttttatgcgtattttttgcattgaactattacagcgtaaagacctttgcaattgccaacaacctgattagtgcgttgaaatttgctgttccggttttagtgatggttgcacttctataccattttaaacctgcaaacttttcaatgaccgagtttgccccaatgggcgctcacggcgtacaaggtgccgtatctgctggtggtattatttttgcgtatttgggtctaacgccgattatgaggtcgctcaacaagcaattggcctgcaaaaggtgcggcgacaattttcgcaccaaacataaattcaatattagaatgagccttaatttgttgatatttctgctgcgccatttcaggtacagggaaaatcggtccagcgcgccagatttgaccgcccgcctgtgggttattatccaatattaa

SEQ ID NO: 45248 - DNA, 915 bp, Acinetobacter baumannii
atgattaagtggatcatattagcgatttttgtgatatctgcattgtatatccaacatcgcggcaaagtgcgtcactcgttttatcgtcaattttttgaccattcaaccttgctcgcaccgattaactttttaatgtacatcttttcaaaggtaccgaatcaaccctatatcgacactcaacactttaaagatttaaaagtgttagatgaaaattgggaaatgattcgagatgaagcgaaagctttatatgaccaaggtgggattaaagcatcaagtacttataacgacttaggttttaactcgttctttaaaacaggatggaaacgtttttacctcaaatggtatgaatcaagccatccttctgctgctgagctttgcccaaaaacaacggctttactcaaaacattaccaaccattaaagcggcaatgtttacagagcttgctccggacagtcgtttggtcagacaccgtgatccatatgcggggtcactccgttatcatttgggcctgattactccaaatgatgaccgttgtttcattgatgtagatggtgaaagatactcttggcgtgatggtcaaagtgtcgtgtttgacgaaacttatattcactatgctgaaaataagaccgatcaaaaccgtatcatcttctttgccgatgttgaacgtccaatgaaagtaaaatggatggaacgtttcaaccattggtttggtcgtaatgtgatgactgcggcaagttcaccgaatgaaactggtgaccaaacagggggcttaaataaagcctttggttatgtttaccaaattcgtattaaagctaaagctttaaaagctaaaaaccgtaagttgtattacttcttgaagtggttcctcatgcttggaattttcttcctgatttttgttcgaccatacgtgttttaa

SEQ ID NO: 45249 - DNA, 1260 bp, Acinetobacter baumannii
atgaatgagataacaactaaaaaggcaaatccgattttattaggcgtacttggtgtattcgttagcaatatcagtcacgcttcagcacttgaacaatcgggccaatctatcttgccatttcttgaaaatgggaattatgcagaagcaaatttatttgcagttgatgcatctgtttctggcatagtcaatgatagagccgatcttgtaagagatcatcaaagtcgagatacaggtgatatcgcagaaagtacgcaattttatacagctgcaataaagttacaactcacagatcgtttaggttttggtgtgctatatgatcaacctttttcagcagacatcaaatatccggcacgttctaataatagttactttgataatgatattagccatgagggaacttcggtaaaagctgatacccaaaatttaagtttgatattcgggtattctccatatcagcattttcaaatttatggcggacccgtctatcaaactgtaaaggcgaatgtagcgcttagaggtaatgcatatactcaggcttttaatggctacaatgctaattttaaacaagaaggcgaagttggttggttgttaggaggaagttatcaattacccgatcttgcattaaaagcagcggtaacttatcggtccaaaatcaaatataaatttcaagtagaggaagatatatttggtgaaccattaaaactcgttgataatgagaaaaccaaactagagactccagcatcattaaatattgattttcaaacaggtatttctgaaaaatcacttgtttatatgaatttaagatgggttaactggaaagagtttgagactcggccaccgcaatatggagctctttctgaaattttaatgaaagaattaaccaatggcgaatatattcaaggattcaagctcgattcttaccaaaatgatcaatatggtgcaactttaggaattgcacaccaatttacagaaaaatggagtacttcaacagatgtaagttgggattcaggtacaggtaatcctgcatcaacgatgggacccataaaaggttcatggtcacttggtttaggcgtccagtttaacccagctaaaaactactttataactggtagcttaaaatatttttggctaggtgatactaaaactgaagatgggacttattacttgccaatagagggaatcaagccatacgcagaacaggcaaatttcaaaaataaccatgcaattgcgtatggtttgaaatttggatattggttttaa

SEQ ID NO: 45250 - DNA, 690 bp, Acinetobacter baumannii
ttggactcgattaaacaatatgatgatgggcacgtatttacagcgtgggttgcattaatcggcacagtaatggctgcgacatgcctgctttgttttcttgcagttactggctttgatttgcaccaaatatttaaacctgaatttgcattaactttgtcggcaaaagaccaagcacttttcagaacctcaatgatttctgattgttttgggttttatcttccttttctggctgtaggtgtatatctgtggagaaagctacgtccttcaggtggattattgtcggatatagctattttattccttgtgatttcaacaatgttaggtataacaggggctgctttacaagcctccgtgttaggaccacttgctgaaacatatatgtctggaaatgaaatagctaagcaggcagcgggcacagtttgggccaccatttcgcaaggctctcaaaatggtttatggccaatggaaggaccgacaataggtttttgggcaatagtcaacggactacttttgagaaaaaacaaatccgtattaggtttcccactggttctggttggcttgggatatgttggatttgctgtgcttcttttctcaggcttttctcaagcggctttattccttgaactgttcttattaccagtgcaagtagtttggttaggtattttcggtttgagtttattacgaaaatag

SEQ ID NO: 45251 - DNA, 414 bp, Acinetobacter baumannii
atggacgaagctcagaaagtgcaattttatgatgccgctgagcgaatgtataaaaaggtatttcctgcatttcagaaattaaaaattgctcaacgttggagtggcgcttgttctattccttttgacgtaaggtctcaagtgggcacactccataatggtcgtatttcttatgcctatggatacagtggtgcaggcgtaatgatgtcacaaaattatggccgaattttagctgatcttgcattgcaacgtaaaacggagcttaccgagcattggtttgttgccaatggagaaaaaggacacgctaaatttaaacgtttcccattaattccgggtctcatcgctgcgctacgtacttatttcgaatacgaacgagtatcagcactttctaggagaagacgccttggactcgattaa

SEQ ID NO: 45252 - DNA, 570 bp, Acinetobacter baumannii
ttgacaaaaaaagcccttgttgctcttccattaaatgttttatctgacatcaaaattacaccagaggttaataaacctgctcgggatatgattgttgcaaaacatccaatgcgtactgctaaattatgggcacgtgtacgtggaaaaatcgagccatttattgcatttgcgccagttgagcaaaacccaatcaataccgttcgagttgaatatgaacatggagatgactcaattttagtctgttttatttctgatgagtcaactatagatgtgaacgatattgaagctgttcaaaaagctttacagatgtttaagcccgacattgaagtgcttgacatcgcatcacataactgggctaaagatccttatgcacaaggcacatgggtacactatcgccctgggcatttgtccgatacagctccgctcatgcgtaaacctcatgggaatatctatttcgcaggaggagatattgcaacaatgagcatgggcggtatcgaagatgctctagagtctggtattgaaactgctgcaagcatcacacatgcattagctcaaaaattagcaggatga

SEQ ID NO: 45253 - DNA, 1539 bp, Acinetobacter baumannii
atgaatagaaaagcgagttttcaatctttagatgcagatgttcttattattggtgcagggattgctggtatcagtgccgcttaccatttaaagaaatatagacccaattcaacctttatcatacttgaaggtcgtgatgatattggcgggacttggagcctatttcgctatcccggaatccgctcagattcagatatgcagtcttttgcttttggctttaaaccctggactcaaaaaaagactttcggtagtgcgcaaatgatctgtgattatttgcaggaaacagttaaagaaaacggcattaatcagcatattcaatttggcagctatgtaaccagtgcagaattctcatcgaatgaaggaatttggatcgtcaaagttaaacaaaaagatcaaaagagtttaatcactttgcgttctcgcttcttactcatgggtacaggttattatgactataataatgcatatacccctgattttaagggcacagaagatttccaaggtaaaattgtccatcctcaacactggccagaaaatctagattattctggcaaaaaagtagtcgtcattggtagtggtgctacagcagtgacattaatcccagctatggcaaaagatgttgagcatattactatgcttcaaagatcacctggctatgtggtcgctatgccgagtgtcgatcctattgcagttgctttaaatacagttttatcaccacagcgtgcgtatgaaattattcgacgtaaaaatattgcaattagccgcgggatttacaaactatgccaccgctttccaaaggtgatgcgtcatctactcattgcagatgtacggcgcagattacctaaagattttgatgtctcaacgcatttctcacccaaatataatccttgggatgagcgtttgtgtgtggtaccagatggagatatgtttaaagcgatttcatctggtaaagcatcagtagtgactgatcatattgaccgttttatcaaagaaggcatattgttgaagtcaggaaaagtactagaagcagatattattattaccgcaaccggcttaaacatgctggcatttagtaagattcaactcaccgttgacggtaagaaaattaattatccagacacgacaatatttaaatctatgatgctgtcagatatacctaattttgcctttgcatttggttataccaatattgcatggaccttaaaagtagatctggtatggcaacatttctgtcgtctccttgactatatggatgagaataaatacggaacatttataccggttattcataataaaaccatgaaacgggttccttttgttgatttgagcccaggttatgttcaacgtggtttggcacaattcccaatggcagggaccgaaggtccttggacactacaacatgattataaggttgactttgagcggctcaataaaggacctgtgtgtgataaggaattaaagttcactgcattggttcccaagaaaaagttagctttcgttacggaaccatcttcagaagaattgatggtcaaagcttaa

SEQ ID NO: 45254 - DNA, 582 bp, Acinetobacter baumannii
atggaaaatattaaatttaccagtaaagggattacatgctcggcatggtatattcctgccacaacagataagtatatgaactctcgtgggcggccctgtgtggtcatggcaaatggcttcggaggcaccaaagataccggtttattaaatttcgcagaaccattgagtaaagcgggttttgatacatttatatttgattatcgtggttttggagaatctggtggttttccaagacagaatgtttcctataaaaatcagcgtgaagattaccatgcagcaatcgcagcagtacgaagtttgccaaatattgaccgaaaccgtatagcgctttgggggacgtcttattctggagggcatgttctggtcgctgcggcccaagatcagaaaatatctgcagtaatctctatgaacccggctacggatggtttagctgccctctcacaaatctgccgttatggtggtctaaaacaattaaccgttgcagtcgctcatggactaaaagatttagcttattctcttttaggccaaaaagcgcatcttattccaatcgtggggcaaccgggtacggcggccatcaattag

SEQ ID NO: 45255 - DNA, 303 bp, Acinetobacter baumannii
atggctgggccaacatggcggaatgaagtatgtgcacgaactgctttagaggttgcaagaaaccggcccattaatttcgcccatcaaataaagtgtcctttattggtacaagtgggttcaaatgatcaagttactcctcctgaagctgctcgcaagtcggcaagcttagcaaatggagaagttaaattacttgaatatccgattgatcattttgatttttataatgaaccgtggcaaataaaaattttagaggaccaaattaattttttaactcaagccttggctcgtccccgtgttagataa

SEQ ID NO: 45256 - DNA, 1398 bp, Acinetobacter baumannii
atgtctaaatcggcaatcgtatctcgtggactcattctttctacactctcagtcactttagttgcatgtgtcaatatgcaagcgccacagcctgcaatcacatctcatattcctcaaaattttagtcaaaatcattctggaaaaacgattgcagaaaaaagttataaagagtttatttctgatccgaaattattacaggtgattgaaatcggtttaaataataatcgtgatttacggactgctacgcttaatattgaacgtgtacagcaagaataccaaatcactaaaaataaccagttacctactatcggtgtaatggggagtgcagtacggcaagtgaacccatctattaatcctaataacccagcttcaacatttcaggtgggtttaggaatgactgcatatgaattagacttttggggccgtgttcaaaatttaaaagatgtggcattaaataattatctggcaacacaaagtgcgagcgaagcagttcaaattagtttaatcagcaatatcacacaagtttggttaaattacgcctttgcacaagcaaatttaaaccttgctgagcagaccttaaaagcacaagtcgatgcttataatctaaataagaagcgctttgatgtcggtattgatagtgaagttccattaaaacaagcgcaaatttcggtagagactgctcgaaatgatgttgcaacttataaaactcaaattcaacaggcaaaaaatttactggatttgttagcaggtcatcctgttccgcaaaatttacttccggatcatgctattcaaaatattacctttgagaaaaactttgcagccggtttaccaagtgatttattaaatcatcgtccagaccttaaagctgccgaatatgagttacgtgctgcaggagcaaatattggtgctgctaaagcacggatgttcccaaccataagcctgacaggctcgacgggttatgcatcatctgaactgaaagatttatttaaaactggtaattttgcatggtcaattggaccaagtattgacctaccaatttttgattggggaacaagaaaaactaatattaaaattgcagaaactgaccagaaaattgctttagctaaatatgaaaaagccattcaatcagcttttcgtgaagttaatgatgcacttgctacacatgcacatattggtgaacgattagacgctcagcgtcgcttagtctctgcgactgctgcaacctataaattatctatggcgcgctaccgagcgggcgtggatagttattttacggttttagatgcgcaacgttccgcttacgcagcacaacaaggattacttgcgcttgagcaaatggaattaaataaccaaattgaactctataaagttttaggaggaggaacatcaaaagtctaa

SEQ ID NO: 45257 - DNA, 3111 bp, Acinetobacter baumannii
atgatgtcacaattttttattcgtcgtcccgtttttgcttgggttatcgcgatctttattattatatttggattgctgagtattcctaaactgccaattgcacgttttccaagtgtggccccgccacaggtgaatattagtgcgacttatcctggtgctacagctaaaaccattaacgatagcgttgtaaccttaattgagcgcgaattatcgggtgtaaaaaatctactctactatagtgcgacaacagatacctccggtacagcagagattaccgctacgtttaaaccgggcacagatgtggaaatggctcaggtcgacgttcaaaataaaatcaaggctgttgaagctcgcttgccgcaagtcgtacgtcagcaaggcttacaggttgaagcttcatcgtccggatttttaatgctggtcgggattaactctccaaataatcaatattccgaaattgatttgagtgattatttggttcgaaatgttgtagaagagctaaaacgtgtcgaaggtgtagggaaggttcaatctttcggtgccgagaaagctatgcgtatttgggtcgacccgaataagcttgtttcttacggtttatcgattagtgatgtgaataatgccatccgtgaaaataatgtcgaaattgcacccggccgactgggtgatttaccagctgaaaaaggccagctcattactattccgttgtctgctcaagggcaattgtctagtctcgagcaatttaaaaatatcagcttaaaaagtaaaactaacggtagcgtaattaaattatctgatgttgccaatgtagaaataggttcacaagcatataactttgccattttggaaaatggtaagcctgctaccgcggctgcaattcaattaagcccgggtgctaacgccgtgaaaactgccgaaggtgttcgagcaaaaattgaagaattgaagctaaatttaccggaaggcatggaatttagtattccttacgacaccgcgccgtttgtcaaaatttcaattgaaaaggtaattcatacattacttgaagccatggttctggttttcattgtgatgtatctatttttacataatgtccgctatacgcttattccagcgattgtggcgcctattgccttactcggtacttttaccgtgatgttgcttgccggtttttcaattaacgtactcaccatgttcggtatggtacttgccatcgggattattgtcgacgatgccattgtcgtagttgaaaacgtcgaaaggattatggcgactgaaggattaaatcctaaagatgcaacctctaaagcaatgaaagagattaccagcccgattattggtattacgctggtcttggctgcagtatttttacctatggcatttgcgagtggttctgtaggggtaatctataaacagtttaccttgaccatgtcggtatctattttattttcagcgctattggcactcattttaacaccagcactttgtgccacaattttaaagccaatcgatgggcatcaccagaagaagggcttctttgcatggtttgaccgtagtttcgataaagtcactaaaaagtatgaattgatgctgcttaaaatcatcaaacatacagttccaatgatggtgatctttttagtaattaccggtattacctttgccggaatgaaatattggccaacagcatttatgccagaggaagatcaaggttggttcatgacttcgttccagctaccttcagatgcaaccgcagagcgtactcggaatgtagtcaatcaatttgaaaataatttgaaagataatcccgatgtaaaaagtaataccaccattttgggatggggttttagtggcgcaggacaaaacgtagctgtggcttttacgacacttaaagacttcaaagagcggactagctctgcatctaagatgacaagcgccgttaatacttccatggcgaatagtacggaaggtgagaccatggccgtattaccacccgctattgatgagttaggtactttttcaggtttcagtttacgtttacaagaccgtgctaacttaggtatgcctgctttactggctgctcaagatgaacttatggcaatggcagccaagaataaaaagttctatatggtttggaatgaagggttgccacaaggtgacaatatttctttaaaaattgaccgtgaaaagcttagtgcacttggtgttaagttttctgatgtttcagacatcatctctacatcaatgggttcaatgtatatcaatgacttccctaatcaaggacgtatgcaacaagtcattgtacaagttgaggctaaatcacgtatgcaactcaaagatatcttgaatctgaaagtcatgggttcaagcggtcaattagtctcgttatcagaagttgtaacgccacaatggaataaggcaccacaacaatataatcgttataacggacgaccatctttgagtattgctggtattcctaacttcgatacgtcatcgggtgaagcaatgcgtgaaatggaacagctgattgcgaaattaccgaaaggtattggctacgagtggacaggtatttccttacaggaaaagcagtctgaatcacaaatggcctttttacttggtttatcaatgctcgtggtcttccttgtcttggctgcactctatgaaagctgggcaattccactttctgtgatgctggttgtgccactcggtatttttggagcaatcattgccattatgtctagagggttaatgaatgatgtgttcttcaaaatcgggctaattaccattattggtctatcggcaaagaatgcgattttgattgttgaatttgcgaaaatgctgaaagaagaaggtatgagtttgattgaagccactgttgccgcagccaaacttcgcttacggccaattctgatgacatcacttgcatttacgtgtggtgtaattcctttggtgattgcctcaggtgcaagttcagaaactcaacatgctttaggcacaggggtttttggtggcatgatttcagcaaccattctggctattttctttgttcccgtgttttttatcttcattctgggtgcagtagaaaagctattttcctctaagaaaaaaatctcatcttaa

SEQ ID NO: 45258 - DNA, 729 bp, Acinetobacter baumannii
atgaaagcattgctggccagacaaaacttgaatctgcaatatgcaacagttcgagcgcctatttctgggcgtattgggcaatcttttgtcactgaaggtgcattggtcggtcagggcgataccaatacgatggcaactattcaacagattgataaagtctatgttgatgtaaagcaatcagttagtgagtatgagcgcttacaagctgcgctacaaagcggagaattatcagcaaatagtgacaaaaccgttcgtattaccaatagtcacgggcaaccttataacgtcacagcaaaaatgttgtttgaagatattaatgttgacccggaaacgggcgatgtcacattccgtattgaagttaataacactgaacgaaaattacttccgggcatgtatgtgcgtgtcaatattgatcgtgcttctattcctcaagcgctattggttccggcgcaagcgatccaacctaatatcagtggcgagcctcaagtatatgtcatcaatgcccaagggacagcggaaattcgtcctatcgaaattggacagcaatatgagcagttctatatcgctaacaaaggcttgaaagtcggtgacaaagtcgttgttgaaggtattgagcgtattaagccaaatcaaaaattggcattggcagcatggaaagcaccagccgtcgcaaatcatgcttcaagtgtagaaaccaaaacttctatagctgagggggcgcaaccatga

SEQ ID NO: 45259 - DNA, 885 bp, Acinetobacter baumannii
atgcttcctaagcagaaaaagaatatagtcctttcctacattcttcctttaattttagttattggcatctatgccttttttcgtgtatctattcttccttatatttatacccagcaagcacagcatcaacttttaacagcaaataatcaaacaactgaaatttattggaaagagccagacctcttagccgataaaaagtatccagcaattatcttcttacatggtattcagaaagataaacaaggtgctaaagcctttgtacgctcaggcttgttaaatgaatatagtaaaaagaactttttcagtgttgctgtatctatgagtggatatggtgagtcatctggaaaatcagacttttgtggtaaagcctcacaaactaatcttgtacaagccattaattttgctcgatcacaacctcatgttgatccaaacaaagttgcagtggttgggattagttgtggggcttccatagcgaatgttgtggcaaattctggaaagataaacgctttgattttggtatctggattttatgattttaaaggtatgtatgccgagtggagttctcacactagaaccctaacgacaaacgtaatgaatgagataaatgaatcgattgctgctgaaaaaaatattgaaactgcatccactgcaagatcatcgctaccgatttcgtctcagtatccacctactcttatattagttgacaccaaagacccaattgttgacccaaagcaaagtattcagctacatcaattacttgatagtaaaggtattccaaacactttagaacttattcaagatgccaaacatcctgtgcctgctaatgtctggaaaactaaaagcgataagtttttggaaaagactttgagtgtaaaaattaagtga

SEQ ID NO: 45260 - DNA, 519 bp, Acinetobacter baumannii
atgaaagacattgaaattttagaaataaaagaaattggcaattatgaagaaggcctatcgctattattagaagattctgtaaataacggagcttctataggtttcttagctcccatagaaaagaacgaagtcttagattattggcgtgaggtcaaccataaattagcacaaggtagtagccgtctatggattgccattcaacaaggaaaaattgtaggtagtgttcaattgtccttagtgagtaaaaagaacggcgttcatagagccgaagttgaaaaactcatggtacttacctctgcaagaaaacaaggaatagcaacattactaatgaacgaactagaaaattttgcacgagaaaagggcttgtgcttacttgtcttagatacacgtgaaggtgatgtgtccgaacttttatatagcaaaattggatttgttcgtgtcggtgtaattccaagttttgcattaagttcaaacgggaactatgacggcacagcgatttattataaaaagcttgtttga

SEQ ID NO: 45261 - DNA, 6318 bp, Acinetobacter baumannii
atgtataaatattttagttctttaacacaagaaagtattcaaaaaaataaagaagctacattgagtatattgggtatttcgtatccagaactacgtgatgttctaggacagcagatgtctcaagctgcgggcaaagatcaatcatttttatcttcaccggtgattgaacaaatgttcgcatgggaaaaaggtcaacccacattagatgctttgggtggtgaattacttcataagaaattaatcgatgctttagatcactcagaaaatggcgcatatcgttttaatcgtaattatcagccttatgtacatcaattacaaagctggaatgctttattaaaagacaagaaatctataatggttacttcaggaacgggttcaggtaaaactgaatgttttatggtacctattctaaatgatttatacgaagagtttattcaagcagggcaatccttaacaggtgtgcatgccttatttttatatccactcaatgcactgattaactcgcaacaagagcgattagatacttggactcgccatttttcacaatctaatgccattcggtattgtttgtataatggcaatacaccagagcataaatcacaggaaacaggaaaacaaaaacttcatcccaaccaagtgctcacacgtgaagaactgagattaaatccatctcctattttagtgactaatggcaccatgttggaatatatgatggtgcgccaaattgatgcacctattttgcaaaaatctcaaggaaaattgcgttggattgtattagatgaagcacatagttatatgggctcacaagctgcagaacttgcgatgcagttacgtcgggttctgcatgcttttggtgtggaagcaaaagacgttcgttttgtagcgacctctgcaaccattgcaggtgcagatgcagaagaaaagcttaaacaatttttatctgaaatctcaggtcaaagcacagagaatattttggtcattggtggtcagcgcgaagtccctgtattacctgtagttgaaaatcatcagcaatcttttgatgagttagtagcaattgatgctcaacacgaaatatcttatgagcgttatcaacaattagcagggcatccaattgcatgtgttttaagagaaagtatttgctcgcaacgtgctttaaccttagatgatttattaaaaattacccgagaaaagggtttccaactttctcaacatgaaattttggaatggttagatctattaacctatacaagaccatctgatgaagaacaagcttttcttaagattcgtgttaattattatcagcgtgtgactcatggtctatggagttgtacaaatgacaagtgtgataaaaaagacgatggtttaaaaaattggagctttggtcagatatatgcgacacatcaagaaaaatgtgattgtggggctcctgtattagaattaacgttctgtcacagctgtaaggaaccacatttaatcggttcattaggcaaggaagatgtgctgaaacagtggaccgttgaaattgaagatgaatttgcattacttcttgataatgaaacggaagaacaagaagaggttgaatataaaaatactatcaagaatcgtttagtagtattttctgtcaatgagaataaagaaaaaaactaccgccgagaccaactgaatttagaaaatttaaaactcggagaaatttctaaaaataccctgaacgtacattattttgaacctcataacagcagtgatccaattttatgtagtcatcctgaatgtggtgcaaagggttcgaagtttgatttgccatttaatcgtgcaattttaggtgcgccttactatattacacaaactgttccacagcttttacaatattgtccggatattgaacaaaaagaaattaatgaggcaagcaaaaattataatgacccagaatttattgaaggtgagtttaaagatttaaaggattgtgcaccggaggatatgccagctaagggtaagcgtttaatcacctttactgatagtcgtcaagggactgcgcgtttatccgtaaaaatgcaacaagaggcggaacgatcacgcttacgtggtgctgtgcttaaagcaataatacaacatacaaaagctcaagccaaaaccatagatccgatggaagtgctattacgtcagagattaaatgaagcagagcaagaaggtaatattgctagaataaagttctttcaagaagaattaaataatttaagtgctaataatacgccaatgacacttcctgaaatgaattgggaagagttatgtcgagaattagcgaaagatttcgattttagaacaggtattttgctcgccaatcgccatattgcaggtggaatttttgacgatgctggatcgcttaaacttgcacaaatgttactaacacgagagttttcacgtcgtcctaaaaatgcaaatagtttagaaacgttggggttggtgaaagttagttatcaaggcttaaaagacttaaatgatctgcctaactattggaaggagcaagggttaaccggtcaggattggcagaattttattaaagttattttggattactttattcgtgaaaatacagtgattgaacttgctgaggattggaaacaatggctaggaggcccagttctgcctaaacatgttgtcagtcctgaattgaaagagcaatttaagaaaagagaagatgggtcaaaaaataatagtgtactggcatggccactcgcctcagtatctaaaaatcatcgtttggtgaagcttttagtattaggggcaaaattagatttgaatttgattcaacatcgcaatatggctgatgattggttgaaaaaagcatggcaagttttaaaagctgaatttttagttgaagatggtaattcaaaatatcatcttagaaaggaaaaactgacttttagtttagttgatcaagtgtttttatgcccaatcacacatcgtttaatagatatcaccttcaaaggttttacaccttatttacctagaagtttgccacaagatattgataaatataaaacccaagaaatggattttccaaagctatggaactttgatgttgaagatctaactgaacttcatcaagattcagcagtgcaaaagctaagatcactaaatttatggacagacttgtcggatagcgcagtatcgggaggatttttctatcgtacagcggagcattctgcacagcagtcggcaaatttactgaagcaatatgaaacctactttaaggctggtaaagttaatgtcttaaactgctcgacgaccatggaaatgggggttgatattggagggatatcaacagtggtaatgaataatgtaccaccgcatcctgccaattatttacaacgtactggacgagcaggtcgtggtaatcaatcacgtgctatttcttatacgatttgtaaaaataatcctcatgatcagcaagtgtttaagcaaccattatgggcttataccacagcaattcaggcacctcacgttagctttaattcacaacgattgattcagcgccatatcaatgcacagttgcttgccatctttttaatcaaagaggttggagatactgatattgatagacctagcttagacctgaaatggttttacattaagcaagatggtcaatctgattcgatttgtgacacttttgaaaagtggttagtgggtaaagtaatacaagattatcaatatgtattggaatttttgaaaaaaggcacagcattaaaagatattgataatgcagcaatcatagatgcttgcttgacaaaaattcgtgagctcaaaacagaatggctggaagaatatgtcattattgaaagagagtatcaacaagagctagttacgaatcctaatagtagctatctacatcgtctaacatgtgaaagggatcgattaacacaagcatatttattgtctgagttggcgatgcgtaatttcttaccaagctatgggttcccaactgatgtgattacttttgataacaccaataagatcgagagagatcattggaaaaagctttcaaaacgccgaaaaaagagggatttggaaagtagtattgatcgcgaagataatttatcgcgaataaaaggcctaccaagccgaaatattgccattgccattcgtgaatatgcaccgggtgccgaagtgattgttgatggtcgagtctatacgtccaaaggaatatcacttgcatggcgaaatattcataatgaacacgataagaaaccacaaaaatttgattatgcatggatgtgtcatcattgtggtcagacaggtttaacttctggtgttttatcgaatgaaaatgagttgacctgtacaaatattgaatgtgaggaaactattactgatataaaaaaggtattacgtccaaatggttttagtgtcgattatcatgataaacctaacaatgatgtaactacgcaaaaatacatacctgtccaaaaaccttgggtaggtctttcaaaaagtgctgaaacttggccattgccacatgctaatttgggatattttaacttagatcctaatggacatgtattccaatatagttcagggttgaacggcacagggtatgccatatgtatgcagtgtggtcgtgccgactcaatggaagaaagttatgatggggaagtgaagtttccaagtactttaactccagatcgtccacatcagtctcttaaggctcaaaaagatggcgataaatttaagcaccatgattgtggtggctcaagtgtcgtaaaatctaatattcatttaggttgtcaaattaaaacagatgtattagagattgttttaagacatccgactcataatgaatatattttaaactctgaagaaggtcgagtaattgccacaacattggtcgtagctttacgtcaggcgatagcgagtgaattgggaattgccacagatgaactcggctacgcaattaaagtgaaaagaattgataatcaatcggttctaattttacaaatttatgatgatctaagtggtggtgctggtttttcaacaacggcagccaattttattgctgaagttttaagttcgttgatagagaaactcaattgtgtagatgaaagttgttcttcagtgtgtggcaaatgcttgcttgatagtcaaacaagacatgatagtgaatatttagatcgaactttagccttaagttggttagggagtgattttttaacttacttagagtctccaattcctggaacaaaatttatttctggtaccccattttcgatcattgaacagtatgtaaactatggagcaacacaggttacattcaacttaacgggaaacagtgaagattgggatgttttatgtactgcaaatagaaaaaaactatttaagttattgaacactaatattaagttagtgattgtagtttcaccaactttaaatttgaatgcacaaatacagcaagaaatgttggctctcgaaaaaattggcctttcatttgcagtaaatatcaatctcaattctgaatacttatacgctcagattgtaggtcaagataaaataactactttatatagtcagtcaccagaggtgagttgttttaatgaatactggttggaaagccaaagcccaagttataaatcaacctctgatccagaattgcaattacaaaaatttagttttgattttaaggctattgaatcttatgaaaatgagtttcaccagctaaaaattagtaaagattttgatagtgatctggtggatgcttttgcatacaaattctggtctaaaattctacctgttttaaaattaaataatctcgtgaatgatgaggttgtagagatagaatattctgatcgatatcttcaatctccagccaatatcattttaataagtagcttgtttaaagaaataaagaatttattaggtaatcgtccaaaatttaccataacaactttttttaaaaacaaacaagtacaggaggagaggttatattcagatttcagacaattagatgaatttaataacttctttataaattattttgaagatcaattatctcagaaacttaatttaaatatatcacgatcaaaaatagatcattctcgttactttattttttcattaaaatcaggtaagaaagttgatatccgtttggatcaaggtgttggctattggcagatcaaatatattaattggcgtgaaattcaagagaaaggagattttcctttcttagaaagtatccagaaacaattattatggataaatgggaataataccaatatgtatgtagtgggtgaagatggttttaaaactgatatatatatcacaaaatcttga

SEQ ID NO: 45262 - DNA, 3294 bp, Acinetobacter baumannii
atgatgtatagtttaaattttagctctagacagtatttagcgcagatattaaaaacaagaggattaacatctgctgatgcacgtgtactttaccaatatcaattgtcttttcctgaatttaaagaaattgagaacattcttaaaacaagttttcaattccaaaatataaatcgtataggcgatgaatgggctaacttatttacgttgtacgctgccgaatggtttagacgtgaatatactgcaaaatggacatgggatccgattttaactgccttagatattagggatttaccagtaaacactagaaacgaagttgtaattaaggggctgagattttggaaacgcccgattattaaatatagtaaagccaataactatttaggttcgatttttaaagagggtggattcccctcacgcttgttaaaagaagatggaaatcgttatattgcgattttccaaaaagtgacctctttatatttagaaaataaatctcatattgatgagttaagagctgaggtacaacaagaattaaagactttaccacaagcatttgagcatgatgaaacactatctttagtgcttgatattgtaagattaattatcgaaaaagtggaaaactgtcaattaactgcactccaagacccaattaccactttagatcagcaatctaagcattggcgtaatgaatttccgttgcctattgatgaagaccaaacgatcgtagaggattttttaagaaatttatttaagtcggcctcagaagaaatatctaagcatcatcaattacgccaagcgttaaaatgtactcatagcttatctgaagattttaaatatttatctagtacaatttacttgccagaagaactttcatttacactaaatgaagatgttgagttgcgacgcacacgcggtaatttagtcattaaagaagggtggaatcataaaagccaatttttatgtacgacttatctttctcagcaaaataataaagtcattgcagaaattaatagaggttttttaaaagacatatatcgtcaattccacaacgaagctttatatctatgtttagaggtggatggggtagtactcagtcatattgaattagaagatacggctctcgattttgaaaccttacctatagcttttgaaatacaagaaaaaccaaaatatattgcccaaggtgctttaaaaaccaaagcacctgaaatattcattagtctgccaactggtgcaaggtttaccagtgtagaatcagcagaactttttgaatctgtaggtcagtttttaacatttaaactgtataaaattagggggcagcaacagatattgacacaagatggtgatcaaataataatcaaatgtggacattctgatattgaatttgagcagttattgtttagaaaaaataatatcagccaattagagacttccccaagtttagcatttatgggtaagccagcattaaaaacttatggcacacataccttatttcgtgggaatgatcagatcgagactacccctttgcatttacttttagggcagcaaatgctgactttaaaaaatagaaaaggtgaaagtttattaaaaaagaaagtggttattttgccaaaacattttaaggtcatggtacaagcaggtgtgacactagatcaggctatacttgatattgaatcggatgcagaaattcacattgaagtatcgaattctcactcaagcttagtgtatgaaaagataggaatatcctataagtgccaagtgaaatgtgcggtagtacctttagcattaaacttaaaaataacctttaaatttggtggagagtgtattgttactgttccgttccctgcaagaggttttaaactaattaatgagcaaaaagaagtaacatcaaaagatttagtaattcacgacttattgaatactgaactgcaagtgtactcctatgaccgcgcggctaagttgaattttgatattgtattaaaaactaaaataaatcagggatatgctgtacctttttatcgtaagaaaataaaggttaaacaaggcatttcttctattaatttatatgagctagtagaagatgtgaaaggcgttttagccttagatgatgatttagatagttttgttgaatgcgcaattagttatcatcacagcgaaaaaaaatggaacattcggcattatgcacaccaacttaattggggtaaaagtattaaggcttattataacaatgaagctttattatcctttaagccacaggctatgtcactagtgcaaccacaagttgcacctctcgttttacttgaaaaaaatgaatggataggtaaggtttttcaagttccggaattggatatgagtcttgcaccttatttattaatacctacaaaaaattctacattgtttagagccaagcttattccagaatttgattatcctcaagatagtgaaatagaagcattaaccgaggcaacacgtagttttggtcagaataaacaatcgattaagcagtttatacggacgttaaattatgacaataatgaggtattttgggattatgtgaaaaccttattacatgattatgaccatttgcctctaaatacttttgaagtcttaaagggtctagcgacaaattatgatcaattggctattactgtatttaaacttgatctatctctcgatattttacgtcgttttgaaactgaattatctgtactatggtttttaatacctgtttcatcttggcagaatgcaaccttacaagttattcaatactggcagaaaatgcttggtgatgaaggtacttatggtcgtgtaaaggcagaaaatattttaaaaaaagtaaagaatttaacacctttattggctgaatcatttcattcattctatttaagcaaccaacgtgaatttgggcctgagtttaattttcactttttaaatgactggatatttaagggtgaatttttgggaggagtagaaaacactgagtatcaacgaatgttgcaaagaaatcatagtgcgacagaagaccaagcttggcccacggcactttcgcagaataaatggggctactttgaatgtatgcagaagctcccttttagttgtcaattggcaagtaaatggaataaagatgtggtgtatttaccattttgtttagcatatatgaatgttaagtatcactctaaactccaattaagtgcctacgatttattgcaacttaaacaaattattgcatttgacgagcaatggtttaatcaaatttttagttcaactgttaaatatttaattttagaagcgaagtaa

SEQ ID NO: 45263 - DNA, 948 bp, Acinetobacter baumannii
atgagagttactgtatccccattaaataaagacataaatgttgaggcaggctcaaacttgctggaatctcttctagcaaatgatattccaatttcatacagttgcatgtctggacagtgcaatacctgccagtgcacgttaacatcggcaagtaacgctggcagtaaagtgctagcgtgcatgactcaattagaaactgactgttcaatagaaatcccggaagtcgacgaaattgttactcatccggcgaaaaaattaaagggcacggttacaagcattgagcagcagacccacgacataattaaaataaagttgaaaaccaataagccattagaatttactgccggacaatatgctttattggaatttgcgccagatgcaaagcgcccctattcaatggcgggattggaccaggacgatgaactagagtttcatatccgtatcgttcctgggggccgagtgactcctaaactcgctgagactttacgagttggcgataaagtgaaagtggctgggcctagaggtgcctcatatctacgtaaggctaacagcgatcccattttgtgcatcgcaggaggaactgggttcgcaccaatgctatctgttgctagaggcgctctggaagcgggtttacaaaatgacgtatttttttactttggcgttcgaaccataaaagatgtttatggaatagacattctagagcgccttagcaatgaatataagaacttcagctacaaaatagtaatcagtgaatcaggcgatgagtccagttatgcacaagggtttgtaaccgacatagtaaaagacgattttgacacttttgcagactggcgaatctaccttgcgggccccccgccgatggttgaggctgctcaagcattagttgttgaaaaaaacgcaactctcgctaatgtttatgctgatgcattttatgcaacaggcgattga

SEQ ID NO: 45264 - DNA, 225 bp, Acinetobacter baumannii
ttggataatgtagattcttatctagagaaagatccgttcggacgtaaatattgtgctaagaatctcctagacgttgaatctcatattttaaaagaggtcgaaagctcgccaagtgttgtcctgccggatgacttaaaaaataatctcgaacgtgaaattctggattattataactatttattatccagcaatgacctcagccaagatatgtcggttccaaattag

SEQ ID NO: 45265 - DNA, 315 bp, Acinetobacter baumannii
atgagtaatagttggatacctgtagcgaatcaagaagatcttatagaagatgatgtaattggtattaatgtaaatgggcaccctgttgcactttatttaattgatggtgaggttttcgctaccgataatgtatgcacccacgggcaggcgttgctgagcgatggtttcgttgaagacggtgaaatagaatgcccccttcaccaggggaagttctgtatcaagtctggtaaggctatgtgtgcaccattaactgaagatatcaaaacctatgaaacctctttggacggtgaaaaaattctcgttcggtttgaataa

SEQ ID NO: 45266 - DNA, 471 bp, Acinetobacter baumannii
atgactacagaactttacttaaaattgacccagttctatcaggattatgcagcgagtattgacctggaagagtgggatagctggtttaacatgtttacagatgattgtatttataaaattcaatcgcgcgaaaattacgatcgagatttgcctatggctgctttgtctctagagggtaaaggcatgctaaaagatcgtatatatggtgttacagaaaccatttttcatgacccatacatgcagaaacatgtcgtttcagccccaagagtgattagtagcagtgaagactttattgatgctcaggccaattactctgtatttagaactaagaatgacggtatagcggaggttttcaatgttgggcggtatgttgatcgcttcgtcattgatggtgactctctgctattgcaatcccgagtctgcgtttttgacaatgacatgattctcaactctctgatatatccgatatga

SEQ ID NO: 45267 - DNA, 1254 bp, Acinetobacter baumannii
gtgaataatcaagaactcttaagcgaaacagagtggaagtttgacgatacaagtaaaattccattctgggcatataccaataaaggtatatacgagaaagagcttaaaaatatcttttacaaaaaacactggtgttatgttggtcttgaagcagaaatacctgaaccaggtgactttaaacgtaccgtgatcggcgagcgttctgtaattatggtgcgtaacgagcaaggcgaaattcatgttgtagagaatatttgtgctcacagagggatgcgattttgccgtaagaaacatggtaatgcacagagctttgtatgcccgtatcaccagtggaattatacgttagaaggtgatttgcagggtgttccatttcgccgtggtgttaagcaggatggtcaagtaaagggcggaatgccaaaagactttaaaccaaaagaacatggcttaactcagctaaaggttgctcaacgaggtggggttgttttcgccagttttgatcatgatgttgagtcatttgaagactttcttggccctgaaatgttgcactactttgaccgcatgtttaatggacgaaaactgaaggttctgggatataacaagcaacggattccgggtaactggaaactgatgatggaaaatatcaaagatccttatcacccgggcttgttgcacacgtggtttgttacttttggattatggcgagcagataatcgctctgaactcaaaatggatgaacattatcgtcacgcggccatgatttctacccgaggcagtggtggtaaaaatgagcaaactaccaacgtcagtagtttcaaagaagagatgcaattgaatgatccgcgctttttggatgtgcagcctgaagaatggtgggatggtcctacagcagtaatgatgacagtgtttccaagcgtaattctacagcaacaggttaacagtgttagcaccaggcatattcagcctaatggtaatggctcctttgacttcgtatggactcactttggctacgaggatgatactcctgagttaacggagcgacggttacggcaagctaacttatttggtcctgcaggatttgtctcagctgatgacggtgaagttatcgagttttcgcaagagggctttgaatctaaaaaagactatcaaactctggttgagttagggggacgggatattgagcatactgaccatatggtatctgaaactcttatccgaggtatgtacgattattggcgcaagcagatgggggtttaa

SEQ ID NO: 45268 - DNA, 909 bp, Acinetobacter baumannii
atgattgagcttcaagacgtcgatttaaatctacttgtaatatttcagctaatgtataaggagcgcaaaacaggagtagtagcagagcaactcaacttatctcagcctgctgtgagtcacgctattggcagattaaggcgactatttaatgatgaactatttgagcgtacagcaagaggtatgcggccaactccgttctctgacaacatttattattctataagccagggattaagcactcttcatgatggaatcaactttcaagataagtttgatcccaacgacagcagcaggatgtttaaagttgtcatgacagatttaggcgaaatgtatattcttccgcgactactggactaccttgcgaaacatgctccaactgtatcaatcagtactgttagagaagctgacggctcgctaagagatgaccttgagtcaggcaacatggatctggcattaggccttattccgcagttagaggctgggttttatcaacgtcggttgtttgagcaacggtatgtatgtttaatgcgcaaaggtcatccactaagtaaaggagaatttagtttagaacgttttgctgaagccgagcatatagttatcgaagccaaggacacaggtcatgtgggcgttgagaaatgccttaaaaaaagtggtatagccagagttatacgattacagcttccaaatttcatgtcagcaccttatatagttgctcaaacagatcttattgcaacagttccagaaacattggccatgaccacaaaagacagcctcggtctcgaggtacgagagcatcctgtagaaattcccccagctcaaatcaatctgttttggcacaaacgttaccatcaggacagtggcaatatgtggttaagaaatgtgttatatgacattattccgtcaaattag

SEQ ID NO: 45269 - DNA, 927 bp, Acinetobacter baumannii
atggattggtcacgacatttaaagctaaagcatataagcctgctcattcatttaaacgagtcaaaaagcttaagcaagacagcgaacgcgttttacactactcagcctgcgttatcacgctggttaaaagagctcgaacaggatgtagggggagtgctttttgagcgaaaggcgaggggcttacaagttacattattaggcgaattactgctggaacacgccattcgaattcaagcagaaatagagcgcgcacaagaaaatatcagtgcagcgaaaaatggttcaggcagaaccatagcaattggaacctcgccagcatcagcgccaagtttcgtaccaacagcgattgcgaagtttcttaaattacacccacaagccagtgtccgcgtgcaagaaagtacaatgaatattttattgtctcaattagctcgaggtgatttagacgtagtagttggacgtttagacaattaccaaccaagttctaagtttcataatgaacacctttacagtgagaatatttgcatcgtgtcccggcctggccaccctttaacacaaaagaaaacgttatattgggatgacctgttaatgttcgactggatagtttggcctgatggatcacctatccggcgtaagtttgatgcgtccttaactctcgcggggcaaaaacctcccatgtacagggttgaatcctcgtctcaggtcgctaatctttggttactgcagcattcgaatatgttgtccgttgcgtcagaagaagtcgcaaatcattttaaacgtagaggttttatggagcccctgaatattgacgtcgctggagacgatggctctgttggtatgtgctggcgagatgaggtagtcgatgataaagccgtggaagcccttttagaatgtttccgagaagctagttgtatgttaaatgaggactga

SEQ ID NO: 45270 - DNA, 642 bp, Acinetobacter baumannii
atgcagctttacagtttcttcaatagttcaacatcttatcgcgtacgtatagcactagctatcaagggtattgcttacgaatacaagggtgtaaatatacggataggagagcaagcatctcctgaatatctcaagttaaacaagtctaagggggtgcctgttcttatcgcagacgacgagtttcagttaacccagtcgcttgccgttatccaatacttagatgacttgcagccatcgccattattaatccctaaagacccaaaagcgaaggcccgtgttttagaactttcaaacgcaattgcttgtgacatgcacccggtaaataatttaaagatcctcggctacttaaagaatgagctaaaaattacagaggatcagaagaacgcatggtatcaacattgggttgcagaggggttttcagctgttgaagcgctactcgaaaaatatggtgagggcccctactgctttggtagctcaccaacccttgccgactgttgcttagtaccccaggttgccaatgctctccgttttaactgtgatctatcatcattcgagaaagttatgcgtgtttatcaacattgtatatcacaaccgcaattccaacaggcagcaccaaaaaatcaacccgatttttctgattaa

SEQ ID NO: 45271 - DNA, 1032 bp, Acinetobacter baumannii
atgcaaactttaggaacacttgaagagcttccaaaagattatcgcgatcaattagagtctaaaaatctggttcctctatggccaagcatgcgagcggtattgccatataatgtgccatctcgtaaaacaacatcactaaactgggattttgaaacgctacgccccttattgttaaaagctggcgaacttactcccatggaaaaagctgaacgtcgggtactagtgttagccaatccagggcatggtttaactaacatgcaagcgactcccagtatttatatgggcatgcaattaattcttcctggtgaaactgcgccgaaccacagacatacaccaaacgctgtgagaataattgttgagggagaaggtgcctacaccaccgtaaacggcgaaccatgtcgtatggaccgaggggaccttattttgacaccctcaggtatgtggcacgaacatcaccacgagggggacgggcctattgtatggttagatgtgcttgatctacccctttgctactaccttgaaagctcttgggctatagaaggcgaaccacaacctaacaaacggccatctgataaatcatttgccgaatacagcgcagcaggcattgtacccagcataaactattctcgagaaaagtcgccagccccaatgcttcgttatccctgggacaaaactcgaaattgcctggttgaaatgtcaaaaatttattctgaggggctgttacgtatcagctatatcaaccccgaaacaggaaaaagtttatttcccagtataggctttggagcaatcatgctacgcccaggagagaccatcacactgcccaaacgaaccactgcatgtatattccatgtagttgaaggcgatggacaggtcgttgtagataattcaaatactatcgaatggattgaaaaggatactgtatctgtacccggctacacaaacattacactaatcaataaatcatcaggttcaccagcatttctgatttctgctgatgaagaaccgttacacagttaccttggcatctattga

SEQ ID NO: 45272 - DNA, 699 bp, Acinetobacter baumannii
atgtctggacaatatctttacccggttactccaccctcttcagttgaggttgtaggtgaggaatcactttataatgtcaatcgtattttttgcgttggcagaaactatcttgcgcatgcctcagaaatgggcgtagcggttgataaatcaaagcaagagcctttctactttctgaaagatccaagcactttaataccgagcggttctgcgatttcttacccaccacaaacatcgaactaccatcatgaaatggaatttgttgttgctattggtaaatcaggttttgaaattaccgaggacgaagcggactcctatatttacggttatgcatgtggtttagacatgacccgtagagatcttcagcttaaagctcgggagactggacgtccttgggatctaggcaaaaattttgaggaatcagctgttatttcacccatagtgaaagcgtcagacagtggaattatcaacgagggctctattgaactcacagtaaacggccaaactaaacagtcctctgatctcaaccttctaatttggagtgtaaaagagatcatcgttcatttatcaaagttttatcatctacagcctggagatcttatctatacaggaactccggaaggtgttggccctgtagtttcaggcgataagattgaaggtgctattgaaaaactcggtaatatcgaattaacgataaaataa

SEQ ID NO: 45273 - DNA, 321 bp, Acinetobacter baumannii
atgactgaaaaaaaattcatcaaagcaatcgaagtaattaaagtaccagaagatgatgtcattggtgttgatattaatggcttaaatttagctatctataatgtagaaggtgaaatttttgctactgataatatttgcacacatggaaatgctaaattatgtgatggatttcttgatgggtacaagatagagtgtcctcttcaccaaggtgagtttgatattcgaagtggcaaggcttgtactagccctttaacggaagatataaaatcgtatcccacaaaagtaggtgacgatgggtttatatatatatcaatggcttaa

SEQ ID NO: 45274 - DNA, 1452 bp, Acinetobacter baumannii
atgaaaacacagctaatcataaataataagtttgtcgatagtgaaagtaaaaacacatttgagcgttacaaccaaacgcttggtgaggttgtaacatctgcggcagcagcgagtgtcgcagatgcaaataatgcagctgaagttgcacaagaagcatttaaatcttggtctaaaactgggcctacagaacgccgtaatgttttattaaaagcagcagatatattagaaagtaaaacagctgagtttattgatgtaatggcgaaagaagttggctcttcagggctatgggctggcttcaatgtcatgttagcagctaatgtttttcgtgaagctgcaagcttagcaactcaaatacaaggtgagactattccaacagataagcctgggacactttcaatgacaatacgtgaacccgtaggtgttattttgagtatagcaccgtggaatgggcctattgtattagcggctcgggctattgcttaccctattgtttgtggaaatagtgttgtatttaaagcttcagaagtaagtcctaaaacgcatagtttagttgttgaggctgttattgaagcaggtttaccggcgggtgttttaaatttactgtccaataaaccagaagacggtgaaagcattgttaatgctttaattgagcacaaagctgtacgaagaataaatttcacaggatcaacccatgttgggcgtattatcgcacaaaaagctggttatcacttaaaacgatgtctattagaattaggtggaaaaagccctcaggtcattcttgatgatgcaaatttaaaagaagcagcaaaagcggcaacttttggatcatttctatatcaaggacaaatatgcatgactactggccgtattattgtagatgaatctgtggctgatgaatttggtgaaatctttgctaaacttgctagcaagctacctgttggaaatccctgcgataataatgattgtattgtaggaccagtggtaacgcagagttcagccgaacgcctaaatggctatattgatgacgcgttgtccaaaggcgctaaactgattacaggtggcaaagcaaatggcacggtgatgaaacctactattcttgatcatgtcacctctgatatggaaatttaccatgaagaatctttcggtccgctaatctgtatggttagagttaagaatgctgatgaagcattacatacagcaaatgacacaccctatggcttatccgctgctgtatttggtaaggatgtcaatagagcattacaaatggctaaagatatcaatgcagggcattgtcatgtcaatggtacaacagtccagaatgatgctcaagcaccttatggtggaaccaaagatagtggctggggacgatttgatggtcgcgccgttattgatgaatttactgaattaaaatggataactattgagcctattgttcaagattatccgttctag

SEQ ID NO: 45275 - DNA, 996 bp, Acinetobacter baumannii
atgacaactcaaaacaaaagaaaattaatgactgttgatgatgtacatgggctatgggccattatgccaactccagctaaagagggagcctcaaattggcgtatgcaagatactgtcgatttagaagaaaccgctcgtgtggtagaagaacttattgcatcaggtgtcgatgccattattagtacaggtacttttggtgagggcgctacgctgactagaaatgaaaaacgcgactttatgagtactattgttaaaacagttaggggccgagttccttacttttgtggtacgactggattgaatacacgtgacacaattgagcttacacaagaagcgagtgaagctggctgtgatggcaccatgcttggattacctatgtggcaattgtgtgatgttccaacagcagttcagttttataaagatgttgctgaagcgtgccctgatatggctatttgtgtatatgccaatagtgaagcattcaaatttgattttcctcgtcaattttgggctcaggtttccgaaataccacaagttattacagcgaaatatttaggtataggttcacttgtacctgatatgaatttaagtcagagaaaaattagatttcttcctctggatgttgacttttatgcagcggcacgtattgctcctgaattttgcactgcattttggacaagtggagcagtatgtggccccgccccagtattaaaattacgagatgaagtaaaaaaagcaagtaaaactggagactgggatgaagctcagaaaatttcaggacaaattgctagaacatatgcaacattatttccaaacggctcgtttaaagatttttcaacttataacatcaatttagaaaaacatagaataaatgctgctggttggatgaatgcaggtccatgccgtcctccttatatttttacacctgaagagtatttagaaggtgcatataaatcaggtaaggcttgggctgagttacaccaaaatctttctaaataa

SEQ ID NO: 45276 - DNA, 264 bp, Acinetobacter baumannii
atgtcagtttatacaattgaacgtgtgttatgggatctacaagattctgatgaaaaagcggctctttatcgtgagcagccgaatgaaattttaaatcaatataatttaaccactgatgagcacagtttgctatcagatatggatattgagtcaatggtctctttaggtatagaccagatgttaatgtttatgacatggcaggcaatcaatggccctcaagggatccccgaatatatgcagcgtcttaatagcattaaatcataa

SEQ ID NO: 45277 - DNA, 828 bp, Acinetobacter baumannii
atgtctcaaattatcagtggctttttaatgccccatgacccattaatcgcagcaatgcctgatgcaccacctgttgaaaaacgtgattcatgcatgaatgcctacaaggatattgttgaaagagtaaaagaacaaaatatagataccgttattatcattggtgatgaccattataccgttaatggcccttattgtgtaccacaagctatgattggtattggtgatgtagaaggaccaaaagaaccttggctagggatccctcgtgagaaaatagctaataatgaaagccttgctaaacatattatggattatgggcatactcatcaagttgactgggcagcatcaaaaacattaatagttgatcactctatcgcaattcccgttgaatatgccgtaaaaccaataaaagatttaaaaattgtgcctatttatattaattcgggtgttgagccttttatcaatagtaaacgtgcttacgaaattggtttatcaattaaagcagcaatcaatagttggtcaggagacgaacgtattgccgtttatggtacaggtggaattagccattggcctggtatggctcaaatgggtagtgttaatgaagcatgggatcgtaaaataatcgatcttatctgtaaggggaatgttgatgagctaatagccatgagcgatgaagaaatattgcgtgaaggaggaaatggcgggttagaaataaaaaacttcatatgtgcaatggggattctagatggctggactggggaagaaatagcatatgaagcagtacccgagtgggttactggttgtggctatctagaaatgaaaataaaataa

SEQ ID NO: 45278 - DNA, 1347 bp, Acinetobacter baumannii
atgtcaaatcaagaagaaaatttaatcgatgttaaccatggaacacaattacataaagtgcatggtgatcaaaaagttttcgagcaggagcttgaaaatgtatttggccgttcatggctatttttaactcatgaatctataattccaaatcatggtgattatgttgttactaaaatgggaacagatgaagtaatcgttagtagacaaaaaaatggtgatgttaaagcatttttaaatgtctgccgtcataggggcgcgcaattgtgtccacacgaagcaggtaatgctaaaggctttgtttgctcttaccatggctgggggtatggcaatactggtgaattacaatccgtaccttttgataaggaggtttatggtggcttacttgataagtgtaaaaactctctacatgaagtggcaaaagttgaaagttataacggcttcatttatggctgttttgatgaaaactccccatcattctctgattatttaggcgatcttaagtggtttttagacccttactttgaacattcgggtggccttgaattaattggacctcctgctcgttgcctaattagagcgaactggaaatgcccagcagaaaactttgtgggtgatgcttaccatgttggctggacacatgcttcagcactacgtactggtcaatcagtttttacaccactggcaggaaatagtacacctccaactgaaggtttaggtctacaaataaccagcaaatttgggtcagggctaggtgtgctgtgggatgcttatgcaggtattcatgatagttcattaattaacgacatgatgcaatgggctaccataaaagagcagcaattagccgaaaaaattggtgctgatcgtgccagaatttatcgatctcatttaaatacgactatctttcctaataatagctttttaacaggatcaggtgtatttaaaacttggcagcctatcgataaagataccacagaagtttttacctggacaatggtagaaaaagatatgccagaagaacttaaacagcgtattgctatgtcagtccagcgtacttttggtgttgcgggttactgggaaagtgatgataatgacaatatggaatccgaaacatacatgacaaaaggttttcaagctagaaataaaaatcttaatgcccaaatgggtattggatatgatgtttacaatggtaaatatcctggtgttgttagtgagtccgctattggagaaacaagttatcgtggttattatcgtgcgtatagtgcctttataaatgctaatagctggcatgagatagaagacaaaagtagtaattgggctgatattttaacaaatgcaaaaaccaaataa

SEQ ID NO: 45279 - DNA, 588 bp, Acinetobacter baumannii
atgactgatacaactaaaaataacgaaccgttagcccttgaaagtgatattgcttttgacgaactaattaaaaacacagaggtatctgaaagtttaagacaggaggtttcttcgtttcttgctagagagtcaagattactagactcaagaatgtataggacttggcatagtgaaatattaagccctgatatcacttatgctgttgttagcaaagaattaagatctataaaagaacggcgctatgaccaacctgataccgtctatttgtttaatgatgatcatcgtcaattaggtcttcgtattgaacatgatcttgatcctcaaaactggcggagtagtccgctagaaaggtattgccgtatacttagtaatattgaaattggccaagaacaaggcagtttagatttagaagtacgttcttcttgtatcttaactcgtggcagaagagcctaccaagtagatcagtttttttacactcggactgatattctgatacgtgatgatcaaggtcaactcaagttaaaatcccgttacattgaatatccagagcgaagtatttctggccataatatgctggtatatctataa

SEQ ID NO: 45280 - DNA, 798 bp, Acinetobacter baumannii
atgaaattgcaaaatcaagttgccattatcacaggagcttcttcaggaataggcttagccgttgcaaaacgctttatcagcgaaggagcaaagctagggcttttggttagaactgaaaaagatgccaaaatgctacaagatacttttgctgataatgttgtagtaaccataggtgatgttagaaattatgacgataacgaaaagcttgttcaatcaactattgataagtttggaacactagattgttttataggtaatgcaggtatttgggattatatgacaccaataaactcaacagaagctagtctattagaatcaggttatcgtgagttatttgatgttaatttacttggttatattcttggtgctaaggccgcgttacctgcacttaaaaaatctaaaggctctatgatttttactgcatcatcatcaagctattcattaggtggaggaggtccattatatgttgcgtctaaacatgcggttttaggctttattagagcattagcatgggagtcagctccagacattcgtattaatggtgttgctgctggtggcacattaacaccactatctggccctgagattttaggcttaggtggggcaagccttgaaacatctgacggaataggagaaatgattggtgctatgacaccactaaaatttgcttccaagccagaagaccatgcaggaatatttgcattattagcctcaagagaagatgccaagtatattactggcactgttatcttaagcgatggcggtattggactaggcatgagacctgatcaaaaatag

SEQ ID NO: 45281 - DNA, 615 bp, Acinetobacter baumannii
ttgaatataaatttcttttttgattttttaagccctttttcatatttagctagcgtaaaacttgcaaagctaagtgacgatacaattcataatatatgctatcacgctattgatttagcacgtgcaaaaaaagcaatcggaaatatcggacctacaaatcgagatatgccagtaaagctatcttacctaaagaaagatatagatcggtgggcagagctgtatgatatcccattaaaatttatacctaattttaattcagaaaaattaaatataggtatgttttatactgcggataaagatatccaagcagaatatgtcaatcttgcattttttttaacatggggaaaaggaaatgcacctgatagcccattagtttttgatgaaatttgtaaaacactgaattgggagataaaagaattcacccattttattgaatcagatataggcataaaagcctaccagaaatctactgaaaacgcgattaagaaacatgtctttggtgtcccaactatgatgattgatgagaatatgtggtggggaaatgaccgtattatatttttagaaaaatttttaaatacaaataataaacaaataaacagaagggaaagcaaatga

SEQ ID NO: 45282 - DNA, 1368 bp, Acinetobacter baumannii
atgaaattaataaaaaataaaataccattgttaatcttaagttctacaatagtaacttgtgctcatgcaaccgatgtatttagattagaaggctttggatcaatatctaaagcaatgggtgggacagccacggcctatgatgttggaccagcaggcatgatgtctaaccctgcaacattatctttaatgaaagagggtacacagtttttgacaggtgtagacattatcgttactgatatttatacccgaaatttatctactggcgaaaaagcttcttctcattcccattctcataatagaggtccttatgccattcctcagcttgctatcacttaccgcacaggaaaatatacagtaggtactggtgtttttggccaaggtggtatcggtactgaatatggcaactcttcatttttatcacaagctactggtggcttagatacaaatttagacgtatccagccgcctttttgttttaaatatcccttttgccataagctatcagttcaatgaaaaattgactataggggcaagtattgatgccacatggcaaggattaaatcttaatttattattaggcgcagatcaactaggctcattaattcaagatggcagagtaagtgggtcaatgttgcctacattaggagaatttcctgatttaagaggtgcccatatagggtttacagaaaacaagcctgttagtaacggcataagctcatggggtgttactgctaaaatgggattaacgtataaaatccaaaaaaatacaaccttaggtatgtcatacagtaccgaagggtatatgaaagatatgacaggtgatgctacgttaactgttgttgatgctgttgctggacaagttcctgtaaatggtgacgtacgccttaaagattttaaattacccgctaatattacaataggcataagccataaaatttcacctgattggatgattacatcagacttctcaagagtattttgggaagatgcaatgaaagatatcgatatcacctattcatcagaaatggggcaattagggattttactacctcaaaattattcagatatatcaatatggtcagtaggaacaaattatcattatcaagattgggaatttagagccggatatagaactgcaacaacgggattgaataacaaaacacttgcaccaactatcccagcattaccaacaaaacacttaacagcaggctttgcttataactttagcaaatactctactctagattttgcatactcctatggattcgatggaaaaatgaaaaacactagcctaccgatgacacctgtacctatagaagcatcaaatacgttaaataatttttcaatttcttatacgcgaaatttctaa

SEQ ID NO: 45283 - DNA, 1503 bp, Acinetobacter baumannii
ttgactgacctacctgatgacgtagcacaactcaaagccatgttgctgcaactgcaagcaaaagagcgtgcacaagcagaagaaattgctgagcttaaaacgacagtgcaactgctggttgaacaactcaacttaagtaaatcaaagcgcttttcatcacaaagtgaaaaggtcgccaagggcacgtttaacgaagctgagcagcaacatgcgttgcccaacgtaaataagagcaaggctaaaacaggcagaaaaccattacctgaagcgcttgagcgtgaagtttatctgcacgaactcagtgccccttgttgtgaatgttgccaaacaccccttcatgaatgcggtaaagaagtcagcgaagagctcaaaatcattccacagaaagtcagcgttatccgtcatgagcgtaccaaatacacgtgtcgtcaatgtgagaaaacacacgtcagcaataaagtcattacggctcctaagcctgcgagcatgttgcctaaaagcatgggcagtgctgaaacgtttgcggcaatcgtcacggctaaatatgttgatgcattaccgctctatcgccaggttgatattttaaatcgctccggtattgaaatcagcagaggcacactcgcaaattggtgtgtacaactaggtgataaagcccaaattatcatcgatgcaatgaaagccaaactcctgaatgaaaatctgatttgtgccgatgaaacaacggtgcaagtgcttcgtgaagaagacagaaaggccgaaactaaatcgtacatgtgggtttatcgcagtggtgaatttgcagaaaacccagctgttatttacgactatcaaccgagtcgtgcagctgcctgtgtaaaggatttcttaacgggatactcaggctacctcctgaccgatggctacagtgcttacaatacgcttgaacaggtcactcaagctgcttgtatggcacatgccagacgtaaatttaccgatgcacaaaaagcatcgccttcaaaaaaagcaggtaaacccgaaaaagcgctcagttacatagccaaactttacggcatagaaaagcaggcaaaaaacttaacctcacaagcgcgtcaacagctgagaaagcaacaagccgaacctatcctcaatgaattttacaattggctaaacagccaacatgttttacctaaaggggcattaggtaaagccattagttacaccttaaatcaatggcccaaattactgacctatcttgaagatggggatatcagtattgataataatgtcacagagcgggatatccggccatttaccacagggcgaaaaaattggatgttctcgacgtcggtgggtggcgctaaagccagtgcgaatttatacagcctggtaatgacctgccgtgccaatgatttgaatccctactactatttccgtcatctctttacggaattacccaagcgtgcaccatcagatgaactgtctgatttgctgccgtggaatgttgatttaggtgaagcagaataa

SEQ ID NO: 45284 - DNA, 705 bp, Acinetobacter baumannii
atgaatcctttccatggtcggcattttcagggcgaaatcattctttgggctgtgcgctggtattgtaaatatggcattagctatcgtgaactgcaggaaatgctggccgaacggggtgtgaatgttgatcacacgactatttaccgttgggttcaacgttatgctcctgaaatagaaaaacgtttacgctggtattggcgtaatcctacagatctgagctcgtggcatattgatgaaacctatgtaaaagtgaatggacgatggtcttatctgtatcgtgcagtcgatcaacgtggcgataccattgatttttatctttcttctagacgtaataccaaatcagcatattgttttcttggaaaaattttaaataatgtgaagaagtggcaaattccacaagtgatcaacacggataaagcacccacatatggacgtgctttatcacggttaaaacgggaaggtaaatgtccaccagaccttgagcacaggcagattaagtataaaaataacgtgattgaatgtgatcatggcaagctaaagcggatcatcagggccacattaggattcaaatctatgaagacggcttatgccacaattaaaggtattgaagtcatgcgtgcactacgtaaaggacaagcatcgtcattttattatggtcagcctcagggtgaagtgtgtctaatcaacagggttttcggtctctaa

SEQ ID NO: 45285 - DNA, 831 bp, Acinetobacter baumannii
atggctaatcatatcgctaaaaagaatagttatttaaaaggtgtatgtaaccttgtttcaatggactattgttcgattgagggcttatatcaatctatagaagttagtgaagtatgggggattggtagaaagcatactaaaaagctgaatagcctaagcattaatacagttctagattttgtctgtgcttcacccttaatgattagagatcaattctctgtagtcatgcacagaacactattagaattacagggaatttcttgcattgaaattgagcaaagtcctaaagcaaaaaaacaaataatagcaagccgttcctttggccagaaagtttatagctgtgaggatcttaaagaagcgattacgctttatgttcaggatgccgtaagccgtttaagaagtgaaaatttactatgtggctgtattattagttttgttcaatctaatccatttgatacttctgtgcctttttataataaatctttgtcttacgctttacccgatccatcagacaatagtttattactttctaaaattgctacctcaatggttgatcagctataccagaagaatattggatttaaaaaatgtggagttatcctcacttgtcttgaacctaaagctactcatatttatgacctattcacggacatgaacaagatagaatcaagtaataaacttatggattcactcgatgatatacagaataaatttggtaagagaaaaataggattaggtgccagtatgctacctgatagaaattggaatatgtcacgtaataagctgtctcccaattactttaaatgggatcaacttatgagtgttaagtaa

SEQ ID NO: 45286 - DNA, 396 bp, Acinetobacter baumannii
ttgatttcatctataccattatctgtagttgctaaaaatgttgagactaaagtaagctttttaaaagattcttctcaaattacgttaaccggaaagtttcaaggttatgatgatgtaagatatcgagtttttgcaaaaagtggacagattttaaaatttaatattaatagttatggtaatttagcttatattaatattttcgctccaggtcaaaagcctggtaaagataagccattattcgtgggttcgactgtaggtttttcaggtgaagtaacgctacctgttgatggtgattatattgttcaagtttatcaaatgaaaaaaagcgcacaaagaaatagagcagtttcttttaatctagatctacaaatattagataataaaaaaataaaatga

SEQ ID NO: 45287 - DNA, 408 bp, Acinetobacter baumannii
atggcatcagcaacaccagataaaatacgagattgtgcagttgttattggcgttggggcatcacagggcatcggtgctgctgtctgtcatcgctttgcaaaagagggcttaaaagtttacgttgctggacgtactttccaaaaaattgaggcaatagctgccgaaatccatgccaatgcaggcgaagctgtggcatttcgtctagatgcagaagatatcaatcaagtacaggcattgtttgacaccatcataagtcagaatgaacgtattactgcagttattcataatgttggggggaaatattccctcaatttttttacgcaatccgctatcgttttttactcaaatgtggcaatccacttttttatcagcctatttagtttctcaaagctgtttaaaaatatttaa

SEQ ID NO: 45288 - DNA, 2460 bp, Acinetobacter baumannii
atgaaatatattataggtgtcttatgtgttacatatcttcctgcatatgcttttgctgaacagttacaagacaatacgaatgtgccggttccaagtattccggatacgattgacagcaaaagtaaaaacacgcagataaagatgaatgaacaggagcaagataataacgttgcacagctttttttaaatatttctattaattccaacccttctgaggatttagtagccgtaagacaagatcaagataaaaaattatatatccgtgcccgtgacttaaaaactttaagactaaaaatggatgattccatttctgatagccaatggatttgtcttaatgagcttaaagatatccggtttaaatacttggagaatgagcagtctttaaacttacaagtacctcctcacatgatgacaggctattcggttgacttaaaagggcagcagatcaccagtccgcagctacttaaaataaagcctttaaacgctgcaatcctgaactatagcctgtatcacaccataactaatgatgagaatgttttctccggttcggcagagggaattttcaacagtgcgatcggtaacttttcgtctggtgtgttatataacggaaatgatgaaaatagttatagccacgaaaaatgggtacgtctggaaagtaaatggcaatatgtagaccctgaaaagatcaggatatataccctaggggactttatctccaatagttcggattggggcagcagcgtccgccttgcaggctttcaatggtcgagtgcctatactcaacgtggcgatattgtcacttcggcactgccacaattctccggttcagccgcactgccttcaacactggatttatacgttaaccagcaaaagatttattcaggacttgtcccgtcaggcccttttgatattaaacagctcccgtttatttccggaaatgaggtcacacttgtaactacggatgctacgggtcggcagagcattaccaaaaagccttactatttttcatccaagattctggcaaaaggtattaatgagttttcagtggatgttggggttccgcgctataactatggcctatactcgaacgattatgacgatgctacctttgcatcaggggcaattcgatatggttacagcaactcattaaccttaagcggtggggtagaggcttcaacagatggtttgtctaacattggaacaggctttgccaagaacctgttcggtattggggtgattaatgctgatattgcagcaagccagtataaagatgaaaacggttattctgccttgttgggtttagaaggtcggattagtaaaaatatttcttttaacaccagttaccgcaaaatattcgataactattttgatttggcacgagtatctcaggttcgatatttaaaagataatcagagcgatgctgagtcacaaaactaccttaactacagtgcgttggcagatgaaatttttagggcaggaattaactataacttttatgcaggttatggggcctatctggggtataaccagattaaatatagtgataatcaatataaactgctatcggccaatttaagtggaagtctgaacaagaactggggattttatacctctgcctataaagattatgaaaatcacaaggactacggtatttactttgcgcttcgatatacaccttcgaataaattcaatgccattactagtgtttctagcgacagcggtagattgagttatcgacaagaaattttcggtttgtcggacccgcaaattgggtcatttggatggggaggctatgttgagcgagatcaagataaccacgacaacaatgcatcaatctatgcctcttaccgtgcccgtgctgcttatttggcaggtcgctataaccgaattggagataacgatcaggttgctctttcggcaacgggatctttggtagctgcagcagggcggctctttgcggccaatgaaattggagatggatatgctgttgtcactaatgcaggcccgcaaagccaaatcttaaatggtggagtaaatttaggctttacggataaatcagggagatttttgattcctagtctcatgccatatcaagagaaccatatttatttagatccttcattcttgcctctaaattggagcgttaactccactgaacaaaaaactgttgtaggttatcgccaaggaacaatgattgattttggtgcacatcaggtcatctcaggattagtgaaacttgttgataaaaataactcaccgttattaccggggtatagcgttcaaattaatggacagcaagatggagtggttggctatgacggtgaagtgtttatttcaaacttattaaaacaaaacaaacttgtagtcgatcttcttgatcatggctcatgccaagttgactttacctataacagtaatcagtactcaactaaaaaattgggaccttatgtatgtcattaa

SEQ ID NO: 45289 - DNA, 285 bp, Acinetobacter baumannii
gtgaattggaaccgtacagatttaataaattcaacgcatgcaattctatctgcacatatttttttaatctctttagaggacattggcatgactgaaggtgtaaaagtttttaccgcattggatatcgaattagctcaaaaaactactgatattgttaataaccaacgttatggcaaccgtccagaatttgaaacacttaccttaggttgggatcgcaaaactggtgctgttgcagttaactacacttttgcagaagaacaacaagttaatgatcaaacaatttag

SEQ ID NO: 45290 - DNA, 1536 bp, Acinetobacter baumannii
atgtcttctcggttcttatcgttgttactcggtgaaaatgttaattcatatgatcagcaatttgatacctctaatcaggatgctacggcgcagctttatgaatccatggcaccattttcacttgggaccaatcaaaccaaagccaataaaaaacgtactagaaaagaaattcttacaaaatgggagagaatgttacgctttgcacctatcgcagagggtatggggattcatgtttctgcagcattaggcggagattcttatagcggccaacaagtctttattacacctgccgaacgcttgaaaaaggccagtgggccagcagctgaaaaactaaaaaaacaactagatgagcgccgtgtaaagatggaaaagcttatcaataagaatttaagcaaacttgcccgagatgctatttctttcggtgattcctatgcacgtatttatgggaaaaaagataaaggtgtaattgacctcgtatgtaatgagtatacatatccgccattaatacagcctttcgaacaaggcagtaagactgtcgcctttttttgtttagatcctcgtaattggcaaaaaactattaccaaactgaatactattcaaatggtacgtttcaaaatgccccgtatgagcaatattgctcaatatgagcttgtagaaactggtcttgtcacgaaaatgttagagggggatgatccagatgagctaccaatcttaccagcgcatttgggcggctcattcctttacgaaattgaggatgtttatgatgatgtaatccttgctttggcatctatgaacagccagcaaattgcagataccgtaaatcagatgttcttgacagtaaatatgtcaggaatgccaccagcacaacgtcaagcctatatccgtggtttagaaggtttacttaaaaatcatgaggcttatgtccgcgatgcgttatcaggtggtgaagcagtttggaatactgcttttcacatgcttccggtatttgatgaaaaacaagttctaaatccagtgggtgatatcaagaatcaacgaagctcacctattaatattgaacagttcatgattaatgtccgtttgctgatgggcggaattggtctagatccaagcatggtcggttgggctgatatgttaactggtggtataggagaaggtggagcattccatacttctgcacaaatcatgcgtaggtcacaagatattcgaacagcatcttccgaagggattaatcaaattcttcatttggattgggggttcgcttacaacgaacaatttgagcctgaagattacccttggcaagtcgaatattattcaaaccaaactgcagcagctacagaagaaatcaacaatgctcaatcaagaatgaatacaacattacttaaaacacaagtaatcgcatcattgaaagaatcaaatttagatgtagatattatggcgtacattcttgagcgcgatacaggtatgaaatatgaggaagcattaacattagctgaaagtattgctaagagccgtaaatttccagaggatgaagaataa

SEQ ID NO: 45291 - DNA, 654 bp, Acinetobacter baumannii
atggctttttttgaatatgaaacacagaataaaacgtctaataacagttttggtaatgttttaaaccccttcaaagaacgttttgcaagaaatcctgtcttatggtctggattgacagttgataaagctgtttctcattatcaagagctctatgcattaggaactctctcagccgcccattttggaatagaaattagaccttatcgggcaaatagtaagattgcccaagcgaatattccaatttttgatccttcgaataaaattgcttggttagcaaataatgttgatgtatcacttctagttgcacaaacagattcagtacatgttggacactatcaactcaactatataaccagtaatgcctcaaatgaattaagtatctcatttattgagactaaagctgcagctattgcaaatagtgcattagccataaagcagataatgtttaataaagatggtacacaaccgccacctatagaatatttaatgcgtttgaaaatatatgcttttgataaagctgtaagatctcaacatcattttgaaattgagcatttagtatctctacaagctggtaatttaccattagatgcagcaaataaagcccattcaatagtcaccttaaatttcactaaaatgttcccaaacttaaaataa

SEQ ID NO: 45292 - DNA, 1959 bp, Acinetobacter baumannii
gtgagtgttaaatcaatttttactcaaacacatgcaccacatcaaagccgattagtacttggttttgattcaatggtgaatagtggcgcttgttcaattggatttattaaaggtgattaccgtcaaattaatgccttagtcactgaagactacacggaaaatgacatctggcgagtgattaacttaaaagggcagaagagcggtatcgaagcttatgattcagttgccatactgggtgcaattgatgatcagcatgctggtgaactagcaatcttacagtttggacgcatgtttgatgcttgtgttacagatgtaattgaaacaaatcaatttggacttaaacgccacctatcttccaaacaatttaatctgtctgggtctaaacctattcaaagatggcaattagagcaattacagaacgtgattgctgcagaaacacctgaatgggatggtatcagtttagtttctcatgatggtgatacagcaaaacttctactagatatgcagcgaaatgatgaccatagccagctgctaagtaaatttgatgggttgcctacgctattatctagtctggaagtagaagaagctcattatgattctattattgtcgattaccagcatttagagcagctgtctgctatcttgcatcattctatggatcagttttctaaaactggtgttaaagtcattaacgttactgaaagtaagccattcaagcataaaaaagtacttcaaattgcgcttacttatgattttgatgacggtcaaaacttcacaatcctttttcataagccagatcgattatccaaaaaaattagtccaacggattcattactttcgtggaagattttaatgaataatcgtgatattacagctgcaattcagccaaaccaaggagaaggaatttcaattcctgttctcgctggtcgaattatgaagttgattaatcaaaacagtaaccgttttaagcgtttacaatctaaaaaagcagaaaaggccaaagctttagcagatgcagaaagtcgtattgaacaaaaacaaaaccagttaaattctttgaatgaggaaatttccaatttattaaatgatttggatcaattgcaaacttcattgcaatcgaagcaatcagaagaaaataaagaaatcataaaagagaacattctaaatgatgattcaccagatagtatttcagatgaagaagccgaacgattaagagctgatttaaagcgtttgaatgcagatccgcaatgggctggtgaagatggcttacgttataaagctttctatgagcgtataaataaggctctagagggcgattctgaatcagtatcttgggctcaagaatggatatctgaattagatgaacaagatctagctcaacagcaagcagaactagaatcaaaaaaactcattgatgctcaaattgaggcaaaccaaaaaaggaatgaagaagtattagcagcacgttcagctggtatggctgaaaacaaaatgatgcaggcatggttagacactttagaaaatcctgaagattctaacaatattgactttatggggtgggtttcagatcgccgtggcgagttcttacaaacttggaatagggctgaaggttcaccagaatatttaacagcattttatgaatattcaagagcatgggcagatgaacatttagcggatcgccttattaataaagagccaattcaaaattcagctacagatgaacctgaagaactaaatactccaactgaggttgaagatcttcaatctagtaagacaaatgatgaaggcaatcaactttatcgttcagtaattgaagggcaggttaaagttaatctcgagttactagaacaaattcgggacgaagcagaaaaagacttaaatgatccacttcttattccggctgtgacagagctattgaaccaagtacaaacaatggaaatggaagcggagaatatctaa

SEQ ID NO: 45293 - DNA, 1512 bp, Acinetobacter baumannii
atgacaatattaaaacaaatttctatcctagatattactaataatccattagttgtaatcgatcaaatgattagttttttaaaacctaaaccgccctttactgggcttttgaagggtagaactaataatgtgaaaacagccaaaggtgaaaagatttctactgtctttgctttagtcgatattgatcaagtcattgcatctcatacggcgacaggtgcagaaaacccaaactatccgcaagaattgcagccacgagatcgaagtcgagaatcatcacaagcatgggtacagaaaactgctaatgatttagatcccgaaagccttggccgctcaggacgggcagatacgggagcaccaataactggcgatgatttagtagttgaatcaggaaatggccgaaccatggcaatcaagcttgcatatgagcgtggtaccgcagatgagtataagcaatggttgattgatgaagccgactactttgggtttagcagtgagcagatccaaaccattgcacagccaatattgatacggattcgtaatactgagatcgatagagctcaatttgcgattgatgctaaccaagacgataagttgtcatttactgctacagagcgggctaaagcagatgcaaagcgattagatgaaaatttacttgctctatttaatcctagtgaagacggtgatttactagcagtaagtaaccaaaagtttattcaaggttttttaaccaaattaggtgatacagaagcagcccagtacaccacgaaagataaaaaaccaacacaagcactgataaacagaatcaaggccgcaatttttagtaaagcttacaatgatgatcgtttgctagaaatgatggctgatcatacaaaaccagatcttcaaaatatgcttaatgcgcttggtgttgctgcgcctaaatttattgaagcgcaagctataagtcgtggaaatgttcaagatatatcggatcaaatcgttgatggaatggagcaagccattgatcaacgtgttgctaatgcaattattgatgcagcaaacaccattttatctgcaaagcaaaatgatcaagatattgttgagtttgtaaagcagcaagggctttttgaggatctaggagaaggtgttgctgagctcgccgtatttctcgctaagaatagccgcagttcaaaaaaaatgagtatgttatttaaagcattagctgaatttgcagagaaacaggctttagatagcagcaatgtaggtttgtttggtgagcctgaaccagtaagtgtaaaagatgctatccaatatgcacaacaagtgcttggtgatgatttcattagtgtgcaaatgtacgattctttgattgagtccagtagctcaagtagccctaagataattaggttaacaaaagaaggggctgaacgttttaacagtgctttgaaaatcaaagttgctcaaggtgatgacattgaaaaaccagaagtaaacaaaattaatgacatcctattcgaaggattagatatttag

SEQ ID NO: 45294 - DNA, 3831 bp, Acinetobacter baumannii
atgtccaattttaagctcaaaccaattactaaagatactgtattggttgcgatttattacatgattgatttcatgcattttcagagcaatattgctcggtttttccttcttatcatccataagcaaatagaacttaacttgcctgtagcgaagcaagcattatcctttgcacgtcaagaaagtgactttccaaaattggatgaagtagttgaagtcttatatgcggaagctatcaaaaacattgatgaatcagttattgaacacctaaataacggttcgagaaatgttattgatcagctggagattattgtctccctttttgcatgtgaaaaagagctgaagccttacacaactaaaaagaataaaacactacaggttattggcctaaaaggcatcaaattaaccaaagctaaagaatatgacccttatgccttttattctcagggtgaaattttagtacgttcaaaacatcttaaagccattccagactcacttctttccgaagatcagcaactagtaaaagggttattctcctatgtatcaaataccaattcagatgtggaatcagttggcgaatttcgtttcagatccagaggaccaattgtttctgcaaatggatcaggaaaaaatgaactcgagactgcagaagcaatcagaaatgatggagaaactggggatctcagaaacagtagtactggcttatcaaaaagtgatgatgcaagtttacttggcggccgaaatccaagaaatgaatcttcagatggagatagtagaaccagtactaaccggattaacagcagcggaagcggtgaactatctggtaagagatcatctcttaaacgagcaagagatcgatcaattgtacaaactgctaaatcagttagagctgccatagatgaaaagctggaagctcaattaaaagcagataatgttgaaactgtttggagtgatgcttcaaatattgatgaagctttgccatatctacaacctgcacagcgtggggatgtttttaaaacggaaaagcacttaatcgaggaaaataagaagggtattctttttacaaatggcacaggtacaggcaaaacctttactgggctgggtgttgcaaagcgttttattaatgctggtcttaagaatattttgattgttaccctaaacgataaaatcgctaatgactttgtaaaaagttcaagtcctttgcatataaaggcttataaattaaaaagcattaaagataacggcggtgatgagcactcagtagtggtcacaacatttgctaattttggtcaaaacacaagtttggttcataaacattgggatcttattttaattgatgaagcccatactctttcacaatcatctgatggtaaatcaactgcagccttaaacaagctacgagcattaacaggtcatttgcgaggttttaatgaatggtttgataataaatttgaagatcagatgcctactgaagaactcgatgaaaatggcaaagaaactgaacaatacctaactgcttataacaaaatgcaggtccttagaaatgaacaaagaaaaatctggaatctgaactggaaacaccagaaaagtaagtgcaaagttgttttcttatctgctacgccatttagttatcacttttcacttgattgggcggagggctatttatttgattatatgtcaccttctgtatctattgatgaccaaggtaatttagcagaaggttttggtaaggctcgagagcacttttatatgggaaatcttggatatcgaaaacgatatggtaagttgacccgtccagaggccaaggtggatacgggtgtacttgaaagacagtttgctgaaaatcttaaaaacactggtgccatgtctggacgcgatttagaagttaattttgactatgatcgtaaatttattctaataggctctcgtgttggtgaacttattgatgaaggtttaacttatcttcgcaatggttataaagaaatcgaaggacataaaacacgaacttttgaagaatgggctgctcagactggaaaaccaacaacaggctggggacgtcatgcatcgatgcaagaatatgatcgtttattcactggaaatcgttttaaaaatatatacgaaattattgcaaagcgatttgattatttagcaagacgccgtttgttagaagctattaaagctgaagcttgtgttgatatggtgaaaaagcacttagcattaggccgtaaagtagttattttccatgattataatgaaggtggtggttttgcacctttcttaattagtcagcttgatatcgaaaaatatgagagccatttaagggatgatattgagcttgaatataattcattcaaggaaactcgcccagatcttgtgaatctcaatcttgactacgattcaccagttgagaccttaaagaaagcatttccaaatgctctattatttaatggccgcatttcaaagcaacaacgtgaatctaatgtagggttatttaatacagatggtagcgggcacgatattcttattctgcagtcagatgctggttcaactggaattagcttgcatgatacgactggtaaacatcagcgagttctaattaatattgggcagccaacaaagccagccaagttaagacagacagaagggcgtatctatcgaactggacaagcatcgaatgctattcagagatacttaactactggtactgcatgggaacgggctgcatttgcagacacgattgctggacgggcagaaacggtagataactttgcaaaaggtgctgatgctgtagtaagtatcaaagaagcgttaattcaggcttatgaagatgctaaatatgaagagccaagcctaaatgatgggattggtggtaaagcgtatgatgaagaaaatgcccgtattgccaagctaacgccatttgatcaagctctaacattctactatgcaaaaggcaaacgttctgaaagtcgtgataatcgtgaaggtaaggaatggtatgccacaccagaacctctcggattcaaaatgattgaatgggcaggggtgcacacaggcgattctgtgcttgaacctagtgctggtgatggagctattggtcgttttgttccgcaggatgtagagctgacaatgattgaaccgaccgaatctttagctagtcgggctcaaatggcaaatacaggtgctaaagtaattgtcgatacattcgagtctttagagactttaaataagtatcatgcgattgtaatgaatccaccgtttggacatgctggaacgctggcaattcaacatatcaagaaagcttttggtcatctttatgatggtggtcgtattgtcgcattggtaccacgtggttcaatggattcaaaagttgacgagtttattgaaagcacacctggtgcagttctgacagctgaaatctggttgcctcaatcgacctttaaaaatgctggtaccgccgtttcaactcgaatcatcattattgaaaaacatgcaggctctaatgatgtacctattacacgagaattagactttacacatctttcaagtgtggaagacctcttttctgaaatccgtgatatcgcaatgcctccaagaaaactacgcattgacgagcagcttgctaagtacgaactttatgtcagaactgaacgtagtaagtatgttttcaatggtgacggcgttgataaacctcagatcaagaatatcatgctcaaattctggggttcggaagtgaatgagtttgatgaaattgttatgccttataataagtctgcagaaatcatcaagaagattgatgaatttgagcaagagaatggcactagtctagcagcttag

SEQ ID NO: 45295 - DNA, 450 bp, Acinetobacter baumannii
atgaaatttgaagagttaaagaatttattagctaatacgggtttttataaggttgaaaatgctgaaacatatgtagcattagacgatattgatttgaaatttcatttaataaatgagactcaagttgccgatgatagtcgtgatcgcactattttagcgattaaaaatgcctttagacaggatatgcatagttataaaatcagtgtttttcaattaaatattacttataatggggagctagttcaaagttttgatattcataaaatttctggttttgaatcatatactgatgacaaattaattgaattatacttcccaattcaaaatggtaaacttatatatacgccgattcctgaagatgatattttcagacgagcgatcattcgtaatttaaattctaaacaagcttttgaaatactttcagagtctttcagtccatcaattatttaa

SEQ ID NO: 45296 - DNA, 813 bp, Acinetobacter baumannii
atgtccaaagctttagcttatgcaccagctgtcaatacagctaaaacaaagttgcccagtactgaatcagatcctttctatggctcaatttcaaagcataaatatgctgaattttcactttgtgataaagatggtaacccagtagcatcacccgtaattcgtgctttattgactgacggcgacaaaagtattgagagccaatggcaaactccatttgaaaatagcaatccagaactaaagatgcctatgttgatggctaacttgcaaactgggcagatgcttcaagctgctgcaacgctaggagagaactcgccattcatgtcagcattaagtgatatggcatcaggacctttagcaacggctgaaattgcgcttaagagcgttgaagggcgaacaaatttaaccaaagtgaatacaactcaagtattcctatcaacatcttcagtacgccttaatttatcaatttttttcttggcattaagtgatgcgagatccgaagttgaagacaagattatgcaattagaagcttggagtttaccagtatcattatcctctgattctacgctgcaaaatgtcgttaatgattcaaatacaaccttagaaggtttgttttcaggggttatcccaccttttgtatctcttactacacatggcaaaacttataaaccttttattattgaaagtgtttcagcaccaatagttgcaccaattgatgaaaaaggtaaccggttaagtttagccgtcaatattagtttaatgagtcgaactgcatgggactcaaaagacatttactcattatatggagccaactaa

SEQ ID NO: 45297 - DNA, 696 bp, Acinetobacter baumannii
atgattacatttgatcctgtgccagttggtgaaaatacctttctaatgcaagagcttagttttgaacagtctcttaaaatttcaatcattgcaccaaattttaatgaaaaaagacttacagcttttcttaagtcagctttagacagtgtagatcctttacttttaacaattcaggaacggtatctgcttctgcttaagtatcttgaaaaacaaagtaataccatgttggaagtgaatacagactggtccaaagttttccttcaatcagaaaataattggaatacagaaattactcaaaatggagttacggttagacagcttattggaatggaagcggagttcttagaggcaaattgcaagaatgtcgctgaatggattgcctgcatgatggcatttcagttgagctattcaaatcatgaacatttagctttattgccagatagaacaaatcctcaattatttgaagaaaaatttaaacagcggctagatttcattaagaaaatgccagctagtgaattcgatttgtgttatcaggattttaataatttaaacaatgaattgtttactcatttgcggttaagtgttgataatcacggtattttagtcgaaagaggtgcagatgacgcgcctgcacgatttcgcaccgcttccgtctttacaggaatcatcaaagagttggaccgatcttttgcttga

SEQ ID NO: 45298 - DNA, 306 bp, Acinetobacter baumannii
atgtctgatcatcaggcaattgaagtcacagtcactacttttgctaataaaactactttttggagtggtctagcaagtgcttttggctcattaacatcaattaattggttgagctatacaggtgcaattgtggctgttgttggcctattcataagtttcatttttcagtggagacgtgatcgcagagaacgtaaagaaagtgcacttcgtgaaaaagtgagcaaattacgtgaacaagaaagcgaactgcgtatcaaggctcttttaaatgagcaaatgaatcaacaaaagaggaaagatgaatga

SEQ ID NO: 45299 - DNA, 771 bp, Acinetobacter baumannii
atgaagttcattgaaaatagtgcttggaagtacctttcagtcaagttgcccgcagtaggtgcattcatcatgcttattctgctaccagcattacaatggggggtagattatcaagttatccctgaaaaatatcatgcgtttgtgactggtactttaatgctgggcctgtcatggatcggaaagaaaatttctcagccgcgtattaacgggcctcaattatcgggccagttagtaggaatcaacactttaatgaatattcctacaccgacaaagcttgatgaattagcttggatagctgaagcaaaaaaacatattggtcttcaagaaataccaggtaaacagcacaatccaactattctgaaatggttaaaagagcttaaagcttggtgggcggatgatgaaacagcgtggtgcggtactttcgttgctcattgcttgaaatcagctggtattgcttatcctaagcattggtaccgtgcattggattacgtgaattacggtgcaaaactaacaaaacctgcttatggttgtgttgctattaaaacccgtaaaggtggaggccatgtttgttttgtcgtaggacgtgataagaccactgggaaacttgtttgtcttggtggtaaccaatcaaataaagtgtgttacgcgctatataatgattcagatttccaagagttccgttggtatggacatactcctcaaccagcaagtaagcgttacaccttaccgctattaagcggagtgacagcaattagagttactgaagcataa

SEQ ID NO: 45300 - DNA, 1353 bp, Acinetobacter baumannii
atgtctaaacattacgattatattgcaattggtggaggtagtggcggtatagcctctgtaaatcgagcagccatgtatggaaaaaaatgtgcattaattgaagcgggagatattggtggcacatgcgttaatgttggctgtgtccctaaaaaagtgatgtggtacgctgctcatattagtgatgcaattcgtcaatatgcgccatcatatggttttactacggaagtaaaatcatttgattggcagaaactcattagaaatagacaggcatatatcgaaagaattcatacctcttataacaatgtcctcagtaaaaataatgttgatgtcatacatgggtttgcaaaatttattgataaaaacacaattgaagtaaacggagatttattaacagctgatcacattctcatagctactggtacagaagcgagttggcctgcaattgaaggggctgaacatggtatcgattcaaatggcttttttgatttagaagtactaccaaaacgtaccgctattgtgggttcaggatatattgcagtagaaatagctggtgtccttaaatcattaggttcagatgtccagctttttattcgacgcgaaaaactcctacgtaatctagatcagttcttaggagaagcattattagaaattatgcagagtgagaatattaaaattcataaaaatgctgaaatcagtaaagtaacaaaattagaagacggttctatcatgttgcatttaaaagatggaactcaacaagttgtagattgtcttatttgggctgttggaaggaaacccaataccaaagctctccaacttgaattaacaaatgtaaaattggatgaacaagggtttatcaaagttgataagttccaaaatacaacacgcgctggtatttatgcagttggagatattactggaaaggttgaattaacacctgttgcagttgctgccggacgtaggctcgcagaacggttatttaataacaagcctaatgaatgcttagattacaacaatatccccactgtagtatttagtcacccgcctattggaacagttggattaaccgaagaacaggcgattgaagaatttggcaaagatatggttaaagtatacaaatcttcatttacagcaatgtatgacgccgtggcacaacataaacaactcactaaaatgaaacttatatgtgtaggtgtagaggaaaaaattgttggtatccatggaattggtctgaatatggatgaaattctacaaggctttgcagtggctctaaagatgggtgcaactaaaaaggactttgataataccgttgctattcatcctacatcatctgaagaattcgtgacgatgcgttga

SEQ ID NO: 45301 - DNA, 1215 bp, Acinetobacter baumannii
atggtaggttgcaacattcagaataataaaaaaatttatggcttacatgccactactattattagtttggctcaattattggccacatcattgtggtttagtgcaaatagtgcagcaatagatttaatgcaacaatggcaaataaaagttgcagatattggttggattaccaacgctgttcaagcaggatttatcattggaacttttgtatttgcttatacagaaatagcagaccgctttaaagccagacatatttttgtttgttcagcactattaggcgccttttttaatttctgctttgcatggttcgctcatggatttatggatgcccttatatatcgttttctcgtgggattatgtcttgcagggatctatccaatcggaatgaaacttatcgttctatgggcacctcatcaggctgggcgagcactagcaaaattagttgctatgctgacattaggcacagctcttccctattttattaatagtttccccactcattttgcatggcaaacagtcatgatctgttcttcaagtcttgcattgatcgcagccttgttaatttaccagctaggagacccaacaatctctccaaaatcacaaaatatagtgtcatcaggtggtacttttcaggttttcaaaattcgaaaatttcgtgcagctgctataggctattttggtcatatgtgggaattatatgccttttggacgattattcctttatttattgctaaatcaggtattccagaaaaattgggatacaacaacatttcgctccttactttttttgtaatggcatgtggagcaattggttgcttggtgggcggatatctttctaaatatataggtaatagatatgttgctataggatctttatctatctcaggttttagttgcttggtatttgctctaggctggcgttttttacctgcgtggttcttattggttttatttgcgatctggggagcatctgttattgcagactcaccgcaattctctgcgctttccgcccaatcttgtccctccgaaaaagttggtgcggcattagctattcaaaattcaattggttttacactgactatcatatctattgcattgacaacctatgcctttgaaataattggcttggattcagcatggatattattgattggccccattctaggtgttgctggattctactattcagcaaataaaggagttatccatgtctaa

SEQ ID NO: 45302 - DNA, 564 bp, Acinetobacter baumannii
atgaccattgatactcgccaaagtttaattaactcagcagagcttatgttgagatcaagaggttatgctgcttttagttatgctgatttagagaagattgttggaattaaaaaagccagtattcatcattattttcccaaaaaagaagatttaggaattttaatagtcgaaacatatattgaacagactattcaagattttgaaaaaatcgaacgtgattttcctaatgcattcggacgcctttgtgcctttgcttccttatttagaagctcaatgtctgaaggaatgttaccgttatgtggagctcttgctgctgaaatggctgttttaccagagagcatgcaggagttaactcgaaagtattttgaaatccaattaacttggatagaaaaaatcatccatttaggtgtagaaaatggagaacttgccgaaggtgatgcaaatcagcaagcctttcaattattgagtttaatggaaggaagtagttttgtaagatgggcaatgaataaagggacagagcttgatcctaaggtaataggaaaaattgttggcgtgctttcttaa

SEQ ID NO: 45303 - DNA, 555 bp, Acinetobacter baumannii
atgaacaatgtagtgaatgaaattgatctaaatgcttttcaacaatttgcagatagagtaagccagaatcctaccacttcaaaagctcgttttaacgtacaaacaagatgggcgggtcaaacacgttctgtttccactgtgaaatcttatgaactttttggtaagacttatgaacgtaacttccatatagctgctgatgaacctcatgaaattttaggaacagatagtgcacctaacccacaagaattattgatggcggcacttaatgcatgtcttacagttgcttatgtagctattgctgctactaaaggtgtcaagattaattcattagaaattgatacttctggagagctggatctcagaggtttcttaggcttagatgaaaaaattaatcctggatatgatgaagtccaatacactgtagttattgatacagatgggacacaagaacaattggatgaaatacatagtgctgttcttaaaacttcaccaaatttcgccaatttttcacgatcaattcaaatgaaaccgcaattagtgattgcaaacaaataa

SEQ ID NO: 45304 - DNA, 336 bp, Acinetobacter baumannii
atgaacggtgaatggactaacagattatctgcattagttaaaaatattggtaattttgcaaaagcaaataaacccgttgccactgcttttcacaacttagaagttgcgacgcgtgaaaataaagtactcgacgcaaaaactcacgagttaattgcgttggcagtagcagttactacgcgttgtgatggttgtatatcagctcatgcgggcgcagctaaaaaagcaggcgctacaaaagaagaagttgcggcagctttaggaactgctatcgctttaaatgctggtgcagcctatgtttactcagcacgaactttagatgcttatgacgaaatgtaa

SEQ ID NO: 45305 - DNA, 795 bp, Acinetobacter baumannii
atgagtgagcaacaatttaaaggccagaaacttctcgtcattggtggtactagtggcattggtttagaaacagcaaagaaagtcgctgaacaaggagggacggtagtaattgttggcaatcgcgcagataaagccgagacagcccgtaaacaattagttgctatgacaagtgaagaacaagtttttgcactgactgctgatttaacaaattttgatagtgttcaaaagttaattagcaaattggatagtgaacataaagacattaacttattagttaattcagcaggaattttttatcctaaaagcttcctagagcattcgctaagtgactataacaatttcctagacctaaaccgcgcatttttctttattacccaacaagttgcttcatcaatggttgcgcaaaataaagaaggatcaattgtaaatgtttctgccgttgcagctcgccaagctatcgaaactgtcacagcatctgcctattcaatggcaaaaatgggtttagaagctatgactcgtcatgtggctgcagagctagcagaacatggaattcgagtaaatgctgttagccctggaatggtggaaacccgtattttcgaaagatttattccttcagatcaattagataatgcacttcaagatttcaatagttttcatcccttaggaagaaatggtaccccaaatgatgtagcagaaactatcgtattccttctttccgaaaaaacatcttgggtaactggtgctatttgggatgttgatggtggtgtcatggcatcaagaaaactaggcaaataa

SEQ ID NO: 45306 - DNA, 408 bp, Acinetobacter baumannii
atgcgtaaattacacactttaaatgaagatacctttcatgaaattgaatggaaagaaggtttagcagtagtccgtttttatgctccttggtgtccaccgtgccacaatagcgaaagattatttaatacttttgtggaaagtattgaagataatgtaattgttggcacagttaatgttgatcaggcacctgttttaacaactcgttataatatatggggtttaccatctgttttaatgttcaaagatgggcaattaatccatcgtattgttggagtaaaacctgtatccgattatcaaaaagctttagatgaactcataaaatctgaatcaaacaatgatgagaaaaacgaagcaaagagttccattggtactctgtgtttaacgaaatcggagattaaagctgaataa

SEQ ID NO: 45307 - DNA, 1110 bp, Acinetobacter baumannii
atgaataaattattcactccccataatttggtggatattcaattaaaaaaccgagtagtaatggcgcctatgactcgtacgcgaacattgaatggtgttgcagatgaacttactgcgctttattactctcagcgagcttccgcaggtctaatcattactgaaggcttgcctgtttctgaagaagggcgtggttatttatatacgcctggtttatataataatgaacaaatgcaaggatggaaaaaagttactgcagcagtgcatgcaaaaggtggtcgtatttttgctcagctctggcatgtgggaagaatgtcgcatgtttcaattttacctgataatcaagtacctgtatcttctggagttattccagcaaccaatactacagtatttgcatatactgattcgggtgaacccggtccggttgcgccaagtaaacctagagctttagaaactgaagaaatcaaacgtgttactcatgattttgttaaatctgcacaattagcaattgaagcagggtttgatggcattgaaattatggctgcaaatggattcatctttgaccagtttctcagtactgagttaaataaccgaacagatcaatatggcggaactgttgagaatcgccaacgttttcttctagaaactattgatgctatttcccaagaaattggccatgacaaagtggctgtccgactttctccttttggtcgtatttatgacttggcaccttatgaaggcgaggttgatacttgggcaaatattgcgtcagctcttggtaaacgtaaattggcctatgtccatttgtactatcaacctacctatgaaacagcacctttagaagcccaaaattttaaaactttattcagagaaactttttctggaactattatcgcagctggtggctttaatcaacaaagtgctgaggcggcattagaaaaaggtgaggtcgatttaattgcttttggtgtcccttatattgctaatcccgatttagtcgagcggatgcaaaataactggcctttggcagaaagtgatcgcacaacttactatggcgtaagtggatctccggcaaaaggctatacagattatccgcattataacggccaataa

SEQ ID NO: 45308 - DNA, 702 bp, Acinetobacter baumannii
atgaaaactttaccttcacaaattaccgtagatatatggtcagattttgtttgcccttggtgctggattgctaaaaaaagatttgagaaaggtttagatgcctttgaacataaaaatcaggtaactatccaatatcacagttaccgtctagcaagtggccttacaccacagccttttaaagatgcattgtataaaaaatttggtgggaaaagtggagctgatgcgatgatgagccatgtaaaaagtgcaggtgagctagaaggtctgatctataactttaatagtatgctttttggcgatactttagatgcccatgccattgtaaagttggcgcaacagaagggtgttggtgaagtattaacagaaaagttttttaaggcaagcataactgaaggtaagtctatttttgatcataaggtgttggttgagcttgctaatgaagttggagttcctagtgaagaagctaatagtgcttttagtaatatttcgtttaaacaagaagttttaaaagatgaagccagcgcacatgccatgggcgctagtggagtgccactttttattgtaaatggtaaatattcaattagtggtgctcagtctgtagaaacttttttaaatgtattagtgcaggtatgggaagaaaagcagaatgaactaaagttcacagaaggccaaagctgtggtattgatggttgtagtatttga

SEQ ID NO: 45309 - DNA, 123 bp, Acinetobacter baumannii
atgaaaaaattggttgctgtactttctgtaattgttgttttaactggatgtgtttatgaccctgttaattacgacaaaatacacgaccaagagttccaagaccacctcaggcaaaacggttag

SEQ ID NO: 45310 - DNA, 1395 bp, Acinetobacter baumannii
atgtcacacgtttctccctgcttccagcaaaaccagttttttgtgttggtggaatatctcacttcactgcatgaaatttatcctgtgaaacatgagtttgcaggatatctggctgcaatgacattggcagatcgtgtacattcagatcatgatatcgcgccgctggaagccagcaaaagttaccctgactcaatagagaaagtcttacacttttcaggtaaggcccgagacatacaagactttgagcgctttttagaacaagccaagtctgccaatattcaaaacttgttattgcttacaggcgacaaactcaaagaacatcataatggacgagatgggcagcctcgtagtcgttacctagagtcggtaaacgccgtaatggcagctaagcaacatggtggttttcgtattggggttgcttttaatccgtttaaatatgtcgaagctgagcgtgatgcacagtatttaaaactgcataagaagattaaagcaggtgctgactttatcattacccaattgggctatgacattgaagccttaaaacaagccaaatcatttttaaccaagcatgattattcgcagcaaatactggcttgcgtcatgccactgactttaggccgtgccaacttcatgataaagcataaagttgcgggtattgtgattactccacacatgctaaaagtcttggcaggggaaaaacaggcagggcatacagaccgtgtttatttgcgctgcgctttacagattttaatatgtaaacacttaggatttgcgggtattcatttatctgcttgtcataagccagaagagcaaatgctgcttgaaagttacatcgagcaatacagacatcttaaccttaaggccttagaagagctttggaattcactttggcaagtcacgacaggcaaagagtttacccctgaaattgctcgtttttcacggcagccaacatctaaacaaatcattaaatatcgccaactgcatgtgatgcatgaggccctgttcggatctaaaattgccaaaggcgttgggcggtttatttttaaagcgcctttttgggaaaattctgtggttgctaaagcattacttaaaacagaagtattgagtaaacatagcctagtcggttgcgaaagctgtggtcagtgccgtttaggtgacactttatatatttgccctgaaacatgtcccaaaggcttagccaatggtccttgcggtggaacaactttagaccgctgtgaatttggtgatcgtgaatgtattcattctgtcaaagcaagacttgccaaagcggttaaaaaaaccgaaatattaaaagagaaactgattccaacggtgcctcttgaaacgagaggaaccagttcttggaaaaactggtatttagcgactgaggcttaa

SEQ ID NO: 45311 - DNA, 768 bp, Acinetobacter baumannii
gtgactattcaaactgaacaagaattccttgccagttatgatcgccgagattatgacgcacctttactcacggtcgatatggctattttctcggtatttaatggtcagttgcaggtattactcattaagcggcccaactttccagccaaagaccaatgggctttaccgggtggttttgccgatttaaagcacgatcaagatttgatggctacggcttatcgtaagctggtcgaaaaaacaggaattagttcaccttacttggaacaagttgcctctgtgggtaatgccaaacgtgacccgcgtggctgggcagtaaccattttgtattttgcattaatcgattttaatgcctatcaacaccaagctttggctgagtacagcgaatgggtgcctgtagcaaaagcaaaagatttagcattggcgtttgatcataatgaattgctcagcttagctttagagcgtttaaccagtaaaactcgctatacagctttgccagctagtctcatgcccgagttatttacactgaccgagctacagactatttatgaaattattcttgggcaatccttagataaaaaagcgtttagacgccgtatgatagaagcaggcgcagttgaagaaaccaaccacagtaaaattgtaggtaaacgaccagctcagctttaccgctatgcactcgattcttttgattttatatttccccgttcactcgaattacctagaaataaagagggtgaagataagcaaaacaatgagctttctgactag

SEQ ID NO: 45312 - DNA, 1494 bp, Acinetobacter baumannii
atgacgattaaacttaatccattaaacgctatcgatttttataaagcggatcacagacgtcagtatccagcaggtacagagtacgtgtacgcaaactttacgccgcgttcatctcgacttgctaaaatgttgcctgacttcgatgataaagttgtgttctttggtcttcagggttttatcaaacactttttaatcgatacatggaatgaaggcttttttaagcaacctaaagacaaagtggtagctgcttataaacgccgtatggatagttcattaggtgaaggtgctgtgccggtcgatcacattgaagcattacatgacttgggctatttacctttacggattaaagcattgccagaaggcagccgcgtcaatatgcgtgtacccgtgcttaccgtaattaataccgacccgcgtttcttttggctaactaactatattgaaactgtattaagtgctgagctttggaaaagctgtactacggccacaattgcctatgagtacaaacgtttattaactcaatatgccgtaaaaactggcgcaccactcgattttgtacctgtgcaaggacatgattttagtagccgtggcatgagtggaatatatgatgcggcacaatcaggagtaggccacttaaccagttttattggaacagactcggttgcttcaattgactacgcagaagaatattacaatgccacaggtgtgattggggtatctgtaccagcgaccgaacacagtgtgatgtgtatgggtacagaagacagtgagctcgaaacatttaaacgtttaatttgcgagctttatccgtcgggtgttgtcagtattgtgtctgatacttgggacttttggcgagtcattacagaatttacggtggctttaaaacctaaaattctggcaagacaacctaatgctttaggcttggctaaattggttttccgtccagactctggtgacccagttaaaattatttgtggtgacataaacgccgaagtcggcagcccagcatataaaggcgctgttgaatgtttatgggaagtgtttggcggtacaaccacagaccaaggctataaagtactgaatgaacgtgtcggtttaatttatggtgactctattactttagaccgtgcacagcgtattttagaagggttagaagccaaaggttttgcttcaaacaacttggtgtttggtataggcagttttacctataactacttaactcgcgatacttttgggtttgctgtgaaagcaacttggggacaagtgaatggtgtaggccgggaactatttaaagacccgattactgactcaggtgtgaaaaaatctgcgaaaggtttattacgcattgaagaaagtgaaaatggttttaccttgtttgatgagcaaacagccgaacaagaacaaggcggagtactaaaaactatctttgaaaatggtaaacttcagtatgagtgtactttggatcaaatacgtgagcgtttatccatcgtataa

SEQ ID NO: 45313 - DNA, 885 bp, Acinetobacter baumannii
atggctatccagcttttagatgcggcaagaaatgagattccagtgaaatttacgcagttttctggtggcgagcgtcatgttcaaattgatgaaacaaccttaggttcattatctggcaacgtattggtccgtgcaaagatggcctcaagtcacgatgtgatggactatttgctacttgaaaatatattgctgactcagggtttaaccattgacctagaaattccgtattttccatatgcacgtcaggaccgtatttgtgcagtaggccaagcgttctcgcttgatgtgatgaccaagttactcaacatcaattccgacaaaaaagcgggcaaacaaggcaagatcactgtttgggactgccatagtgaagtaacaacagccttacttgctgccaatacttcttttagtgaagttgtaaacatcagttcagtcgacatcatcgcaaagagtgaagcgctacgcacattgttaaaagatgaaaaaacagtgctggtttgcccagacaaaggcgcaaaagcgcgtacacaaatggtcgcagatgcttttaattctaagcgcaaacaaccaatcactattgttcagtgcgataaaaaacgtgatccagtaactggcaaaattttaggtacacatgtacatgcgactgatttatcaggcctcacagcggtcattaccgatgatatttgcgacggcggtgcaacctttattggtattgccaaagaactgcgtcgcctcaattgccataaggtcgttctatatgtgacccacggtattttcagtaaaggaatagaggtttttgatgggctgcttgaccagctatttacctcagacagctttccacaacaaccatcagacaaaatttcagtaattgcttttgcagcagaataa

SEQ ID NO: 45314 - DNA, 810 bp, Acinetobacter baumannii
atgctatatgagctatttttatttggactactgtcaggcataaccacttggttatttggttttggcggcggatttgttgctgtacctttgctttatacagtcattattcaaaagtggagtaatgaaagtaatatcggcatacatgccatgcaaatcgccgtagctacatcagcttttgtcatgctctgctcggcaagttttgcagtctttcggcactgtcggtctggacatatagattggcaaaaaatccgctttttatggggtggtattgcacttggtggaattgtcggcgcggtaatggcctcattgtttaatggaaattggcttcgctggatatttatgggctatgtattcataaccattattgattgttatttccgaccagggtttatagtgacctcaaggcaaaagcaacactatggacaaaacagtgaactcattaaagggggaattattggctgggttgcagcacttttaggtgtaggaggaagtgtaatgacggttcctttattacggcggcgaggtagttctatggcagaggctgcggctattgcaaacattctcacgctgcctttgtctttaactgcaacgctgacctattgcgtattgtcaatttggcaatctacatggacacccaacggatttatcggactaatctggtttgaagctgctttattcttggttgctggaacatggatcggactatatttttcagaaaaatttatttcaaaactacctgatttatggcgggcaaagttatatccactacttttaataatagttctactcgtcatgctttttgtaaattaa

SEQ ID NO: 45315 - DNA, 789 bp, Acinetobacter baumannii
atgcgtaatattccaattaacgaggtagaccatctacctcaagcggttctagcattagggtcagattatcctgctgatactttgttagatacgcatagccatcgccgtgcacagttcttatatgcacccgaaggtctcatgaaagttgaaactgaagatggacaatggcttgtgttaccgtacagcggtgtatggataccggcaggcaaatcacatcgggtatggctatctaaagtcaatacttatagtttgtatatagaaatgagtaatgccccaagacaggcaacatattgcgaggttgtgcaagtctcgcctttgttacatcaattgctcattcaggcaaatcaactgcctattgactaccaacgtgcaggccgtgatggtgctcttatcgatttattgttatatgaattagaaattgcaccagccctgcctctgtttattccattgcctcgcaacacattactatctcaacaatgtgctgagtttatggagcgtcccgatattcatagcagccctaaagattgggcacatgaccacaataaaagtgaacggacttttcaccgctggtttaagtctgaaactggcttgtcctttcaagcttggcgtaatcgagtctgcattatttatgctttaaatgccttaaaagaaaatatctcgattacggaaattgcttttagtttgggctatgaacactcggcagcttttaccgcaatgttcagcaaaattatgggttatccacctacccattttcaaaaaagatttcatgcgtatgataagacgctataa

SEQ ID NO: 45316 - DNA, 492 bp, Acinetobacter baumannii
atgaatatgttgtattatcagctagtgggcaaaactgagtatgagtcagcggtagagtttgcgctttatacaagacagctcttattcccagaaatttatcatgggcaagtccccaaagatttacaaaattttgagcagcattatgtccatgatccactgggctgcttcattacagtaaaagaccaaaaccgcattattggcacgattgcatatcgagcgtatgaccatcgttttgatttaaatttgccgtccaatacggttgaggtggttaagttatttgtattgcctgaataccgccgtaagggcatcgcgacccagctatgtgacatgttgtttagccatgccaaaaacaatgaaatttcgactttgtatttgcatactcatccatttttaccggcggctgaagagttttggcgtctacaaggttttgaggttattcaacgcgaatggatcgatacctatgacacgattcatatgagtaaatctttatag

SEQ ID NO: 45317 - DNA, 765 bp, Acinetobacter baumannii
atgattcaaattgatcagttaaattatgcctatgggcacaaacaggttcttaaaaatattcatctggagtttcctgaaaatcaattttccgtaattttagggcgtaatggctgtggtaaatcgacactttttaaattgatggctggcctagaacctgtaaaagatggcttgattcgttactctggaaaaccactatcggactttaaaggaaaagatcgggctgcattactcggttttttaccgcagtttcataaaacggtatttccatttttggttaaagatgtggtgattacggggcgtgctgcttttagccgatatcgtccttcaaaatcagactgggaacgtgtagaccaagctttgcttgatttagacattgagcatttacgtgaccgtccttataccgagttatcggggggcgaaagacaattggtcatgattgcccgtattttagtgcaagccccaaaagtcattttgctcgatgagccaaccaatcatctcgatgtttattaccagtcttatttaatgaaaaaattgcgtcagttgtcgcggcagaattttacggtgattgcgattatgcatgatcccaatttggcctttttatttgccgatcatttgttttttatgcgccagcatgaggtggttaagcctgagtctaaaacacgaatcaccgatcctaagtttttaaaaagtgtctatgatgttgagttccatgaagccatgattcaagacaaaaccattgtgattcctgatcattcttggctatga

SEQ ID NO: 45318 - DNA, 1017 bp, Acinetobacter baumannii
atgaatatggaaaagctgaagtattactggttttacccgttacctttcgtcatgatttttatctcgctgcttattgggccaactcaaacgttaagtgcatgggattatttgttttggggtgtacaagcggtctttggtacaccatattttgatgcggaacaatttaggctgatgcaaaacattttagtaaatgtcagattacccagaattttactgacttttatggtgggagccgcattagcaaccgcgggtaatggcttgcaggcattgtttcgtaatcccttggtcgactcgtatgtacttggtatttcatctggcgctgcgttcggtgcagccttggcactttctttaagttggctttcaccaaacctatcagcctttatttttggtgtttgtgctgttgccttaacgtatttatttgcacatcaaaaacatgaaagtcagacgtctttagtgatggtgattttatcgggcatgattgtttcgggactgtttttagcaggacttacagttattcaatacttaagcgatccatttaaattacaagcgattgtgcaatggacgatgggcaacttacatcaggcgtcttggcaaaaggttcaatacgccgtgcttccgatctgtattggtcttgccggattatttgtgatgcgttggcgcttaaacttaatggcacttggtgctgaagaagcgcaggctgtgggtgttaacccaaggtgggaacaacttcttttaattgctctggtgactgtatgtacgtcaacttctgtggctgcggcaggcattattagtttatatgggctgtttatgccacatattgtgagaatgttggttgggccagatcatcgctacagtattcctgccaatatggtgttgggcggcagttttctactgttgattgataacttttctcgggttttactgacatttgaaataccaattggtatttttaccatgctacttggggcgccatttttcttattattaatgaaaacacagaggactcattgggcatga

SEQ ID NO: 45319 - DNA, 1020 bp, Acinetobacter baumannii
atgaagttattggcttcattactcactttactcattctatgtggatgttcctcatctgagcaaaatagaaaaactcaagaaaactcaacccctcattcaatatgtgtttttgatagtacaaatacaaaagtctgtgtagccaaacctacccaaagaattgtctctttgtttgagtcgggtttagatggcctctatatgctagggcaaggtgacaaagtaattggtatacctgctgaagtatacattcaacctttattatttaatgcctattcaaaaatagataaacgcattgctaataagcagcttgcagtaccttcgcaaggagccaatgcaaccaatattgaaagtctcgtgttgctaaaaccagatctagtgattgtaggaagcgggcagactcaaacgattgaactgttacggcagtttggcattgctgtatatgtgatggagtcaggcacctataaacaagtgaaagaagaactgtctgaaattgctattctgagcggcgcccaaaagcgagctcaggaaattttaaatttctctgatgaaattgtggcagaagtcgcagccaaaacggcccgtcagccaaataaacaatcgatttactatgcttggtctggtggacgaattttttctacctcgggacgtcagtcgattaccaatgactttattgcgctagcgggtgcgtacaacattgttcagaccgatgctaaccagcctaatgtaaatcccgagacattaattgaatggaaccctgacaatattgtgctttggaataccaatcctaaactgatttatgaacgaaaagaattacagggtttaagcgctgtacaaaaccgaaaggtatttaatttgagtcctgcatttatatataacccgcacaccatcaaaatcattattacggcgatttatctaaatcacagtatttatcctgaacagtctgatttaccagtaagtgctttacaacagcgtattttaaccaagttgtatggtgagcagcttgctaaagcgttggtgcaatga

SEQ ID NO: 45320 - DNA, 1053 bp, Acinetobacter baumannii
atgacaactgaagttttaggttatgccgcgctgtcatcagaaactcctttagttccgtttaaatttgaacgtagaaccccacgtgaagatgatgttgtcattcaaattgaatattgtggtgtttgccattccgatctacatcaagccaaaaacgactggggatttagtgcttatccgatagtaccgggtcatgaaattgtaggtcgtgtaacatcgattggccccaaggtcacaaaatataaagttggtgatttagtcggcatcggctgtatggtcgattcatgtcgtatatgttctgcctgccattcagggctcgagcaatattgtgaagaaggtaatattcagacttatggcggcgtagatcgccatgaccaacgcccaacttatggtgggtattctcaaagtattacctgtagcgaagattttgtatttaaagtacctgaaaatctggatgctcaagctgtaccgccactgctttgtgctggcattaccacttggtcgccgctgcgtcactggaatgttggaaagggcagtaaagttgctgtcgttggtttaggtggtttaggacacatggcaattaaacttgccaatgctctaggcgctgaagtgacactatttactcgctcagcaaacaaagaacaagatgctaaacaacttggcgcacatcatgtagtgttatcaacagatgagaatcaaatgaagtcggtattaaatcaatttgatttaattgttgatactgtgccttataaccatgatttgaagccttatattccaactttagctttaaatggaaccattgtattagttggatatttaggtgaaattagcgcaaattcagtacctatgattttaggtagaaaatcaattgcaggctcggttattggtggaattaaagaaacacaagaactactcgatttttgtggtgagcataatatcgtttctgaagtagagatgattaatatgcaaaacattaatgaagcttttgaacgtatgctaaagagcgacgtgaagtatcgttttgtgattgatatgaaaacactgtctgaagattaa

SEQ ID NO: 45321 - DNA, 888 bp, Acinetobacter baumannii
atggcgaataggtctctaaaccataatcaagaattagctcaacttgtcgatcaatggacccgagaaaaaggtacattcgaaacgcctattatgggtctgactttatatcgtgcagagacattgacccagccaagtagcagtatgatggatgcaagtctatgtatgattgctcaaggaaaaaaacaggtgattctgagcgaagaaacttatacctatgactctaatcatttcctttttactgcaattgacttgcctgtaattgctcaagttcttgaagcttcagttgaacgaccttatctttcaatagttctacgcctagacccgtatatactcgcccaaatcatgcttgaagcccacataccttttaaagatataaatactgagaaaaaaggaatggctgttggagtagtcaattcagagctgaatgatgcttttatacggttaataaaactactggatacgccacaagacatccccatcttatctcctcttattattaaggaaattttttatcgtttattgatgagtccgcaaggcgatcgacttaaacgaattgtagcggcaggaactacaggccatcgaattgtgaaggcgattgaatggctaaaaacaaattttgcaaaaccatttagtattgaagaactggcaagcacgatggggatgagtgcatcaagttttcatcaacattttagggatataacctcaatgagtcccttacagtatcaaaagagaatgagattgaccgaagcacggcgtttattaatgaccgaagaatatgatatttcatctaccagcatgcaagttggctatgaaagtttgtcgcaattttccagagaatataaacgtttttttggagtttctccttcagtagatattaaaaatatataa

SEQ ID NO: 45322 - DNA, 873 bp, Acinetobacter baumannii
atggcgaccatcggatttgtgggtacaggcattatgggaatgccgatggctatgaatttactcaaggcaggtcatcagctaaaagtctggaatagaacttcatctaaagcagatagtttaaaaaaaactggtgcccaagtttgctctgaccttgaacaagtcggaaaagatgtagagtttctgatttgtatgctcagcgatggaaaaacctgtgatgaaatcctgtttaaagaacagggggcaatctctcagttaaaacctgaaagtacggttattgtcatgagttcgatacccgttgaagttgcgaaactacaaggtgacaaatgtagagaacgaggacttagatatttagatgctcctgtttctggtggagaaaaaggcgcccaaaatgcaagtcttgctattatggtgggcggtgacgctaaaacattttcacaggctgaaactattttaagtgcaatggggcgcccaattttagttggtggcgctggctgtggaatgctcgcaaaactggtaaatcaaatgattgtagcaaccaccattgcaacagtgagtgaaggtttattgcttgctagtaaagccggcgctgatcctattaagctaaaacaggcactcacgggaggttttgccgattccccaattttacagcagcatggcgagcgtatgttaaatcgagattttaaaccgggcggcactgctcgaaaccagcataaagatattcataccgccgttagctatgccaaatcacttgaattgaatttacctgttgcccaacaagtgagtcagttatttgaaaatatgctggctgccggagacggtgaacttgaccattctggtttaattcgtgaacttgagcgaatgaatccagtgtaa

SEQ ID NO: 45323 - DNA, 1377 bp, Acinetobacter baumannii
atggaagatatcaaaaatgtaactgctctcgaagagcagacaatcaaacgtatttcgaaccgaattatcccgtttctcattattttattcattatggcatttctagacaggaccaatattggttttgctgcgttacatatgaatgatgcacttggaattactcaaaccatttttggtctgggtgcgggtgtattttttctaggttattttattgcagaagttccaagtaatatcttgcttcatcgttttggagcgcggatctggattgcccgaatcatgattacttggggcattattgcagcactcatgggttttattcatagcggtacgcagtttattgttttacggtttttactgggtattgctgaagcaggtttctttcctggtgtgatcttttatttaaccttatggtttcctgcaaagtatcgtgcccgagtttttgcaacgttttatcttggattgccaattgctcaaattattggagcaccaatttcagttggccttatgcaatggggtaataccattggttatgaaggttggcgtttgatgtatgtgctagaagggatcccttccattattttagggttaatctgtcttaaatatttaaccaataacccgaaagaagcagagtggttaacggctgagcagcgtcaatggctcatgaatacgcttgaacgtgaagaaagagaaaaagagcaatctgccgatgctgctttaactaaaggtgaactcattaaacaagtatttaaaaatcctttggtttggattatggcggttgtttattttggtattacctctggttcaaatgcgatgttcttcttcttaccaagtgttttagagtcattccgtaacacatttggtatgcaaattagccttatccaaaatggtttacttaccgcaattccatatgcttttgcagctgttgggatggtcttatggagccgccgttctgaccgtaaacaagaacgttataaacacggtgcttgtgctgcacttatggcggcattagccattgggattgcactgattgtaaatcaaccgtgggccattattgtcggctttattcttcttgcgattggtgtatttagcgcgattaacattttctggaccattcctgggcaaactctaacaggtgtgggtgccgcagcaggaattggattaattaactcggtaggtaatttaagtggttttactggtccatatttaactggatatttatataccaccacaggcacctatacagtggcattccttgcaattgctggctttgtagcgatgggtggtttgggcttgttgttattagcaaagttaaaatcgaatagcttaaaagtagaacagcagcaacttaaagttcgaactgctacggagatgaaataa

SEQ ID NO: 45324 - DNA, 972 bp, Acinetobacter baumannii
atgaatgtgctaatcactggtggaacaggttttattggaaaacaaattgccaaagagattttaaaagctggcagtttgaatttagataacaataaacctgagcccatcgataaaattattctgtttgatgcatttgctggtgaagatttaccacaagatccaaaaattgaagtcattatcggtgatattaccgataaagccacggtagcaaatattacagaaaatattgatgtcgtttggcatttggctgctgtggtgagctcggcagcggaggctgattttgatttaggtatggatgttaatctgtatggacttttaaatttattagaagaattaagaaagaaacaaaccacgcctcgagttatttttgctagtggctgtgctgtatttggtggtcaattaccagaagttgtgacagatgagacagtggttacaccaaagtcgtcgtatggcatgcaaaaagcagtaggagaattgctggtctcggattactcaagaaaaggttttattgatggacgtattttaagactaccgactattgtggttcgtctcggtaaacccaataaagcggcatcgacattttttagctcaatcatccgagaaccattaaaaggcgaaacggctatttgcccagtaccggcagatactccagtctttgttacttcaccgcgacgttgtgttgaatcaatgattaaagctgcatcaatttcttcagatgtacttcaagataaccgaattattccattaccgggattaacagtcacggttaaagaaatgcttgaggcgcttgaaaaagttgcgggcaaacaagcaactgatttggtgcaatggcaagaaaacaaaaccattcaacgtattgttcaaagttggcctgttcaagtgaaagctgaatatgccgaatctttaggtttccaagcagataaaaattttgaaagcgtgattcaggcacatatagaagatacccaaaattaa

SEQ ID NO: 45325 - DNA, 936 bp, Acinetobacter baumannii
atggcagatttgacttactcaagtttaaataactggcttaaattcaagcatttggttttgttagagacgttagctcgaaccaataacatgcatttggctgccgagcagatgaatttaagtcaacctgccgtaagtaaaatgctaaaggaaattgagggccttcttgggtttcaggtctttgagcgactgccccgaaatatgcctgtaacggcattgggtgaacatgtcattcgttatgcccagcgggttttgaatgacgcaaagcattttgtcgaagacatcgagattttacggttgggtggacatgggtttttaaaagtaggaggaatatttgcagcaaccgccgtggtaattccaaactcaattatcgaaattaagaaacaatggcctctactttctatcgatgttgttgaacagactagtgaccatttaatggaaatgttgagtgaacatactctagatttagccataggtcgctttaccgatgttacgcaaagtcagtttttcgatttccagccgttaggccctgaacccttctgtattgttgtcaataatgcgcacccatgtgcccagaaaaagttttgtacattagaagaattattaaaatggccgtgggtactttatcctaaaggcacacccattcgggagcgtatggaaggtgcattcgcccgagctaaagtcaaaattcctttaaatacggtaaataccatgtcgatgcagacctttttacagatcttaaaaggggcacctatggtgggcatgttgccagaagcaatggtgattgatcaggtgaaagaaggacaactacagattttagaaacagacctgattttagatgcccaagattatggaattttgacacgtaaagatgaaccagtgtctgatatagccgcagcctttatcaatattttacttaaaaatgcaaaacgtaagtaa

SEQ ID NO: 45326 - DNA, 1176 bp, Acinetobacter baumannii
atgaactttacgttaaattcccagaactcattaccagatgatgcaactcaaggatgcttaattggccgtgcgtggattccaagtcaaatttcgggtccatcccctattattttaagaggcaatcaagtttttgatatctcggaaaaatttcatactatttccgagttacttgaaagtgctgatcctttaaaagctttatcagaaattgaaggaagacgagttggttcaattgatgaattatttgccaatactgtcgccgagccagataaaaacaaggcatattttttagcccctattgatttacaagtaattaaagcggcaggcgttacctttgctgcaagcatgttagaacgcgtgattgaagaacaagctggtggcgatgcacaaaaagctcaatcgattcgtgaagttgtacaaggcgtaatcggtgataatttaaaaacaatcgaacccggttctgaaaaagcgctacaactcaaagaatatttaatcgaacaaaaaatgtggtctcaatatcttgaggtgggtattggtacagatgccgagatttttactaaagcccctgttttagcagctgtaggcacaggacaaaatattggtattcacccaaagtctgagtggaataatccagagccggaagtcgtattagttgccaacagccaaggtaagattttaggcgcgactttaggtaacgatgtgaatttacgggactttgaaggtcgtagcgctttactgttaagcaaagcgaaagataacaacgcttcttgtgcaattggcccatttattcgcctttttgaccatacttttactttaaatgatattcgtacttgcgatgttgaactgcaaattcaaggcaccgataactttgtgttaaatggggtaagttctatgtcgcaaattagccgagatcctgaagatttaattcaacaaactcttaatgaaaaccatcaatatccagacggttttgttttgttcttgggtactttatttgcaccgactcaagatcgcgaacaagctggggctggctttacccataaagttggagatgtcgtccgtattcattcgcctaaacttggtactttgtacaacacggttatgaccagtgataaagcaacaccgtggaattttggaataaatgctttgatgcgtaatttgaagcagcgtgaattactataa

SEQ ID NO: 45327 - DNA, 1788 bp, Acinetobacter baumannii
atgaatgatcaaaataaacggatttttttacgtagccaagaatggtttgatgatcctgaacatgccgacatgacagcactctatgttgagcgttacatgaactatggtttgacccgtgccgagttacaatccggtcgcccgattattggaattgcacaaaccggtagtgatttgaccccatgtaaccgtcatcacaaagaacttgctgaacgcgttaaagcgggtattcgagacgcgggtggtattccaatggaattccccgtccacccgattgcagaacaaacccgtcgtccaactgctgcacttgaccgcaacttgacctatttaggtttggttgaaatcttgcatggttatccgcttgatggggtggtgctgaccactggctgtgacaaaactacccctgcatgtttaatggcagcagccacaacagatatacctgcaattgtgttgtctggtgggccaatgctagatggtcattttaaaggtgagttaattggttccggcactgtgctttggcatgcaagaaacttacttgccactggtgaaattgattatgaagggttcatgaaaatgaccacttctgcttcaccttcggtcgggcattgcaacaccatgggcactgcactttccatgaatgctttggcagaagcattgggtatgtctttaccgacatgtgcaagtattcccgctccttaccgcgaacgtgggcaaatggcctatatgaccggcaaaagaatatgtgaaatggttttagaagatttacgtccttctaaaattatgaccaaacaatcttttgaaaatgcaatcgcagtagcctcagctttaggtgcatcgagtaactgccctcctcacctcattgcgattgcccgtcatatgggtattgagctgagtttagaagactggcaacgtgtgggtgaaaacattccgcttattgtgaactgtatgccggcgggtaaatatttgggtgaaggttttcaccgtgcgggtggtgttcctgccgttttacacgaattacaaaaagctggtgtattacacgaagattgtgcatcggttagcggtaaaacaattggggaaattgccaaaaatgcaaaaacctcaaatgcagatgtcattttcccttatgaacaacctcttaaacatggtgccggtttcattgtgctcagtggcaacttctttgacagcgccattatgaaaatgtctgtagtgggcgaagcatttaaaaaaacctatttatcagatccaaacaatgaaaatagcttcgaagcacgcgcaatcgtttttgaaggtcccgaagactatcacgcacgtatcaatgaccctgccttaaacattgatgaacattgtattttagtcattcgtggcgcaggtacagtgggttatccgggcagtgctgaagtcgtcaatatggctccaccagcagagttaattaaaaaagggattgattcactgccttgcttaggagatggtcgccaaagtggaacttctgccagcccatctattctcaatatgtcacccgaagcggctgtaggcggtggaattgccttacttaaaaccaatgaccgtttacgtattgatttaaataaacgttctgtcaacgtgctcatttctgacgaagagttagaacaacgccgccgtgaatggaaaccgacggtatctccatctcaaacaccttggcaagaaatgtatcgcaacatggtaggtcaattatctactggtggttgtttggaacccgcaactttatatatgcgagtcgtaaaccaagacaaccttccaagacactctcattaa

SEQ ID NO: 45328 - DNA, 246 bp, Acinetobacter baumannii
atgcagaaaaaatcttataaagttctaagtttagtatttcttgttgcgagcatgatggctattactgcctgcaatgatagccaagatcagcaatctacagtagtttccccaacccctacagttacccgtgaccagcgttttctaacagcaaaaacaaatgatgtaattcaagttacgattgctgatttgatcccaacgcagggtgcaattggttatgatcaaatttattataaattagggcgttag

SEQ ID NO: 45329 - DNA, 846 bp, Acinetobacter baumannii
ttggagacatttaactgtcaagaacagccgggcactgaaacggctgatttgaaaacagttgttgttggttatgatgggcgcctttatttgaccgatggtcatcatacaatgaccgaattccgtgagctgcctgatggcggtggtcaacttaaagtatgggtgaaagttgttgggaattatagcgatagtaaaactgcggatgagttttgggcgaaaatgcttgccaatggtcaagcatggttaagagatggaaaaaaccaaccgatttcatatcaacaattacctaaaaacttaggcctgaaatctgcaactaaccctgacggtatgcaaaataatccatatcgttcactggtctatttcacacgtgatattggttatagcaaagttgctaatgcaacggactatactgagtttttatgggaagattggtttaacaagcaaatcgctaataatctggttcatcctttaagtttttatcataccgatgcgagtgtgtatggtgctgcagatgtattggcaactactgaaataaaaagtgacttaactgtatcgggcagtgcaacaggctatcaggcagcggttgctgattattccttactgatgggaagtaccaaaccaactgatattatttatggtacttcaactgccgcagatttgggcgcattacagcttgtgaaaaatgctgctaaaggttctgttacggcgacttcaatttctaatcttgcagatttgacccgtgacgaaattaagaaagataaaacacctcgtacaggtggaagtatttggtatgcggtaaattataagttatgtggaaaacctgctacaggaacgtgttggggttggtaa

SEQ ID NO: 45330 - DNA, 648 bp, Acinetobacter baumannii
atgtgccaagcacagtctttatggctttgctgtgcctttttttctcccaaaaaagtatctcatttagaaacaacaagaatttataacggtaaaactatgccaaatttagaaatctcttccaaaaaattacactttattcgtacggctataaacttatttaccacctatggatttcacaccacgggtgtagatctgattgttaaaaaatccgaaattccgaaagctacgctctataactattttcactcaaaagaacgacttatagaaatatgcatcgcttttcaaaaaagcctactgaaagaagaagtgctcgcgattatttactcaaaccgttactgcacgccaaccgataagctcaaggaaattgtggttttacatgtcaacttgaatagtctgtaccacttattacttaaagccttttttgaaattaaatggacatatcctcaggcttaccgtatggcaatcgagtatagaaaatggctaattcgagaactttttgacctaatttttagtttggaaactcgcgccttaaaacctgatgccgatatggttttaaacctaatagatggtttgatgtttgggtttttaagtaccaatagtttgagtgagagggacgcggtgttggagcggttttttaaaataacttga

SEQ ID NO: 45331 - DNA, 672 bp, Acinetobacter baumannii
atgaaaaaaatattaatcattactatggcgagttctttcggtttaattgcgtgttcaactactgaaacttcaagaacgatacaaagtccacaagtcactgctgctactgctacaacaaaatatatcggagtaaaaactcctatttctattggtaagtttgataatcgctctagttatatgagaggcgttttctctgataatgtcgatcgtttaggtgggcaggcgaaaactattcttgaaacacatttacagcaaactggctatttttcagttttaaaccgtgacaatctatcagaaattaaacaagaagtaggttatagcaatactgctcaatctattaaaggtgctcgctacgttattactggtgatgtctctgaatttggtcgtaaagaagtaggcgatcaacagttatttggtattttaggacgcggtaaacaacaagttgcttatgccaaagttaatttaaatattgttgatgtaaaaacatcagaagtcgtgcattcggtacaaggtgctggtgaatatgcattaggcgcacgtgaagttttaggctttggtactacagcttcttacgattctacgttaaatggtaaagtactcgacttagctgttcgtgaagcagtaaataatcttgtgacagatattcaaaataaccgttggtcaattcaataa

SEQ ID NO: 45332 - DNA, 369 bp, Acinetobacter baumannii
atgaaaaaaattctttttagcagttttcttgcgatgagtttggtgggttgtgccgcttgtcctcaacctttatacaattggggaacttatactcatcaaacctatttgatgtataacgcacctgaaaaagcaacgccaaatacacagatcacaaaattagaagcagagattgaaaaaaccaaaggtaagggcctagctgtaccaccggggttatatgctcatttaggattattgtatttacaagaaaataattctcaaaaagcaatcgagtatttccaacttgaacgtcaagtatatccagaatctaccgttttaatggatcgcttattgcaaaaaatgaatgcgaatggtgggaatgcaaaatcatga

SEQ ID NO: 45333 - DNA, 678 bp, Acinetobacter baumannii
atgattaagaaacttctcattgccagcttggtcatttctagccttgcatttacaggatgtgcagttactgcaccacctaataaagatattacggcctataaagcccatatgccaaagtcaattttggtattgccaccagtcaatgattcacctgatgtaaaagcgacctatagttattggcctaccgtggtggcacctgtagcagaagctggctattatgtttttccaatctctgttgtagacaacatgtttaaagagaatggcgttactaatggcaacgatgctcagtctatttcacctcagaaattacaagaaatttttggcgcagatgctgctctctatattcgaattaaagaatatggctctaaatatcaagtcattcaaagtgttgctacagtaagtgcagatgcaaaacttgttgatttgaaaacgggagatgtgatttggacaggtgagaaaaaacttgttcaagcgagtagtgatggtaatgcgggtttaatagggatggtcgttggggctttagttgaacagattgctggcagctttaatgatagagcttatccattagcaagtatggtcaatactcaactgtttaccccgactaattataatccaggtatggggttattatacggaccacgttcacctaaatttcaacaagatggcgtagctaagtaa

SEQ ID NO: 45334 - DNA, 708 bp, Acinetobacter baumannii
atgacccaacatttagatgtagaagagcttcaaaatttgttaaagacggtggttgacgaaacaacctctattacggaaacactcgcaagtaaagcaagtaaaattctgtcaaaacacgcttctgaaaaaaatgcagatattaagctttcaacttcagaacgcgctgctttgcagaaagaaattaaaaaagcactctctcagagccattatagtcaaggtacgggttttgcaagttatagtccggcaactcaagatgagcaagactattggacgctagaatggtggtataaaaaagaagatcaattccaacaagcgaaacttgaaaactaccaaaatgcgcagcgctttttagatttccgctcatttgagtggttccataaacctgcacaaaataaaagtccatgcatacatggtccttatgtggattatatttgcaatggtgcctataccattaccattgctcaccctgtcatgattcatgaccattttatcggtgtcattgcgaccgatattttagtttcggcccttgaaaaactacttatgccaaaactcaaaaacattaagcaaaaggcggtcattatgaatgattcatctcgagtcattacttcaaatgacattagcatcagaaccgggacattatttaaagctaagactgatcaacagtttttctcgcaaccctgtcagtctttccagttggttgtcatctaa

SEQ ID NO: 45335 - DNA, 582 bp, Acinetobacter baumannii
atgtttaccttggttggattaccaattgcggcaggtttaatcaactttgttgttgcgacttcagctttatcttctgcaaacagtggaatctttgcaactagccggatgctatacggtttggctttagacaacgatgcacctaaaagctttagcaaattatcaaaaagaaaagttccaattagaggactcgtattttcaatggtgtgtgtaacgattggaacatctattttatttattgttccaaacgttatgaccgcctttacgattatttcagcgctcacttcaattttatgtatttttacatttatgttgattgtgctttcgtatatctattatcgtaagaaaagccctgaactacatatccagtcaaaatataaaatgccgggtggattatttatggcttggatgactatgttgtttttagtgtttactatcgtaattttggctttagaccatgatactttaattgcacttgagtgttcaccaatctggtttataggtttatttattgcttataaatataaaaagaaaaagatgttgcagcttgatattttaaaagcacaaaaggttgattatatttaa

SEQ ID NO: 45336 - DNA, 396 bp, Acinetobacter baumannii
atgcaatggatcgtagttaaaactttctcgtttccttatgaggcacaaattgcaaaaactcaattagaagcatttggaattcctgcttatattgaaaatgagcatacaattaatatggattggttttattctaatgctttaggtggagttcgtttattagttccagaaaactatgttgatgaagcgaagttatttcttgaaaaagactttagtgatgagcttgaacaaaagttcggggagaataaagaatattgtcctgagtgtggaagtttggatatagaggttaatactaaaggaaaaaaatctgcctttttagtgtttatgtttttcggcctacctttattttcttttaaaaatgggagtaaatgtaagcgttgtggacacttttggaattaa

SEQ ID NO: 45337 - DNA, 1164 bp, Acinetobacter baumannii
atgcagctcaatcccatttactataatgaacaacatatagcttttgccgataatgttcgtagatttgtacaaaaagaaatgacacctttcgttaatgaatgggatgaggctgagacattcccaagagaactttataaaaaggctgctgaaattggattactgggtctaggtttttcagaagaatatggtggtattccagatgcagatccattctattcattactggctggtatcgaaatggcaaaggcgggttcaggtggggtgcatatctcgctcatggttcataccattggcgcccctcccattcagcactttgggagtgaggagttaaaggctagagttctgccaggtattatttccggtgagaaaatttcggctttagcgattacagaacctggtggtggttcagatgttgctgcattacaggctaaagctatcagagatggggattattatattgtttcgggcgagaaaacatttattacatcgggaattcgtgcagactattatacagttgcagtgcgtactgatccgacaaaaacgggtgcagaaggcatttcaatgttactcattgatgcacatagtgaaggtattactaaaacgcctttgaagaaaatgggatggtgggcatcagatacggcacatttgcattttgatcaagtacgagtacctgcatcaaatctacttggcaaagaaaatgccggttttaaagttattatgaataactttaatatggagcggtttttcttaggagtagtcgcttatgggtatgcattagtctgttatgaagaaactttagagtgggcacagcaacgtaaaacttttggtaagcgattaattgatcatcaagtagtacgccataaattggtagatatggcaacccaactgacctcaacgagggcattacttgaagaaacagcatggaaaatgactcagccgaagttacaaggacctgagttggtggcgcaaatttcaatgcttaaaaatgttgcgactcgcactatgcaattttgtgctgatgcggctgtacaaacattaggtggtatgggctttatgcgaggtaccaagtcggaacgtatttaccgtgaagtaaaggtcaatatgattggcggtggtgctgaagaaattatgaaagatttgattagtaaacagcttggttattaa

SEQ ID NO: 45338 - DNA, 657 bp, Acinetobacter baumannii
atggcatttgatttagtccaatactttgctgagcaaataaaaattcaaaagcctcagcttttaaatcaatatccagccaatgagaaaaataagctgattgacgaagtgaatatattgacgcttggtaaattaatcagcttatggcgtcaggacgataataaaatttatcatgaaatcaaaactgccgatccattgtatattcaagaagttgcacgtcatctaactacgtcaaaacacaataagtcagttttaaaaaatgctgaacttgagcaaagtatttctgagattctggcattacagttaacagaacttaatcaacttgatgagactggtggtttcggccaaagtggtttaaaagagctcattttagggcaagttgaacatttatctggccaagccgaagattgggtttggtcaacaaaccatctaacagagctcattggttctaaacctgttgaacaagaagagctatcattggatgcaacaatgaaggagttcaaccaaatggttcaccaagcccaaccacatcatgaagatttacatgttgaagagcaacctatcgaaacttttattcctggatggtcaaaagttatcgctcctcttgttgctttagctattttaggctatctctattgtatgtatacacagcttgtataa

SEQ ID NO: 45339 - DNA, 1719 bp, Acinetobacter baumannii
atgcaaactgctaaacatttattatttgtcactaatagtccgcaacagcaagtcaatgctttaatcttggctcgtaaacttgctttagtcgcaacccaacacggctataaacatagtgtcatttcactcgatgagtttgaatcaagcgatcattttgatcatgtcattattattggacagcaacctaaaaatctaaatatttttggtcaaaacgctttatctttagtttctattgaagatattaaagatgatgcagacaaagcacttttaatggcacttgaacactcaaaaccagcaaatgagtgggaacaaaaacctaagcaagcttcaaataccgcaactcattttgttgccattactgcttgcccaactggagttgcccatacatttatggcagctgaagcgttacaacaaggtgcagaaagacttgggtatcaaatcgatgtagaaactcaaggttctgtaggtgcgaagaatattttatcacctcaagcgattgctgatgccgatattgttattcttgctactgacattgaagtcaacactgaccgctttataggtaagcgtgtctatagatgtagcactggttttgctttaaaacaaaccgacaaggcttttgctgaggcaattgctaatgctcaggttttagaacaaggtaaacagcaagcaacaacggaaaataaggataaaactgaaaaagttggtgtatataaacacttattaactggcgtttcttatatgctacctatggttgttgcgggtggcttgctaattgcactttctttatgttttggcctaaatgcagcagaacaagctggtagtctgccagccatattaaaacagattggcgcagcagcatttaccctcatggtacccatgctgtcgggttatattgcatattccattgcagatcgccccggtcttgcgccaggtttaatcgggggattattggcagcacagttacaagcaggttttttaggcggtattgtttctggtttccttgcaggttatatcgcattatttattgctaaaaaagttaagctcccaactagcttagagtctcttaagcccattttgattattccattattaggaacattatctgttgggctgattatgttctatgtggtaggtcaacctgtagcgcatatttttgagttaatgaaagatttcctcaacaacatgggcacaacaaatgctgtattaatgggaattattttggcgagtatgatgtgtattgatttgggcggaccaatcaataaagctgcttatgcttttacagttggactacttaccaccaatacctatatgccaatggcagccacgatggcaggcggtatggttcctgcaattgggatggcaattgcaaccttcctcgctagaaataaatttagtactggtgaaaaagatgcaggtaaagctgcgtttgtgcttggtttatgctttatttcagaaggtgcaattccatttgcagcaaaagatccaatgcgcgttattccaacctgtattctaggtggcgcagtaactggtgcattagttgctttatttcactgtgagcttgtgactccacacggcggtgtatttgtactactgattccaaatgcaatcaatcatgcgtggttgtatcttgcagcaattgcggctggaagtatcgtaacgggagtaagttatgccatcattaaaaagaatcaagaagaaaaattattaacaaactcataa

SEQ ID NO: 45340 - DNA, 861 bp, Acinetobacter baumannii
atggataagacttttgaatctttttggataacctgtaaagatggttatcagcttgcagctcaattttatcctgctcaagaaaagaaagctgagtaccctatcctgatttgcccagcaacaggtataactaaaaacttttatcactctttcgcaacgtggttaagccaacaaggctatgatgtattgagttttgacttccgtggtattggcgagtccctacatggagctttaaaacaaagtaccgcaagtattaccgactggggaacacttgatattcctgctgcaattgatgccttattaataaaaacgaaagcaaatcaagttattcttattgggcatagtgctggcggacaactactaggagtcgtacctaactataataaagtaacaaaagtgataacggttgcaggctcaacaggacatattaaaggccttaaaggaaaaaccaaggctttagcgccagttatgtttaatcttatcttccctatttctagtcttgttaaaggttatggagcaactcaattcattggtatgggagaaaacctacctaaaaaagttgctcaacaatggcgagagttttgtagccgtcccggatatgtaaaaaacgccataggcaagacaatttttcatgattttcattcagatattcaatgtccaattactgctatttgggctgatgatgatgagattgcaaccaaacgtaacgtacaagaattattaagtttatatccaaatgcaaataaaaaaatgattgagcttagcccaaaagatttaggctataaatcaattggccatatgctgttatttaaaaaatcacatcaaaaactttggtctattttagaacaagaaattaaacattaa

SEQ ID NO: 45341 - DNA, 807 bp, Acinetobacter baumannii
atgcgcttaaaacatattatattaacaacttgtctttttagctcgactctagcaatggcggagttaccccaagattcaagaagacccggtggtattgcagttattcctttaacttcggatattactcaggtcacttttcaacacaaaccggttttaattagccaagaaggacagcagcgttatgctgttttcggtattccgttatctactccacttggtagtgttcaactcgataccaataaagcccctattcaaatagaagttaaatcttatccatatgctgagcaacgccttaaagttaccaatcaagactatgtaaatcccaatcaaagtcaattagatcgttacgctcaagaagctaaagaacaaaatgatgtttatagttcatttacgcaaagttcgtggcaagccttaccaaaatttatacgcccaacttcgggtaaatttaccaattcttttggaagaaaacgcttttttaatggtgaagaacgtgctccacactcaggtctagacattccagcaccaataggccaaaaagtagttgctccagcagacggtgtagtcgttcaaacaggtcattatttttttaatgggcaaactgtattaatcgatcacggtcaaggcttaattagtatgttttgtcatttaagcgagataaaagtagaaaaaggccaacatattcgtcaaggggaaactttaggtctagtcggtaaaacaggacgtgtcacaggcccccatttacattggggaatgagccttaacaatgcacgggtagaccctcaactttttttaaatacgactcattaa

SEQ ID NO: 45342 - DNA, 489 bp, Acinetobacter baumannii
atgcttcagcaatgctgtcagttattagaagaccgtttacttaaagtcgcatttattgaaagtgccagttcaggttacttaaccagtcagttttcgattcataaaaatagtggtgctgatattttactgggtgggttagtcagttatgaccccagtattaaaatcagtgttttaaaagttgatccaaagttaattgaaacctacacagcagaatcaccacaagtaactgaagaaatatgcaggcttggccaaaccctatttcaacaagctgacattgttgtgagctgcacaggtttattaaaacctggcggaagtgaaaccacggaaaaacctgtaggtactttctttatctgtatttcttatctaggacgtatttatcattaccattattttttatcaggtcatgccgaacaaaaacttaaaactctcacacagaaagtagcagactcaattattgcgcttatatcttcaaatcagcataaaagttaa

SEQ ID NO: 45343 - DNA, 2205 bp, Acinetobacter baumannii
atgaatacctctttacgtttaaaccactattggattacttgtgctgatggtttagaaaccctcttacaagaagaaatagaacagcttggcaccaaagtgacagaacgtaaagcaggacgtttaatcattgaaggaacgcttgaacatgcttaccgtatttgcatgtggtcacgtcttgcttcacgtgttttacttccaattcatacttatgaacttgaacgtacccacgatgcacgtgatgtagctgaagagctttatgaaggtgcaattagttttgattggtcacttatttttgcaccacaaagtacctttgcaattcgcttacacgcagagcgtgaaattaaggtaaatacgcagtttgcaacccttcgtgtaaaagacggtgttgttgattcctttatggaagctgtaggtcgccgcccaagtattgataccaaacaaccggaaattacattatatgtgcttgcgggcaaaaccgagcatacatattgcctagatttatctggtgattcattacataaacgcggctaccgtcgtttcatgacagatgcaccaattaaagaaaacctcgcagcagcaattttacaaaaagccaagcttaaggaacgtaacccggaaattgtacttgacccaatgtgtggttcaggcacatttattattgaagcattaatgattttaactgatcgtgcgccaggtcttgtacgtcgttttggttttaatggctggcatggtcatgaccgtgaactttggctttcactcaaagccgaagcagcagagcgtcatgaaaaagcacttgaacaaccgttacctaagttttatgcatacgatgctgactgggaagctgtaaaagcaacacgcgaaaacattattgcagcaggttttgaaaagctactaggcgatattcaaattgaagagcgcactttagcagactggccagatttcggtgctgaaaataaaactgcttttatcgttaccaaccctccatatggtgagcgcttaggtgacaaagcttctaaccgttctctttacttaggcttatctgccctcttacaaaagaacttcccaaatcaatatgcagcaatcattgccgcacaaattgaacaagcggatgttttagcacttgaagcaccagaaatattacgcttaatgaatggtaaattaccgatttatgttcgtttcggtacagttaaacctgaaaaagtcactcaaccattcttggcaaactggcaagctcaacctgttgaaatggaagaagctcaagactttgctaaccgtttgcaaaagaacatgactgccttgaaaaaatgggcaaccaaagaaaatatctattgcttacgtttatacgatgcagacctccctgactttaaccttgctgtagacttatatggcgaccgtttacatgttcaggaatatgcaccacctaaaaagattgatcctgaaaaagcaaaaaaacgttttaacttagcgcttgctgctattcgtgcggtaacaggattaaatcgcgatgcaatctttattaaaacacgtgcgcgtcaaactggtacaaatcagtacaccaaacaaagtacagccaataaacgtttcatcgtgcaagaaggtaaagctaaaattttagtgaacctgactgactaccttgatactggtttgttccttgaccaccgtcaaatgcgtttacgtattgctcaagaagcacgtggtaagcacttcttaaatctttatagttatacctcgacagccagcttacacgcggccttaggcggcgctgcaagtacaaccagtgtagatttatctaatacttacttgagctggtcaaaagaaaacttcgttttaaacggtttaacggtagatcatgcagacgaacagcatatgttctttgcaagtgactgttttgaatggttaaaagaaggtcatgaacaatatgatcttatttttattgatccgccaacattctctaactctaaaaagttccacggtacttttgatgtgcagcgcgatcacgtctctttaattaaacgtgcaatgaaccgcttaacaagtgaaggtacactttacttctcaaataactatcgtggttttgagatggatgaagagatcgaggctttatatgatgttgaagaaattacttctgaaacgattggacccgattttaaacgtaatcaaaaaatccaccgtgcatggaaaattcagcatccagggctaaactaa

SEQ ID NO: 45344 - DNA, 1416 bp, Acinetobacter baumannii
atgtcgataaaccctatagaactgcttaaagaaaaagtatcttcaacaatattaaataatcaggatggatacctcggcgaaaaaacaaacgctttatctaagttttatccaattctactttcattattagctgctaaacctgatcttataggacaattgaaaaacagtttggctccgtcattatccgatcttttttctcataatgagcaaattaagaatactgtgcttacccatttaagcggtacagcaccaaataatgaaatcgaaaataccctcaatagcgcattaaaaccgagccttaatgcaatttctgacgttgccggaaatgatcaacaaagtattgtgaactatttacgtcagcatgctgaaacgatccgttcatatttaccaggatgggctgtgggcttattagctccattaggtattggagctggtttatcttctgtaacatcatcgacagcaccgccacttgcagcagcaacagagactacgggcaaatctcgtggttttttacccattattgcgctcattattctcgggttattaattgcttggttgtggcgctcttgccagcataaagaagctacacctgcacctgaaactaaagctgcaagcggtgtagaggccgcggctgctccagctactttaactttaagcaccgatgataaaggtgctgtgagccagtgtcaggctggaattggcgatcaaggtttcttggcgactttacaaactcaagttaaacaagtcttttcagctactaaagattgtgatgttgatacaagtcaaacttatgcggctgcttttaccgataaggatgctttggcaggtgtgttgggtgcattaaaaggtattccaaacgcttctttagaatgggtgggtgacaagattacattgaaagcaggtgatgctgcagcgttagaagcgttaactgctaaagtaaaagcacttgttccacatactgaagttgttgccgcagcgccagaaacagctgaacagtctgtaagcaacagtttaagtgcttcacaaacagccttaactgcaattgacccgaacaatgtagatgtaaacgcactagttaaagcacttaatttacaaattattaactttgcgagtggctcaagtgacattcctgcagataacaaagctattcttgatcaagcagcaacccttttaaataaagtgtctggtgttaaattagatgtaggtggtcacaccgactcaacagggaatgccgctgctaataaagcgctttctcaacgacgtgctcaagcagtagtagattatttagtttctaaaggagtggatgcttctaaactggttgctaaaggccatggttcagaacagccagttgcagacaatacgaccgaagaaggacgctttaaaaaccgtcgtattgagttttcagtagctcaataa

SEQ ID NO: 45345 - DNA, 627 bp, Acinetobacter baumannii
atgttaaaaatcttagggcgtgataattctattaatgttcgcaaagtcttatggctatgtgacgaattaaatcttacatatgagagagaagattggggaataggtttccgctccgcccaatctcctgaatttttgcaattaaatccaaatggtcaaattccagtaattttagatggcgacttagtcctttggcagtcgaatagcattatacgttatctagcaaatgcttatgataaagaccatatactctacccaactcaagctaagcaaagagctattattgaccagtggattgattggcaagctatagaactgaataacagctggacttatgcatttatgtcgctcattcgacattcagcccttcatcaagacccgaatttgttacaacaaggtattgatcagtggaataaacaaatgcagattctcgatcaacaacttgcaaaaaatcaagcctatgttgcaggtactgagtttaccctagccgatataccaattgggctatctgtacaacgctggaaagcaactccttttgaccattcagcgcttaaacatgtcgaccaatattttgaacgtttaaatcagcgtaaaggctttttaaaatggggcaataacggtcaaccttaa

SEQ ID NO: 45346 - DNA, 1062 bp, Acinetobacter baumannii
atggataacgtagctcagctagaaactgatactaatttccaaagccgaaagaaaataacttggggtgtttttagtgtcctgctgttatttttatttgctggcatcttatattatttttttgtataccgattctatcaatctactgataatgcttatgtacaagccgatgtcacttgggtaatgccaaagatttcaggcgaagtgatggagttattaattaacgataatcagtttgtaaaaaaaggggaaactttagcggtattagaccatcgtgactaccaagctcgttatgaccaagcccgttctgtggtcagcttaaaagaagcagcgcttggtgtacaacaacaaaatgaaaagtctgcacggtcgtcaattattgaagcaaatagtggtgtagtggcagcacaagcagacctagtgcgtttgaaaaaagagttcgagcgttatcaagatctattaaaagatggcgtaattacccgacaaaattttgaagggattcagtctcaatatataacggctcaggcacagctcagcaaagcgcaagccgccgtaaatgcagcagaagctcagttggggagtttacaagcgagtcgagcgcagcttttagcagatattcaaagtgcccatgcaaacttaaacctgtatcaggtcgatttggcttcatcaaaagtggttagtcctgtaagcggtaaaatcggtagtctggcaattcaaaaaggctcacgtgtttctccacaaacccgcttaatggcgatcattcctgaaaatagtttgtatgtacaggcgaacttcaaagaaacccaaattgaaaaaatgcatatcggtcagaaagttaaattaaaacttgatgcttatccaagcctcaactttaccggaaaaattgagagtttttctcccgcttcaggcgcgactttctcacttatgccaccagacaatgccacaggcaactttaacaaggttgtacagcgtattcctgtacgtatcgccatagattcaagcccacatattgatttgataaaacctggaatgtcggtgagcgtcaccgttgacctaagaacttaa

SEQ ID NO: 45347 - DNA, 1548 bp, Acinetobacter baumannii
atgaataagcatgttgaagccgagtggaggtttcccgcaaaaactgcatgggcaatttttgctgccatgatttttggtaacttcatggcgattcttgatattcagattgtggcaagttctctaaacgaagttcaagctggtatgagtgcaagtcgttatgaagtcacttgggtacaaacggtttatttaattgccgaaattattgcgattccaatgtcgagtattgtctcgcgagtgctttcaacacgcgtctattacaccatgtgtgcaataggttttacggtcagttctttactttgtgctttgtcatggaacttagaaagtttattggtttttcgtggcatacaaggatttatgggcggcggtatgattccgacttccatgaccgcattgtacttactttttccagaaccaaaacgctcattacctttggtcatgtttggcatgatcagtactttaggtccagccattggcccaaccattggcggttggctcaccaataatttctcatggcactggatgttcctgatcaatattattccgggcattatcattgctacggtcatttactcaggtccaaatattgaccgtgccaactattcactcatcaaaagtatggactggtttagtctcattggtatggcgatgtttttgggtgggcttgaatatttccttgatgaaggtgcacggcatgactggcttgcagacacaggcgttcggattgcttttatggtctgtgttgtaggcggcatgattttcttctctagaagttttactcagcctaaacctttgctcgatttatcggtatttaaaaataaaaactttaccttaagtgccattacaacgtttgtgattggtatggcgctgtatggcttgggttacatgattcccgtgttccttgggcaagtccgtgaaatgaacagtagccaaattggtcacgtcatgatggtgacaggtattgtcatgttctgctttgcgccgtttcttgcgtggctcattcctaattttgatacccgaaaaaccgtattcgtcggaatgattctggcgggctttggtgtctggctcaactcgcacctcagcattcatagtgattatgactttatgttttggccacaaatttaccgtggtattggcctcatgatttgcctgattgtggtctcgcatttggctatgagtacattgccactcagtaaagttgccgatgccagcggtatttataacctgatgcgtaatatcggcggcgctgtggggttagcacttatcaattcatccttagattggctgaccgccatgcatgtcacccagattaatcagtcgatgacaccgcaaaactggatatttacagaaagactcgaccagcttacggcgcaatatcaagaagttggtgcaaatgctcagcaaatcgcgctcagcgtgatctatcgcgatattcactttcaagcactgacatcgagtttcaatgacttattacgcatgctcgcaatcattatgtttgtgaccgcctttttaaccatatttatggatcgggggaagaaaatgaatatgtag

SEQ ID NO: 45348 - DNA, 822 bp, Acinetobacter baumannii
atgattaatacaacatataaactgatttcaaaattgaacctgaaaaacgcaacttatgggcaatattttgaaaaagagcaaatcgatactgaacgattaaaagtgatgtattccatttacgagcattattatgaaaataccagattttctattttcgtagatgattttaaaaataaaagcggtgcgatcttaatttttgactcagaaacagatgagattgtcggtttctcgacggtagttgtgcagcatttctacttaaacggtaaagactacactgtgctctttagcggtgatacggtcattttgaaaaagttttggggcacgcgtacattgcaaagtaccatgctcaaactcatgatcaaacttcgaattaaatatccttttaacgaactttattggcttctcatttctaaaggctataagacctatctcttacttgccaataactattatgtgtattacccaaatatcaaagatgaaaaccaacatctttcggaagttgttgaacattactgtgaaaaattttttggcgaatactacgacaaagaagccggcttactcaactttggtgatgactatcaaccattaaaaggcgaagtcgcaccgattactgccgaaatgagagaaaagaacccaaatattcatttctttgaacagaaaaatccaacttggagagccggtacagaactgccatgtattggtcgacttggttggaaagatattgcccgtttccctgtaaaactgatgacgaagccgacaagcaaaggaaaatttgaagcgcagttaagccataaaacaaaacgtagagaggctatccaatga

SEQ ID NO: 45349 - DNA, 1587 bp, Acinetobacter baumannii
atgaaatctaatcaatggttgactctcggttcgcatcttattttaaaaaaatggtgtgatgcatctgaccgtaatttccaaaaacagtttaatgccttagagactacgcaacgtcaaattttgcattcgattttacagacctctactttggccaaagttaaacaggttcaaaactatgagcagtttgtaaaagcatttcctgcaactcgctatagcgcatggcgagaagacattcagcgttaccgtgaacaaaagctttcactctctagcagtaaactggttcgtttccagccgaccagtggttcgagtgaacaaatcaagtttattccatataccaagctgtttttagatgaacttgaccatgcgattgcaccgtggatggcaagtttataccgtaaatgtccagagcttagttcgggtacacattactggtcagtgtcatggttgcctgaaagtcagcgtgaagttttaaaagacaaaaacttaaatgatgacagtgcgctactcggtgtaggtaagcgaattttgtctaagtttacccaagccgttccaagtaacgttgcatttgcggccaatgctgacgatgcactgtttgccaccatttgttatttggtcgcaaaccgtaacttagctatgatttcggtatggagtccaacgtttgcgctgcaattactggagcgtttagagttattgcaaatagacgtggttgaggttttgcaaagtggtaaatggggcagtcgtcaggcttccttaaaagaagtcactgcaccgcatagccctgaaagtgctcaagccttaattgcaagttcaaacggcgaacagatcgactttaaaaaactttggccaaagttaagtctagtatcgagttgggatactgcaggttcaaaagcgtgggccgaaaaattaaaagagaaattgcccaatgttcagtttgaaggtaaaggactgtgggcgaccgaaggtgtagtgaccattccctacaatgaccaatacccattggcttaccaaagccacttctatgaatttgaatatttagaaggtgaaaaacaaggtcaaatcgttccttcatggcagcttaaacaaggtgacgtggtcagcccgctgattacttcgggtaatggcttactgcgttactgtttggatgattgcttaaaagtgactggctttatagagcaaattccgtgttttgagttccaaggccgccgttttggggtagatctggtcggtgaaaaactagcacctgaaaccgctcaacagttgttgtcgcagttaaacgaaacggaatcaaaagcaatttctttactggcgattgatactcagcaacaggttaaaccattttattgcgtgctttttgaaggtgaaattcatcacagcattaacaatgaatatatcgacagtattttgcgtcaaaacttccattatgaacttgcacgaaacttggggcagctcgaccaacctcaaattcgtcaggccaataatggctggaatgcctataaaaaactggtcatgtttgatggcattatcgaaggcaatatcaaacctgagccactcaaaaaagtcaccctgaatagtttggaacaactatga

SEQ ID NO: 45350 - DNA, 1329 bp, Acinetobacter baumannii
atgaaagggatgaagccatataatacgcggtttttaacacttcgacacgccttgtatttaggcgtgttgttggtgtcgaatacacatgctatgactttagatgaggctttgtcagccagtttaagacatgaaagtcagctcgaagtcagccgtttaagtgtgaaccagtccaccgctatgcttgaacaggccaagcaacgtgatggactcaaagtcaatttagtcgggcaacttgactatgaaagaataaatacgccttcacacgtcttgtttccaaccgaaggaaaccgtaaaggccgaagtttgcaattgcaggcagattatccgatttatacctctgggcggcaccgtttaggaatagacattgccgaaagtcagctttcagcccaacaccaaggcttatcagatcaaagatcggaaactattttaaataccgtgatggtctataccgacgtattaaaaaagaaagccattttagaacttagacaaaagactatggcaaatctgcaacggtctttatatgagtcaaagcgccgttttgatgtcggtatgattacccgtgcggatttggctcaggtgttggcacaagtcgcgcaaggtcaagccgatattacacaggcgcaatctaacttgaccgtaagcgaagcacagttttatcaagtgacaggtacaacacctgacaaccttgttccaatcaatcaattacctcctattcccgctaacctagatgaaatattggctcaaaccaagaatcatccagcgttaatgcgggctaaatatgaaaagcaagccgccgaaaaacaatatgctttaactaaacgcgaactttggccaacggtcatgctgaccagccgtgctggtaagcaagatgaagcgagttatattggttctgaaagtaataactatatggttggggtgcagctcaatgtaccgctttatgacgatggtttaaatcgggccaatgtcaaaaaagcacaggccgatatagttttggctacgcaaaaaattcgaagtcttgagctagacttgaacaagcgtacccgtaccacatatgcgcagcttcaaaccattcgacaaaataaagatgcattggcaaatgccatagaggcagcgtctattgcttttgtctatacccgtaaagagttcgatgtcggcaccaaaactacctttgatttgcttaataccgagcagaaactactcgatgcgcaaacacagaaaaccgtaaatgaccaagacgaagtggtgtttgtctatcagctactcgaccaaatggggcgtttaaacaatttggttcctacacagaccgcacaacaggtgaataatgaataa

SEQ ID NO: 45351 - DNA, 1161 bp, Acinetobacter baumannii
atgaataaaacaaatacaccacttgctaatactctcattacccgtgaagcgactttggcagatgacgaggctttacgagagttaattgccgtacccatgactaccaaaggcatacaaatcagctttcagcgtgaaccgagttattttaaggcgtccgacattctctatcggcataaactgcatgtcgtgattgaagataccgagagtcaaaagaaagttgcctgttatagcaatggttaccgtccgtgttatatcaatcggaacattcaaaacttacgctatgctggagatttacgggtagatcacagctatcggggtaaatcattggtgaaagtcttaggcaaacatgtaaaacagactatgcatgaaccaaactatagccaaatgattatttttgatgataaccacgcggcgcgtgccgctatacaaacaggcaaaacgggaatgcccgattattatgatgaaggacttatagagacacttagtctgacgagcactggcacaaaacggaaaatcacggcatttctaaagcagaattctcagcagagtaaccttcaagagatacgtacatgtgtcgctgaagctaaacatgtaccagccatgaaccagtttattagcgacatggcagaatactataactttattccagcctataactttgaagaacttgcccaaggtcatcagtatttttcaggaataaaactctcggacttttcactttattttaaaggtgaaaaactggtgggcatgtttggtttgtgggatcagcatagtattaaacaaaccaaaattttaaattacagctcggccatagctgtgcttagacccgtctataattttttgacaccaattaccaaaggcatgcgtttgcctaaacttggtgactccattcagtaccatgtgctacatacgcttatgtgccatcctgaagatttggctttgcatcataaaatgctcgaagatgcctataacaagtcaaaacagcagggcgttggtgtggtgagttttacgctttcacataaagacccgcgatatcagttaaatcggttttataaaggtgaacgtttaacgggtatgcatggctttattagctttgaaggtgatcctcggccaagttttgataaaaagctgattccatacttagaggttggacgtatttaa

SEQ ID NO: 45352 - DNA, 969 bp, Acinetobacter baumannii
atgaaaaaaagtttattgggcggtcttattctgtctttgtgtacgactccagcttttgcattaaatattttattggttaacgatgacggcctaacgagcaatatcaaagcactttatgacgaattaaaagcaaatggtcataacgtgcttgtgtctgtaccgtgttcaccacaaagtggtcgtggtggcgcaattgtgatgtacagctcaacaacaattactgcggataacgataagcaaattgcggctgaaaatggttgtcacaatggcgcagcaccaattggcgcacctgccgctggaacttttaccaaagcgggttataccaatggtgactggaactacacgcatggtacacctgtcatggcaacagtttatggactagacgtggttgcaccaaaacgctggggtaaagcaccagacctagttttatctggcccgaatgaaggtcaaaatgtcggaaaagtcgttgtacactctggcaccattggcaatgtacagttttcggcaggtcgtggcattccgtctattgcattaagcgccgataccaacacggtagatgacaaaactttaaacaaccctaactctgcaattgtggcaaaacaaactgtagtgttattaaaagaattacaagctaaggcaggcaagggccagttgttgccaaaaggtatcaccctaaatgtgaatttccctaaaaatttaacaaccagcacaccgtttgcattttcaaaaattgggacttatgacttatataaactgaagttccaagtgaccaaagatagtaaaggcaacaatcaatttggcctcggaatagatgcgacaccatcggcaccaactgccgctcaaatgtcggatgaaagcgctgtaatgcaaagcaaaattgctgtaactaccatgcaagttgcttatgaccaacgaccagcaggtcaagaatggcttaaaatccgtttaaaaagcttatttaacaagtaa

SEQ ID NO: 45353 - DNA, 147 bp, Acinetobacter baumannii
atgaaaaattatattataaatttatctgatgacttttgtgaatatgcttgggaaattgagttgaagggatgtcttgaggtggatatacagatatttgataaactatatacatttaattacttatcttttaatatatacaagatataa

SEQ ID NO: 45354 - DNA, 360 bp, Acinetobacter baumannii
atgaggccttttttagtatgtttgattgtttttcttagtggttgtagagctgtagaaattaataaggagtattattttcagcaaggttttaatgcatcaactgttgtaaatctaactaattatgtctatataattaaagagttacaaaaatatgaaaatgtggatatatatattcctttattgcttgttgcgcaagatatgaggaggatatcagaaaaagatttaactctttatgataaaaagaatttatgtcaagttaaatattttatagataatagatatttaaatgatcaaagaaagattcaaaaagatctcttggaaactaaaaaatggcttttaaatctaaattactgtgattaa

SEQ ID NO: 45355 - DNA, 324 bp, Acinetobacter baumannii
atggaactaaagaaaatttacttttatctgctaaaaagatataagaaaaagatagtttttttaattttattttttactttagtgagtgtttctattcaggttaaagtaggattaattgactatgggtacttttttgtcattttcctaagttgctatgtttctatatatacttggtgcaatggaatatttgcagaaactttacctatcactgaattgagtaataatggagaagtcatagcgagatggatgatgatttttttaagtacattttttcatatttatattttggttaatcctttgttaaataaatggttttataattaa

SEQ ID NO: 45356 - DNA, 930 bp, Acinetobacter baumannii
atgacagacttagtcgtaaaatctaataaacttgtacaagctttacagacacttactttaagcgaaacccgtttacttcagctcgcaattgtagacgctcgtgagactggacaaggattatcaacagatgaacctttagaattaaatgctcttagatatgctaaagcatttaacgtttctccagatgcagcttatttagcattaattgaagcagaagattctctttttaaaagacaatttacgattaccaatgaagatggaactttaacaaaaagtcgctggattcaagatgctaattatcggaaaggtgaaggaagaattttagttaccttaactcgtgtggtaattgaacatgtcactaaaatagatgggtttgaacagtattttactagttatcatttgaaaaaaactgctgacttcaaaagcgtttatgcagtacgtctttatgagctcttaatgcaatggaagtctgtagggaaaacgcctgtttatgaattaaataaatttcgtagccaacttggtataggtgttaacgaatacactcgaatggaagcatttaagagacgtgttttagatattgcagtagatcaaatcaatgaattttcagatataactgttaaatacgaacagcataaaaaaggtcgttcaatctcaggattttcttttagctttaagccaaagaaagcaactattcgatctatagaaactaatagagaccctaatacaactgatcttttctcgagaatgacagataagcaacgccacttattcgctactaaactttccgaactaccagaaatgggtaagtattctcagggtacagaaagctatccacaattcgctatacgtattgctgaaatgcttcaagatagtgaaaaattccaagaattattcccttatcttcaaaaagttggctatcaagctgcctaa

SEQ ID NO: 45357 - DNA, 1437 bp, Acinetobacter baumannii
atggcgatttaccacttttcagtcaaaaccgtagcacgatcagcaggacgttccgccactgctgcgattgcctatcgggcaggtgaaaagatctattgtgaacgtgaaggccgagaacatgactacagccgaaaaaccggtgtggaatacaaagaaatttatttacccgaaggcgcaccagagcatttaaagaatcgagaaaaactctggaacgaagttgaacaacgggaaacccgaaaaaactcgactgtagccagggaatttgaaattgcctttccaagtgaactgaaccaggaacaacgtctggccatgctcgaagaattatgtgccagcatcgtggaaagacatcaggtagcagtcgatgcctgtattcatgcaccgcataccggatccggcagtgatgagcgcaattatcacgcccatatcctaatgagcacacgtaaacttacgccagaaggttttacagagaaaacccgggaactcgatcagaaacacagtggagaaatcgagcactggcgcgaacactttgccgatatctgcaatatgcacctggatctagccggatacaccgcccgagtcgaccaccgcagctacaaagaccaggagaatggcctggaagccaccctgcacgaaggaccgaaagtcaccgaactgcgccgaaaagggattgagaccgaaatcagccgtagtaatgatgaaatcaaacagagaaatcaggcgcagctgcaatacggcaaaaatatggatctgctgattgctgaaaatgagataaaactcagcacactgaaaactgaacagcagacccaaatcaaaaatagcgctaaaacgtcaccaattgacgaaaaagccctatttgaggaaaaacagagggaaacccttggtaaagtgctaaatcgcgaaatcagcgcaaaagacgcgaatctagacctggattttatgcagcgcaatctcaaacaagccgaaataaacctgaccaagcaccacaaacatcaaaacgagttcaatcagcaccttgcccaggagatcgtgaaaagcggactcaagcaaagtcatgacaaattgcaaagcctggtcgatcaacacaaccaattaacccagaacaaacccttactgtttggaaaaaaagcctgggaagcccaacgtgatgcgatttaccaagaacacaaaaaactgaaaggtcagcatgaacaccagaaaaaacatggtgtgaaggatttattggagaataaaaagttcaaagaacatgcctggaagcagtaccaacaacaacatccggccaaagccaagcaataccagactctatacccatcctatcaagtcattaaaaaatgtgtggatgagatcaaagcagaacaacagatgaaactcagacaagaacaacagctcaaagcacagcaacaagctcctaaaatgaaatctcgtggcatgagtcgctaa

SEQ ID NO: 45358 - DNA, 282 bp, Acinetobacter baumannii
atgagcgttactgaaacactagatagtaaaatcaaggcacaggaagaaaagctaaagcagttaaaggctcaaagacaggcagcactggcaagagaacgtgccaaagagaaagaacaggctcgaaaggatgataccagacgcaagattttaattggatcctgcatgctaaaaatcaccgaagatgatgaacaggccagagcaaaactgattgctcagatggataaatatttaatggatgaaagagatcgtaagctgtttgatctgcccgcatttaattattaa

SEQ ID NO: 45359 - DNA, 192 bp, Acinetobacter baumannii
atgagattgctaattgctttaatttttccctggctgctgtttttcaccatagggcgaccatttgcaggcatcatttgtttgctacttcagattacagttttaggttggatcccggctgccatctgggcggtctatgctttgtcgcaatacaagactgatcagaaaattaaaagaacaattcgctcatcataa

SEQ ID NO: 45360 - DNA, 510 bp, Acinetobacter baumannii
atgattagggaggaaaaagatcaagaaagttggaaaaactttaatcttgatgacattaaaaatactcctctagaaaaatttcatccatttgaagaatcaatgattttaaaggctggtgatactgaagaagaagctttagagattgtttctaaagaatttgaactagttgatgggatcgattcaagaaaaattcttcttaatgctattcaaagttgggcgattgtttcgatagataacttgaggcacgtagtcgagaaaagaagagatgctagagaacgattttcgaaattagctcaccttacattattgaatccatttgaagtatggaaaattaaatattctgatggaggatttagacttgcttttattggaatatttgctggttccaaaaaccatattctgctgattttaaaaatagatgtgaataataacgttctttggaattttatgcagtgtgagttaaaaaagctcaacaagcataggctaggtgaattactttataagaaataa

SEQ ID NO: 45361 - DNA, 651 bp, Acinetobacter baumannii
atgaaagcagaaatttactttgtcagtggcattgatacagatattggtaaatcagtcgcaacaggttatttggcaaaacaatggtgtgaacaaggctttaaaaccattacccaaaaaatcattcaaactggaaatatcgatatttcagaagatattcaaagacatcgtcaaatcatgggctgcggtttattgcctgaggatcagcaaaaactgaccatgcctgaaatttttagttatccagcttcacctcatttggcgacaaaacttgatggtcgtcaactggatttttcaaaaatccagcaggctaccgatgttttagtggatcaatatgaacgtgtattgattgaaggtgcaggtggtttaatggtgcctttgactgaagatttactcacgattgattatatcaaacagcaaaattattctttaattttagttacttcggggcggttaggcagtattagccataccttattaagtttagtagctattcaacagtatggtattcatttacatgccgtagcatttaaccataaagacaatgtaaaagatgaagtaattgcaaatgataccattcattatttaaagggttatctgaccaagcactttaaacaggcagagtggtgggatattcctttacttccaaagatttaa

SEQ ID NO: 45362 - DNA, 756 bp, Acinetobacter baumannii
atgattgaaacaacacaagttgcaaagcgcttttctcaagcacagcaaagttacacccaacaagcaattgctcaatcacaggttgcacaacggttagatcaactcattcttgcgcatgtgaactttcaaatgttgcaaacaggtctagaaattggttgtggctcaggcctattcacgaaatacatgcagcaatacccaaggcttaaacagatgtacttaaacgatctttatccagaagtacaacaacattttgcacaagatttacacgtgcaatggtgtattggtgatattgaacagattgagttaccaccagcattagatggcgtgttctcttgttcagccttacagtggatgaaagacattgaacaactcagccaaaacattcataccgctttaaattcaggtggatacttttgctttgcgagttatgcggagcaaaatttaaaagagataaaagcgctgacaggacaagggttagattataaaacctgcgatcaagtcgtatatctattagaacggattggatttgatgtactccatagtgagcagcaagggcttgagttgtattttgaacatccatctgaagttttaagacacattaaagcgacaggtgttcatgcaacagcccaaggttttcgttggacgaagacgtcgttaaataatttttatactgattatcaaaggtttaaaaatcaagattcggatcactatacattgacctatcatccaatttggatcatcgcacggaaaaaataa

SEQ ID NO: 45363 - DNA, 1167 bp, Acinetobacter baumannii
atgaatcatattgatcacttccaagagaagctcgatgctttaaaactccaaggacaatatcggcaatttaaggccaacctttcaagtgaatttattttacagcgagagggtaagcctctaatcaatttggcgtctaatgattatttaggcttagcaggtaatttagccttaagagaagcattttttgatcagcttcccaatgaacaacgtcatttgagtgccagttcatcaaggttgctgacaggcaactatccagcatttgaacagttagaacgagaaatgtcgcaggcttttgggcgttcagttttattattcaacagcggttatcacatgaatatcggcattttgcccgcactcagtgatagtaagactcttattttagcggacaagttagtacatgccagtataattgatggaattcgactctcatcagccaaatatttacgctatcggcataatgatttagtgcaattaaagcaatttcttgaaaaataccaagaagatcatgagatcgaacgcatcattgtggtgactgaatctatttttagtatggatggagatgaagcggacttaaaggcattggttacgttaaaagcacaacactctaaagtgctactttatgttgatgaagcacatgcaatcggggtacgaggtgagcgaggcttaggatgtgctgaacaatatgatgttttagatcaaattgattttttagtcgggacgtttggtaaagcacttgcctcaattggtggctatattgtgtgtcatgaaaccattcgtaattatttaattaattttatgcgtcctctcatttttagtacagcacaaccacctattagtgcagcatggacacaatttgtttttcaacacatgcaatctctctcggcagagcgaacgcatttagcacacttatcatcttatgcttggcaaggtgttcaagcacttggacttgattgcccctcgacctcacagattgttcctgtgattttaggtgaggcgaaaagagccaatgcagtagcagagatgttacaagaccaaggttattatgtcttaccactacgccccccgacagtacctcaaaatacagctcgattacggatatgcctgaatcaaaatgtacagcaacaacatatggtggccttatttgagtatttaaggcagtggttatga

SEQ ID NO: 45364 - DNA, 1281 bp, Acinetobacter baumannii
gtgcatgacctctttgatcaacagcatatttggcatccctatacctcaatgcttcatcctttaccttgttataaagtgaaagctgcacatggtgctttgattgaactagaagatggcacaaagttgattgatggcatgtcatcttggtggtgtactattcatggctataaccatcgtgaattgaatcaagcagtaagaaatcaattggagtctatgtcacatgtcatgtttggtgggtttacgcatcaacctgcaattgatttagcaaaactgctgcttgaaatgacagcacctaagttagataaagtatttttcgctgattcaggttctgttgcggttgaagttgcattaaaaatggcagtgcaatattggcatgcgcaaggacaaggtcaaaaaagcaattttgtctctacacgttcggggtatcacggtgatacatggaatgcgatgtccgtgtgtgatcctgtgacggggatgcatcaaatttttggtagtagcttaccgaatcgattctttgtgcctgccccacaaatcccgtttgatggggaatgggatgcagcagatcttgagcctttagaaactttactcatacaacaacatcaaaatattgccgccttgattattgaaccgattgtgcaaggtgcaggcgggatgcgattttatcatcctgaatatttaaaacaggcaaaacgattatgcgagcaatatgacatcttactaatcttagatgaaattgccacgggttttggtcgtacaggaaagctatttgcctacgagcatgcggaagttgtgcctgacatcatgtgtatcggtaaagcacttacaggtggttatatgacgttgtctgcaacgctgaccacgcagaatgtagctagtacaatttcacaaggtgaatcaggggtatttatgcatggcccgacctttatggcaaatccattggcctgtgcagtggcagtaaaaagtacacagcttttacttgagcaggattggcaatctaatattcaacgtatcgaacacactttaaaacaaaaattacaacaagttgaacctttaagcattgtaaaagatgtacgagtgctaggtgcaattggtgtggttgagttaaatcagaatgtagatttggcacaattccaaggagaatgtatcaaacgtggcgtatggattcgcccatttggcaagctggtatatgtgatgccgccctatattattagcgccgaacaattaaataccttgctgcaacatttaattgaaatgctacaagcaatggaattgagcgcatga

SEQ ID NO: 45365 - DNA, 726 bp, Acinetobacter baumannii
atgaagatgattgtcatcactggatggggattggggacacacgtactcacaccttttacagctttattaaaagcagcagggcatgaagttgagctgtgggatatttttgatccttttgattcagatattcttttggaaaaactcaatcaagctgaaaaaagtgaactcctcattggttggtctttaggggggcaacttgccttgtatctcgcctatactttacaaaccagacgccaaattatgttgcccgtcatttgttgtatgtctaatccatgttttgttgctcagcaagaatggccacacgccatgcctcagagacaatatcaaaacttcgcaacattgattgatagcaatacattgaaagggattcaccgcttttgtcatttggtgagtatggggtcatctgctccactcaagcgggccaaaactttgcaaagttatttatctaagattgatttaaactatcaaaaagatcatctctatcttttagaacaattggatttacgaaaaatattgcataggctttcgagcaatatgttatttttaattggtaataaagatcagcttgttccttgcaaagtctctaatattctgggtacttttgaagatgatcggctaaatattgaaatcctagaagcttcgcacgatagtatcctgttcgagccagaattaattattgcgagtatcttgcattttttagagaatgctttacttactctaaagtag

SEQ ID NO: 45366 - DNA, 1011 bp, Acinetobacter baumannii
atgacctttttaattatgattcgtaacgattggacgcgtgctgaaattcagcaattttatgatctacctttaatggatttgctctttcaagcacagacggtacaccgtgaatactttgaagccaataccattcaagtcagtacattattgtcaattaaaacagggcggtgcccagaggattgtaaatattgttcgcaatcagctcattatgataccgatttagaaatcgagaaacgtgtagaagtacaaaaagcaattgctgaagcaaaacaagcgaaagcatctggatcaactcgtttttgtatgggggcagcatggcgtaatcctcatgaacgtgatatgccttatgtcttagaacttgttcaagaagttaaaaagcttggattagaaacctgcatgaccttaggaatgctaaatgcatcacaagcagaacgtttaaaagatgcaggcttagattattacaatcataacctagacacctcacgtgaatattatgccaatgtgatcagtacacgaacgtatgacgatcgtctaaatacgttggatcatgtacgtgctgcgggtcttaatgtatgtagtggtggtattgtaggattgggtgaggccaagcaagatcgtattgggttattgtatgaattggcaacgatgcctatccatcctgagtcagttccaatcaatatgctcgtacctattgaaggcacacccatggctgatgtagaaaaattagatgtgattgattggattcgcaccattgctgtagctcggttgattatgccaaaaagctatatccgtttgtctgcaggtcgtgaatctttgtctgattctgagcaagctttggctttcatggcaggtgcaaactcattgttctcgggtgataaattattaacaacgccgaacagtggtgaaggtaaagataaagttttgtttcaaaaaatgggtttaaaagcagaaggtagaaaaccttctgcaaaagaactggctgtagatgcaatgcaaactattgatgcttaa

SEQ ID NO: 45367 - DNA, 525 bp, Acinetobacter baumannii
atgaaaagccttacagttcttgagctttctaagctttacaatatcaatagacaaacgatttacaacaacataaagaaaggaattttaagtaaaaattctgataataaaattgatctggctgaagctattcgtgtttttggcgaaccttcaaaaaaactagatgtaaaagagtctgtaaaaatagacagtccaaattcggcagaagttttactacttaggcaacagatagacatgctgaaaaatcagcttgatgatgcaaaagagcgtgaatccttttatcaaaatcaaattgagacgatgcaacgtctactggaagcacccaaaccaaagattcaagaccctagtgaactcgaactccctcaatcagctcccattgtagaaatgaaggaagaggtaatagtcgttccagctaaagatgacggattgactactccagagaacaaacgtatccctgtcccagaacacgttgagcctgaacctaaaaagagaggcttcctgagccgttttttccttccttatggttag

SEQ ID NO: 45368 - DNA, 459 bp, Acinetobacter baumannii
gtgattccaagtgatgttgctgacatctataaaggcatccaacaaggcggtgtcaatggtatgacttcagcagctagaaacattcgtgatgccacaatggtttatgactgtgcttcaagaactggccagaactataaagcctgtcaagctgcattaaataacaatgcacaaacacaggctttaaatcagcaagcgttaggcgttgcggatctgcgtactgaacagattgataatctgcgtaaacagatcaataacactactgatgctaaagctatcgctgagttacaggctaggattcaagcggaacagtcacaagttgctaatgatgcaaaccgaattgctttgatgcaggcgcaagcgcaagctcaaaaagatgcagcacaacagcttgaaattgaaggccgattaaaacgtgctgcccaaaaaggcaacattcttgacggctactctggtaactaa

SEQ ID NO: 45369 - DNA, 816 bp, Acinetobacter baumannii
atgaaaaaacttaaaaaagtatctgctgctgaagaagctaaaagctatgaaaaagctatggattgggaagcagatcttattgcgatgcgggctaagtcagaacgtaaagcttggactattgcaaaagtagcggtgggcgtggccgtcttagaagccattggattagtgacattagctccaatgcgccagactgtacctgttgttttcacagtagataaagctcaaggaaatgttgaatacgtgggtgttgttgatgatcagcaagtaaaaggcaaacaagaattaattgataaaaataacattactcgttatgtaaccgcccgtgagagttatttctatccgttattacagccagattatgatttagtcatgactatgagtagtaatcaggtcggtaatgactttgcttcactctatgaaggtgatagtgcaagagataaaaaatacggcaaaaaatatgaattaaaagttgatgtgatttctgtccagactaatcaggatgaaacaggttttactgctagtgtccgcttcactaagactttgcattcagtcgaagctaatcgtgatgaacatccacaatattatattgcaagtattcgatatgaatatgctccgaacaatctaaataaactggtagaaaaagatctaattaaaaatccattcggctttaaggtcgtgggctatcgtgtcgatcctgaactatctcctaacagacctgtagcgcaagctgcggttgttgaacctagtcagcaagtctatgttccgattcaacaaggcggggctgctgttcagccacaagctcaacaaggaatgtaa

SEQ ID NO: 45370 - DNA, 894 bp, Acinetobacter baumannii
atgaaaaaattaattcttgctttgggtttggcggtgcatgggatctcttatgcagcaattacgcctaaagctttgcctaccgattcacgtattagaacaatcaattatgttcctaatgatgtttatcgaattactgtcaaaaaaggcactgtaacccgcattgtattaggtgaaggtgaaagaattttagagcgtggtgctgctactggatacccttcagactgtgaaaaggatgacaccaattggtgtatttttgcagatactggatcaaatttagtatgggtgaagccaaaggataaggctactcggaataacttagagttacgcactaataagcgtgattatagttttgattttcaagttctaaataatgccaaagaaaaaccgatgtatcgtgttgtctttaaatacccacaagaagaagaagaaaaacggaagcaggaagaagctcaacgctataacgcttatgcagcacaattaaaagaagaaagccaacttactgaatttttggttttacagcatcgtttagccaatgctgcgcctatccctaaaaactggaattatcgtcaagctgcaaacagcaaagggaagcattttgttcctgaaatgctatttgatgacggtcgttttacctatatgcgatttaaaggaaatactgatattccagtcgtatttattgaaggtacggaaggggaagaaaaagttaatttccatatcagtaaagaagatccaaaacttttaattgttgaagctctagctaaaaaatttgttttacgtcaaggaaagggcgtagtgagcattttcaatgaatcttatgatcctatcggtgttgctcctcaagatggcactactgtagagggtgttaaacgtgtcattactggggatatgaactaa

SEQ ID NO: 45371 - DNA, 1425 bp, Acinetobacter baumannii
atgaatattaatgatcaaaaaccattagatgatcaacaagctcctgatgaagaatttaacgaatcagaaaatggcattgtgtctgtcaatgaacgtggggatcaggaagatggaaaaggtaaaaaaatagcgtttattgcagttatggcggtactttttactgttatagcggtctttgcctataacttcttttcagatagtagtgatgctgaagaagcagcccaattaaaagaaaatcagatagatccaagcctagatgcttcaactaaaagaagggattttactaatactgatcctatgccaatggatgcgggtcaaaatgctcaatttcaaagcctagatgcctgtcaggatcaaagtattcctagacagctaacagacaataacggcaatgctgtaacttataacggcatgttggtttttcaatgccaaaatggtcagcagattttaagacagcctgaagctgcgccagtagttgaacagcaagcagcaaatcaacaacctgtagtaattcagccacagccacaacaacaagctcaatatgtacctttaaataatggaagccgttacggtggcgggatctttgttaattcttcacaacaaggcggggcggttgggcagccgtcaagcatgaatcatcaagcagcttataaccaagtaacaggcatgatgaaacagtttgaacaggatcagaatagtaatagccgttctggtaatttctctggatctggtttgatgtctttagcgcatgatgatgatgaacctatgcagcagcatcagccacaacaagctacaactaacatggttagtcattcctctaataaagtccaggctaggtttattggggatcgaaattacttaattgctaaaggtcgtgtaatccgttgcaacctgtcagttaaagtcgtttcagaaattggcggtatggcttcatgtgtccttccacaacctgtttattctgataatggtcgtgtagtccttgctgaagcgggatctgaagtcattggagaatacaaaagtattgcagcacaaggtcaaagacgtttaggtatcatctggtcacgcttaaaaactccgcatggtgttattgtcgatattgattctcccgcagcagaccatttaggaacaggtggtttaagtggtcgagtagataaccgttggggcgcacgtatcggtgcagcgtttatgctttctttagttcaagacgctattgcttacggtatttctaaagaaacaggcgggaacaatagcactccttatatgcttcaaaatacttcagacatgggtaaatcaatggctgaaacagtgttgaatgaaacaatcaatatcaagccaacaatttataaaaatcagggtgatgtagcttcaatttacgtggccaaagatattgatttcagaggtgtgtatgaactccgcgcaaaataa

SEQ ID NO: 45372 - DNA, 1113 bp, Acinetobacter baumannii
atgaactccgcgcaaaataatgttttaagcaaggatgtaatggttagacagctattacttccattagaaaaattcttaaaaactaaaggggtgactgaaattgcaattaacgcacctaacgaagtttggacggaatctaataaaggatgggaaaagcattctataaatctggaaatggcgcaaataacagctttagctaatgttattgctacctatactaatcaacggattggccaagaaaaccctatattatctgctcaattacctgatggagagcgtattcagattgttctaccgccagccattgaaaatggaacggtatcaatgacaatccgtattcctgacgagtcaaaccgatcatttcaggaatataaagatcaaggcttttttgaccacttcagatatgggaaatctaaagagtttgagcaatttaaacctgtattacgtactgaagatattaagctagtccagtttttaaaaaacaaagatcttgaaggattttttaaattcgctgttcaatgtaagaaaaatattgcagttgttggtgatactggttcgggtaaaaccactttcatgaaggcaatttgtcagtacattcctgaagatgaacgtcttgtcactattgaagatgtacgtgaactttttgttccacatgaaaacaaggttcacctactttattctaaaggtggtcaaggtaaagctaaggtaacgccatctgatctgatcgctagtaatatgcgtatgaagccagaccgtgtattacttgctgaattacgtggtggagaagcttttgactttctgaaactgcttacaactggccacagtggatctattacaagttatcacgctgaaagctgttcactggcttatgatcgctacgtctttatgtgcaaagaacatgaacaagcaaatatctacgatgccactacactaaaggaattagttgctttaaccattgatattattgttcatgttgaagtgaagaaaaaatacgatgatgaaagtaatttaataggtaaagaacgctttatttctgaaatcaaatttgatcctgtttctaaagttaaggctcaatttggtgatgctgaaattattgtaggggatagggcgtga

SEQ ID NO: 45373 - DNA, 2565 bp, Acinetobacter baumannii
gtgaataaaaaaatcctgatcctactccttgcaatttttctagcggtcgttggtttctttattactaaatatctggccggtattctttattacttagctaataagaccaatccatttcctgaagtgaatctgacaacgtgggggtattattgggatttatatgcacacaatgtacctgcacaaaagaaaaagctgcaaggtgccttgatcgctgcactatttatcacttttgttctccctgctttagtcattgctagtctgtttaataaaaaacagtcgttacacggtgatgccagatttgccacaacaaaagaaattcagaaatctggattgatgggaaataagggaattttagtagggaaatatcataataaatatttactgcttggcggtcagcaatttgtacttctggctgctccgacacgaagcggtaaaggtgtagcgattgttattcctaaccttctaaactattcggatagtgtagttgtactggatttgaagcttgaaaacttcctattaacttctaaatttcgtgctaagaatggccagaaagtttatctattcagcccattttctgaagatctaaaatctcacaaatggaatccatttgataccgttagtcatgacgaaaattttagagtaggtgaaattcttgctattggtcgaagcttctaccctgtgactggtgatgctaaaaccgatttttggaatgacaatgctaataacttatttcttggcctagccctatatctatttgaaactgaagatctgcctgtaactatgggcgaggttttaagacagagttcgggtaaaggtaagccaattcaggatcatattagatctattattgatgaaagagcgcaaagtgataaaccgcttagtgatacttgccttgatgctttaaaccgttttttaagttcaccagacaatacgctcggtaacatcatttctacttttacctcacctttaacgatttttgcgaacccgattgtagacgctgcaacttcatcaagtgactttaaacttgaagatgtacgcagacaaagaatgtctatctattttggtgttcaaccaaaccgtttaggggatgctaagaacttaatcaatttgttctattcactcttaattgatgtgaatctaaaaacactgccacaacaagattcatctttgaaatatcagtgcttagtcgtgaatgatgaagcaacggctgttggtaaagtagcgaaaattgcagatgctaactcgtttatcgcgggttataacattcgcttattaacaattattcaatctattggccagctagaggacgtttataaaacccaaactagggggcttgtgactaaccatgccttgcaaatcgtttatccgcctagagaacaacgtgatgccaatgaatatagtgaaatgcttggctatttcactttcaaagcaaaatctaaaggccaaagccgttctatggcatggggtcaaggtggctcaaattcagaaaatgaatcagatcaaagacgagctttaatgctccctcaagagttaaaagaattgtcgcaagataaagaaattatctttatggaaaatacaaaacctatcatgtgtgaaaaggctaagtattttaatgacagtgcttttgtggatcgcctaaagtccgtttctcctagcatgaaagcaattaagggttttccaactcacaagcaattagaaaaaattgcctttgaggatctggaactttcaattcctattcctgatttagacgtaaagctgcataaggcaaaaattgaaaaacgtataactgaaattactacagtagaacaggctgaacaaatagatatttctagcttagttatccctgaatttaagttagataaaacagtttttgaagatccagaaaatccacaacctgaagaatgtctacaagtggtcgatcaattctttggggctgttgaatgggaagaagatactgaagcgcaaaatattgtcgatgacttctttagccaggtggaagctagtgatgaaaatccaatagaaaacctagttgcagtagacgaaccagaacaaacggaaaaccttattgcaattgatgacactgaatttagtcatgacgaaatagaaaaccttgttgcagtagatgaaccagatcctctggccatgattgcagaaatggaaaatctggttgcagtagatgaaccagaacaaatagaaaaccttgttgcagtagatgaaccagatcctctggccatgattgcagaaatggaaaatctggttgcagtagatgaaccagaacaaatggaaaaccttgtttcagcagatgaatcagatcctctaaccatgattgcagaattggaaaacctagaggacagcctatttgtacttggtgtcactaaatttagtcatgacgaagccaaacaaattgttgatacggtttttaattgtgctgaatctgaatttgcagttgatgaagatcaacaagacaacctaaatgcagtcaataaaggtcaaaagggatctatagaaaattcagatattgatgacgtttatcaggcgttttcagaccaagttaattctaaataa

SEQ ID NO: 45374 - DNA, 282 bp, Acinetobacter baumannii
atgaaaaaaatctctcttacattaatcagcctcgccctatctttttcagttgtgggctgtacttcaaataaagccgtgaccagtcctaatggcttttcatctaaagcagttaatcatcctgacactgtaaaaaactatatgcaaagcatagttgtatatcagaaaaataaagatttaagcactgaaactgaaagacaaattgcacttctaacagacaaatatattcaaaccaaaatgattattgacgaagcagcacgtcgccaaaatatttctaatcaataa

SEQ ID NO: 45375 - DNA, 1290 bp, Acinetobacter baumannii
atgactgaagcaaacaaggtcgataaacctagttttaataaagaacaaaccggctataccaaacttggccagacgttagaaacaaatcaagctgaagtcaattcgattgaaaaagctgaaaatatagatatttcaaaaagcacaaaaggtattaatcaagatcctgaagaaactaaagtaactgataccaaaaagctaaaagctgatgacagtaaagaacctagtgaagaaggcatacctaaagcattgctcaataaatattatgtggtagatgacaaatatcactttaaaggtaatcctgaaaaagtagcttttgaagattctggaaaagctttaaaaaccacaattgatgataaacatattgctgcttcaatggtggaggtagcaaaagctaaaaaatgggaaacaatacaggttaaaggctctgaagaatttaaacggaatgtatggcttgaagcttcaatgaagggcatgacagtaaagggttatgaacctcgtgatattgacctagccttgctcaatgacatgaaaaaagaacaaggtaaagaggtaattcccaatactattgaaaagggtaatgaacgccagaaagagaagcctttaaatgagaaggataaagtagatccaacacaggaacggaaggaaaaaattaataacctgtcagaacaggaaaaagctttactgacagtttttgataaaaaaatgaaagctgacggcttcacagaaaagcagcgcacagccagtatagacgttgcggttgaacagcttaatcagaaaaaaatgcacgttggaaaattagtagatcatggtgcagcaccttatgagcatgatcctaagaataacagtagctactacgccactattgaaaatagtaaaggtgaaaaaaatacaatctgggcgaaggatctggaacgtactttgaaagaacaaaatatcattaagaatgatgatattgtcctgacctataaaggatctaacaaagtcgaagtgaatactaaagaaattgatcctaaaactggattgccaacaggcgcaagagttcaaacattggcaaataaagggaagtgggaagctcaaagcttgagtaaattgaaagaaacaactgaaaaagctttaaccaaaaatgataaaactaagcttcagattcaacataatgccgatattcaaaatcagaaatttcataagccaaaattaacggcttatgatgccaatgctccaaaacagcagccagtacagcagccacaagttaaaactcaagagagaaacaaaaataaagatatatctcgataa

SEQ ID NO: 45376 - DNA, 387 bp, Acinetobacter baumannii
atgacaaatgcagattttaaactgctagttgaatcattggggttctataaccctgaagcggtaaaggattatttcaaagctataggattcaatgaatctattaacgtccgaccaattcaatattggttaaatggtaagagtgtagctctaaatatgccaattccagacgatgtggttgagcattttaaacagcttgaacaaatgaaaattgagttatcaagccaagaaaaatttaagaaaaatacctttctctacaaagataaatatttaatgtgggaaaaattccctgaattaaatgggctaccttgtacgtacttaaatcaattaatgattctggtgaatatgctgcatggttatagagaaatgcagtattgcacaagttactaa

SEQ ID NO: 45377 - DNA, 225 bp, Acinetobacter baumannii
atgaaaaatcaggatctttctattgtcgagttggttagtaaacgcaataaaattgtctatacgatttgtggattattagtcttactgacagccttatcttttgccagatactttctaaattttagtatcctttatcttttaattttgcttatcccattctttgcgcttatgtactggatgatacaagtcactgaagatataaaagaaaaaaaggattctttataa

SEQ ID NO: 45378 - DNA, 435 bp, Acinetobacter baumannii
atgttgatttccaagagaagactcattcatgcaatcagttatgaaggaattttgttggtcatcattgcgattgcattaaattttatttttgacatgccgatggaagtgaccggaacacttggtgtgtttatggcagtggtttcagttttctggaatatgatttttaaccactatttcgaaaaagtagagcataaatttaattgggaaagaacgatccctgtgcggattttacatgcgattggttttgagggtggtttgctgattgcgactgttccaatgattgcatatatgatgcagatgacagtgattgatgcatttattttagatataggtttgaccttatgtattttggtttatacctttattttccagtggtgctatgaccatattgaagataagtttttcccaaatgctaaagcagcatcacttcattaa

SEQ ID NO: 45379 - DNA, 651 bp, Acinetobacter baumannii
gtgttcggcataacagacttaacaacatatattattggtacattcctaattgtgttattgccagggcccaattctctttatgtgatgtctattgcttcacgctatggtattaaaaccggatatatgggtgcacttggtatttttaccggtgacttaattttaatgctctgtactgtacttggtgcggcttctttattaaaagcattcccttgggtttttattgtacttaaactcgtcggcgcactttacttgtcttatttaggttttaagcttttacaaggcagtattcagcgctggaaattacgtaatcaaccccaagcagaaatggctgatttacctgctttagataaagttcacccttataaaacagccttaagtattagtttactcaaccctaaagcgattttatttttcctgtctttctttgtgcagtttgttgaaccggattatgcctatccagctttaagctttttaattttagcggtgattttacaaattattagctttagttatttaactgcacttattttctctggaattaaactttcaacttttttcaaacaaaaccataaaattgcagcaagcggaattttcttagttggcattttatttttcggatttggtttaaagctggcaacttcaacaatgtaa

SEQ ID NO: 45380 - DNA, 2271 bp, Acinetobacter baumannii
ttgagcaaaagtaaagttgaagttatgtcacaacccctatttaaaaaagttgcatttattggtttaggactcattgggtcgagtttggctcgcgttattgttgcagaaaagttggcgacaactattgtggcatctacacgttcacagaaaactttagaagatgcaaaatcacttggcttaatacaagaagggttttccgatcctgtagaagctgtgaaaggggcggatttagttgttttagccttgccagtgcgtgccactcaaaaagtgcttgagcaaattaaaccatatttgtctgaaaccacaattgtaactgacgtgggaagtacaaaaggtaatgtcgtagatgcagcaaaagctgtatttggtgaagatttaccagcagggtttgttcccgggcatccgattgcgggaagtgaacacacgggtgtccacgcaggtaaggtcgatctctttgcaaatcacaaagtgattttgacgccattaccaaccagtgcagaatgggcagttgagaaactgattcaactttggtcagctgctaaagctgaagtcatttgtatggatgttgccaaacatgatgaggttttggcgcataccagtcatttaccgcacttaatggcatttaatctggtcgagcaacttgcaaaccgtgaagataaccttgatattttccgttatgcagcgggtggttttcgtgacttttcacgaattgctgccagtgatcctcaaatgtggcatgacattttctttgccaataaaacagccatattaaatgctgtagatggcttcgagaaacaacttaccgtacttagaaaattgattgaaaacgaagattctcatgcattaatgggtttactcggccatgctcaggcagcacgtcagcatttcaatcatatgttagccaaaaaacctttaatggagaaaaataaggtgacacagcaattcagtatcttaccgggaaataaggcatttaaaggtaaatttaccgtaccgggtgacaaatctgtgtcacatcgctccattatgtttggtgctattgccgaaggcacgactcatgtaactggcttccttgagggcgaagatgctttggcaactttgcaagctttccgtgatatgggcgtaagcattgaaggccctaaaaatggtgaagtgaccattcatggcgtaggtatgcatggtttaaaagcaccagcaagtgcattgtatatgggtaactctggtacaagcatgcgtttgctttcaggtatgttatctgcacaaaaatttgattcagtgatgacgggtgacgcgtcactttctaaacgtccaatggagcgtattgctaagccattacgtttaatgggtgcgcaaatccaaacgacaggtgagaaaggtacaccacctgtaagcattactggtggtcagcaattaaaaggtattcaatacgatttacctatggcatctgctcaagtgaagtctggtattttacttgccggtttatgggctgaaggtgaaacttcggtaactgagccggaaccaacacgtgatcatacagagcgtatgcttcgtgcatttggctatgatgttaaaactgaaggtaataaaatctcactcattggtggcggaaaattagtaggtactaatattcaagtaccatctgatatttcatctgctgctttctttatggtgggtgctgcaattactgagggtgcagacgttgttctggaagctgtaggtattaacccaacacgtacgggtgtaattgaaattttaaaacagatgggtgctgacctgactgttgaaaatgaacgtattgctggtggcgaacctattgctgatattcatattaaaggttcgcgtacccttaaaggtattcatatgcctgaagatcaagtacctttggcaattgatgaattcccagcattatttattgcagcggcttgtgctgaagggcaaacagtactcacaggtgcggcagagcttcgtgtgaaagaatctgaccgtattcaagttatggcagatggtttaaaaatcatgggtattgactgcacaccaactgaagatggcatcattatcgaaggtaaaggcaaatctggcgattggtcaccaatctttgctggcggtgaaatcgaatcgcaccatgaccatcgtattgctatgagttttagtatggcaggtcttcgtacttctggtccgattacaattcatggtactgaaactgttgctacaagtttcccaacatttactgagttggcgaatcgtgcaggtttaacgattgaagttagccaataa

SEQ ID NO: 45381 - DNA, 528 bp, Acinetobacter baumannii
atgtttcacaaaatacttaaacctgaatatttaaaatattatgaaggagttactacttgtacgactcataaacttgaagatactccgcattgcgcaacttttatagagtttgcaagaaatgacttaagcacctcacagaacttacatgctatttataatgctgtatcaaatgctaaacgtgcccttcatagaagagtagatattttatgttcattagtaggatatgaaacttatattgctaaaagaaataattttcctagtaagttagatttcttagagaaatgtggattcttcacccctcaaataattaggcgtttaaattacatcagaaataaactagaacatgattatgaagcacccaactatactgaagcagaaaattatgtagatataattgaactttttctagttgcgactagtgtttttatcaaaaactatccgaccatttatgagttttttatagttgaaagtgagagtgttgataatactgaactttataaaactcttccaagatggatttctacttga

SEQ ID NO: 45382 - DNA, 1419 bp, Acinetobacter baumannii
atgatgaacgctgatattactacccgtattgagaaggatcttattggtcatcgagaaatcaataatgaccattattacggagttcaaacattacgtgctttagaaaatttcaacttaacaaatagcaaagttggaaacttccctaatttaattaaagccttagctatggttaaacttgcctgtgctgaagcaaattataatcttaaaaacttagatcaaactaaatttgaagcgattgaatacagctgtaatcagcttattcgtggtaatttccatgaccagttcccaatcgacatgatgcaaggcggtgctggcacttcaaccaatatgaatgcaaatgaagtattggcaaacgttgctttagaatatatgggccattctaaaggtcaatatcaatacttgcatccaaataacgacattaatatgtcgcagtcaacaaatgacgtataccctactgcaattcgtttaggtttattacttagcctagatgagttaaatcttccatttaacaatttgattcttagcttcttgaataaatctcaagagtttgcacacattttaaaaatgggtcgtactcagttacaagacgctgtgcctatgacattaggtcaagagtttggtgcttttgcggtaactctacaaaaagaccttgagcaaattaatacgcttattccaaatgttttagcttatatgaatcttggcggtacagcgattggtacgggaattaccactgaatatagttaccgtgaactcgcgattcaagcacttggaaaaatctctggtaagaaaattaagtcagctccagatttgattgaagccacttctgatatgggtgactttgttcttttatctggtttattaaaacgtactgcaactaaactttcaaaaattgccaatgacttgcgtttactttcaagtggtccacgtactggcattaatgaaattaatttagaagcacgtcaacctggtagctcgatcatgccgggtaaagtaaacccagttattcctgaagcaatgaaccttgcttgcttccagattattgcaaatgatttggctgtaactttagctgctgaagctggtcaattacagttaaatgcaatggaaccacttattgcattcaaactgtttgaatcgatggacttgcttggtaaagcaatggcaatgttccaaaccaaatgtattgatacaattacggcgaaccctgaacactgtaaagctttggttgaaaattcaattggtattgtgactgcacttaacccatacctaggttatgaaactacaactcgtattgctaaaacagcaaacgaaactgggcaaagcgtattggctttagttcaaaatgaaggtttattatcagcacaagtgcttgatgatatcttgtcgattaataatatggttaaaccaaaaatgtcggcttaa

SEQ ID NO: 45383 - DNA, 378 bp, Acinetobacter baumannii
atgagtatttttctcatcagacatgctgaaagtgaagccaatatcaatggaaaaaccctttcacatgcttcgattgctttaagtgaaaatgggcataaacaagcccaagcactctgtttaaaactacctgaaattgaccatgtgattgtgtctcaatatttgcgtacacatcaaaccgccgccccattactagaaaaatatgatctcagttttgaagtagatgagcatttgcatgagtttagctatttgtctgaacgtaagtgtgccaataccaatatggatgaccgtaaagcttgggtaaaagcatattgggagaaaatggattatcagtataaagatgcagatgacgcggagtcttttgaagatctgagcctgtaa

SEQ ID NO: 45384 - DNA, 942 bp, Acinetobacter baumannii
atgaatccgataatagacaaaattttaagaaaattagacagtttaaagatcaccgaagactttttctttattatgaataaaactattcatttaaggtatgcaagaatttatgaaacagataaaaaagaattcaaaaatctagaagctcctgagaacttttttcttgaactgtacaatcttatggatagcgatgaattagattcagggatttatagttattattcaattgataaaaaaataatccatcatactaattacaatcctgaattattttgggatgcagcaatggaattaatcttatatcaaacttatggggtgattccagttgatctagaaagaaaaactcaactaggggaaagtcttcagcaagaaaaaataaagaaaacccttgtctatgcctgctacttaaatttaaggaatgagatagattttttgcttactaagaaagttagtaaaagtgaattaaataggaatctaaaaggcattggaacgcctttagggctgagtattcagcagaataattttgatttagccacgaaattattggcactaggtgcagatccaaagaaaaaatcatttgtatatacaccacttgaattggcatttagatattctgatgaaatggtatggtatttttttgatcactacaaagagtattttattaatacaataaagcaaaagggcttagctattgctggacttaatcagaatattgaaatttataagttattgatagacttaggatgtgatccattaggtaaagaccctgcttttccaatgccgcatgtttttgtagattataataacttgcacggattgcaatttttggctaaatatggcgtagatatgaattataaaaataaatataaagaaacagcatttgaaagagcaaagaagcaagagaaaactgagttgataaattttctaagtgggtttcagtga

SEQ ID NO: 45385 - DNA, 384 bp, Acinetobacter baumannii
atgagaattagtcaaaagcaaatagatgctgtaattgcattagaaggtactaaaagatataagcatttcataaaagttattgctgatacgcaagaagtttggggcttatataaggatggatgggcgttagctggaacagaggataatcaaaaagtatttccagtgtggcccgcgaaagagtatgccgagttatgtgccgaaaatgaatgggtaggatatgaagctgagccattttctctagatgactttatgaatgaattgttctctacattaaaagatgatgaagtattaataggtgttttttatactcctttagacaatggggtaactccagagatagggcaggtactaaaggatttagaaattgaattagaaaattattag

SEQ ID NO: 45386 - DNA, 921 bp, Acinetobacter baumannii
atgaaccgtcaacaaattgatgcgcttgtaaaacaaatgaatgtcgacactgcaaaaggcgaagttgatgcacgtgttcaacaaattgtggtgcgccttcttggggatttatttcaagccatcgaagatttagacatccagccttctgaagtttggaaaggtttggaatattttaccgatgcaggtcaagcaaatgaacttggtcttttggcagcaggcttaggtcttgaacattaccttgacttacgtgcagatgaagcagatgccaaagctggtattacaggcggtacacctcgtactatcgaaggtccactttatgttgctggcgcacctgaatcagttggctttgcacgtatggatgacggaactgagactggcaaaatcgataccttaattattgaaggtacggtaaccgacactgatggcaatattattgaaaatgccaaagttgaaatatggcatgccaacagtttaggtaactattcattctttgataagtcacaatctgactttaacttacgccgtaccattttcactgatgcagatggtaaatatgtagcgttaaccactatgccagttggttatggttgccctcctgaaggtacaacacaggctcttcttaacaagttaggccgtcatggtaaccgtccatctcatgttcactactttgtatctgcaccgggttaccgcaaactgactactcaattcaacattgagggtgatgagtatttatgggatgactttgccttcgctactcgtgacggtttagtggcaacagcagtagatgtcacagaccccgctgaaattcaacgccgtggtttagatcacgctttcaaacacatcacatttaacattgaactggttaaagaagccgctgctgctccttcaactgaagttgaacgccgtcgcgctagtgcttaa

SEQ ID NO: 45387 - DNA, 291 bp, Acinetobacter baumannii
atgttatttcatgtacgtatggatgtgcatattccacttgatatgccagccgacaaagcaaatgaaattaaggccgttgaaaaggcttattcgcaagacttacaacgccaaggtaaatggcgtcatatctggcgaattacaggtcagtactcgaacatcagtatttttgatgtagagagcaatgaagaattgcacaacattttacaaggtttacctctctatccatatatggacattgaagtgatggcacttaaccgtcatccatcttcagttcgtgatgatgattcgtaa

SEQ ID NO: 45388 - DNA, 1107 bp, Acinetobacter baumannii
atgtatagaaccatagaaaccatacttgtggatattccaactatccgtcctcaccagttgtctgtgactactatgcgtacccagactttggtactcgttaaaattacgaccacggatggtattgtcggttggggtgaagccaccaccattggtgggctgaactatggtgaagaaagtcctgagagtgtcaaagccaatattgatacctactttgcaccattactgacatcagttaaagatttaaatgttgcacaaacactaaaactgattcgtaaaaatattaatggtaaccgctttgctaagtgtgccattcagactgccctacttgatattcaggccaaacgtttaggtgtgccattaagcgaagttttaggcggccgtctgcgtaatagtttacctgtgctttggacgcttgcgtctggtgatacggaaaaagatattgctgaagctcgcaaaatgattgagctaaagcgccacaacacgttcaaacttaaaattggtgcacgtcctttacagcaagatgttgaccatgtgattgctattaaaaaagcattaggtgctgatgttagtgtacgtgtagatgtaaaccgtgcatggtcagaacttgagtgtattcatggtattcaacagctccaagatggtggaatcgatttaatcgaacagccatgtgccattcaaaataccgaagcacttgctcgcctcacccaacgttttgatgtagccattatggctgatgaggctttaactggacctgacagcgcataccgtattgcaaaaaatcacggtgcagatgtatttgccgtaaaaattgaacaatctggtggcctggtcgaagcatgtgaagttggcaaaattgctggtttggctggtatcgacctatatggcggcactatgcttgaaggtcctgtaggaagtattgcatcggcccatgtatttgcaacttttgaaacgttagcgttcggcactgaattatttggtccgttattacttaccgaagaaattttaaaagagccgctacgttacgaaaactttgaattgcatttgccgacagctccgggcctaggcattgaaattgatgaagataagattgagaaattacgtcgttaa

SEQ ID NO: 45389 - DNA, 915 bp, Acinetobacter baumannii
atggaattaagacatctacgttattttgttaccgttgttgaagaacagagtctgacgaaagccgcagaaaagctttttattgctcagccacctttaacacgccaaatcaaaaaactagaagaagaattagggatcgatttattcgaaaaaggctctcgtccattaaaagtaacggaagcagggctgtttttttaccagcatgcggtacaaattttgacgcataccgctcaagctgcttcgatggctaaaaaaatgaagctagtcgagaacgttgttaaagttggttatgtgagttcgcttctttatgggcgattaccacaggtcatttatctatttagacaaaaaaatcctgatattcatgtcgagcttattgaatgtggtacacgagatcaggtggaagctttaaaactcggtaaaattgatttaggttttggccgattaccaattagtgatccagccattaagcgacttctacttcgaaaagaaaaattaaaactcgcaatccataaaaaacacccattaagtgatttccaagagtcaggaatttatttatctcaaattatcaatgagacgattttctcttacccaactacacctaaaccaaatttttcgaccactattcaagctttatttaccaaattaggtcttgttccggccaagctgactgaagtacgagaaattcatatggcacttggcttagtggcatccggagagggtatttgtattattccggaaagcgcctgcgacattggaatgaagaatctaacttatttaaatatcttagacttagaagcctatagtcccatctctctatccatgcgcaacatggaccaaagttcctatattcctaaaatcttagattgtattgaagagatctatagtgaagaagaagtatccagaaatttgaatttataa

SEQ ID NO: 45390 - DNA, 795 bp, Acinetobacter baumannii
atgagaaaaattttaggtatagcttctctcattatgtctacaggtgttgtacatgctgaacaattaaatgaacaagaacaaatttctccgtatagtgcgaatgtgacttttgcaagtcaatatatttcacgtggttttcaacaaacttggggtaagcctgcactacaaattggtttcgactatgcaaatccgaatgggctatttgtgggtacttgggcatccaatgtaagttctaactatctccgtgatgcttcagttgaatgggacttttatgcaggttatttaaaaaccatcgataaattctcaattggaatgtctgttttttattattattacccaggtgcaaaaagtacgcctgaaacggggagtacaagctataactatggcgaaattgtgccccaaattggctatggtcctttaagtctcaaatattttattacctataccccagattacgcaggttataactcaaatacgatgggtggtacagaaggtaaacgttcacgaggaacaacttatttagatttaaactttacacagccgatcaatgaaagttggacttttggtgctcactatggctatgaaaaaattaaaaatttctcggaagctaactttcaggatatgaaagtcgaacttattaaagatttaggtgatggctggactacagggttagcttataccaaagcatgggacaaagacggatactatagaaattatagtaatggtgaaccagatgcaccaatttcaaatccgattgattcgacctttacagtatctgtaaaaaaggtgttctaa

SEQ ID NO: 45391 - DNA, 717 bp, Acinetobacter baumannii
atgagtaaagctgactataaaaatcctattccaagcaaaagccaacatgcattaatcgttcaacaattgggattaaaaattgtttctggagaaatttcagaaaatgaaaagctcccaagtgaagttgatttgtgtgaggaatataaagtcagccgccctgtctttcgcgaagctatacgtgttttaaatgcgaaaggcttaacatattcaaggcccaaaatcggaacagtagttcgacctaaagaagaatggcatttactcgacccagatgtactgttctggttgattcaaaccacgcctgaacatgagttttttaaaacactttctaccgtacgacgagttttagaaccagagttagcctatattgcggcaagtacagcaaatgaagaagatattgagcgtattaagcaagcctatgaaggaatggaaaaggcgacaacagttgaagagtttatagaacccgatatccagtttcacttagcaattgccaaagcaacgcataatgacttgctggcttatatgtcaaaaatgctggttttacctttgcagcaatcgattcaagtcaccagtctacgcccaaatttacaaggtcattcattaccaagacataaagcgattttaacagcaattgaaaataaagatccgctctctgctcgtcatgcttcactggttcagctagacgatactaaaatggcttatgatttaattaaaaaataa

SEQ ID NO: 45392 - DNA, 1734 bp, Acinetobacter baumannii
atgaataacaaacaagttcttcgttcggctgcctggtttggtacaacggataaaaatggctttatgtatcgtagctggatgaagaaccaaggaattccagatcatgagtttcaaggcaagcctatcattgggatttgtaatacgtggtctgaactcaccccatgtaatgcgcattttcgaaaaattgccgaacacgtaaaaaaagggattttagaagcgggcggctaccctgttgagtttcctgtattttcaaatggtgagtcgaatttacgtcctaccgccatgtttacccgtaacttagccagtatggatgttgaagaagcgattcgtggtaaccctattgacggtgtggtgttactgacaggttgtgacaaaaccacccctgcattattaatgggagctgcaagttgtgatattcctgccattgtagtgactggtggaccaatgctgaatggtaagcacaaaggtaaagacattggtgcaggtactatcgtttggcaaatgcatgaagagttaaaagcaggcaaaattgatttaaatgaatttctatctgccgagtctggtatgtcacgctcggctggtacatgtaataccatgggcacggcttctacaatggcttgtatggctgaagccctaggcacttctttaccccacaatgcggccattccagcggtagattctcgccgttatgtgttggctcatctttcaggtatgcgcattgttgacatggttcatgaagatttacgcctttctaaaatcttaaccaaagaagcctttgaaaatgcgattaaagtcaatgcagctattggtggttcaaccaacgccgtgattcacctaaaagcaattgccggacgtattggggttgatttacaacttgatgactggaaccgtgttggccgcggcatgccaaccattgtcgacttacagccttcgggtcgttttttaatggaagagttctattatagcggcggcttgccagccgtgattcgtcgcatgggtgaagccaatctcttaccacatcctcaagctttaaccgtaaacggtcaaaccatttgggaaaactgccaacaatcacctatttataacgatgaagtgattcggaaaatagataatccaattcgacaagatggcggtatgtgtattttgcgcgggaatttagcgcctaaaggtgcggtgcttaaaccatctgctgccacacccgaacttatgaaacaccgtggtcgtgcagtcgtatttgaaaacttcgatgattataaagctcgcattaatgatccagaccttgatgttgatgaaacttgtattcttgtgatgaaaaatgccggccctaaaggctatccgggcatggccgaggttggaaatatgggactaccgccaaagattttagctaaaggcattaccgatatggttcgtatttccgacgcacggatgagtggaacagcgtatggcacggtcgttttacatgttgcccctgaagctatggcgggtgggcctttggccgtagttcaaaatggtgactttatcgaacttgatgcctatgctggaaaacttcacctagaagtgagtgatgaagaacttaagcaacgtcttgaaaatttagcaccaccagctccaccaagttttattggcggttaccgtaagctctatgtagaacatgttttacaagccgatgagggttgtgattttgatttcttggtcggttgccgtggctcagaagttccacgtcattcccattaa

SEQ ID NO: 45393 - DNA, 1305 bp, Acinetobacter baumannii
atggatttcgaaaaggatgtaatacggacggtcacgtttaagctgatacctgcattagtcatactatatctggtggcatacattgatcgggccgctgtcgggttcgctcatttgcatatgggtgccgatgtaggaattggtgatgctgcctatggtctaggagctggcttattttttattggatattttctttttgaagttccaagtaatttgcttttagacaaatttggtgctcgtaaatggtttacccgcattttattaacatggggcctcatcaccatggccatggcgcttattcaaggccctaaaagtttttatctcttacggtttttactcggtgtagcagaggcgggttttttccctggtgttttatacctaattacgcagtggtatccggtgcggcatcgcggaaaaatcatgggaatgtttgtgctttcacaaccgattgccatgatgattgcagggcctttagctggtctattacttggaatggatggcattgcaaatttacacggctggcaatggttgtttgttgcagttggcttgcccgcggttttattggctttacctacatttttgtggctgcctgataacattgataaagtaaaatggttaagcattgaacaaaaacaatggcttaaaaatgaactcgttaaagatgaagccgaatatgaccaaacccgacatgccaatccactacatgctttaaaagacaaacgcgtacttttattagcactttactacttaccggtaactttaagtatttatggtttaaatctctggcttcctaccattattaagcaatttggcggaggtagtgatattcaaattgggttcttatctagcattccctatatttttggaattattggacttctcattattccgcgtagtactgaccgcctgaacgatcgttacggacacttaagttttctgtatgcactaggtgcttgtgcaatgtttttaagtggttggctaaattctccagttatgcagttggcagctttggctgtagttgcgttctgtctattttcatcgactgccgtgttttggacattaccgggtcgtttcttaacgggtgcaagtgcagcggctggtatcgccttaattaactctgttggaaatttaggtggctatgtcggtccatttgggatcggactgttaaaagaatacacgggaaatatggctgctggtttgtatttcttatctatcgtcatgctttttggcttgattctgacttacatcgtctatgccaagctcgaacgtcaaaaaacacaaacagtgaatattcaaaagcctttgtaa

SEQ ID NO: 45394 - DNA, 999 bp, Acinetobacter baumannii
atgcaaattattcaatttgaaaatcgtgcaaatcaacgtgccgtcgcgaaagtagaaggcaacatggcatatccggttaaagatattcaatcggttcgtgatttagcacttttagcaatccgcaataaagtttcactggaacaacaagttgaggcgttagggtttgagtccgaaacttatgattattcatctttattagcagacttaaaggtattgccgcctttagatcatccagatccaacacattgtttaatttccggtacaggtttaacccatttaggttctgcatctgcacgcgacaaaatgcatcaacaaaatttaagtgatgacagctcggtaaccgacaccatgcgaatatttcaatggggcctacaaaagggccgtccagcagaaggtcagatcggtgcgcaaccggaatggttttataaaggcgatggttcaattgtggtaagaccgggagctgaattacctttaccaccatttgccgaagatggcggcgaagaacctgaaatcgcaggcctctatgttattggcgaagacttaaggccttaccgaatcgggtttgcgctaggcaatgaatattctgatcacgtaatggagcgtcgtaactatttatatctggctcattcaaaattacgtttttgtagttttggtccagctttacggacaggtgaattaccaaaacatttagttggaaccagccgcttgcgtcgtgatggacaaatcatttgggaaaaagagtttttgtcgggtgaggacaatatgtgccatagcttagcaaatctggaatatcaccactttaaatatcgacaattcttaaaagcaggggatgtacatatccattatttcggtacagcgactctatcttttgccgatggtattcaagcacaggtcaacgatgagtttgaaatagaaatgaaagagttcggtcatccactcaaaaacaaacttgctcatatgcaacctgaattaccgatcggttcagttattactctctaa

SEQ ID NO: 45395 - DNA, 939 bp, Acinetobacter baumannii
atgagtttgtcggtttttaatacaacccaatatgaagatttaaaagatattacttctaaaattgaagaacagtgcatccaaattctgaatgaatatggccagattatttttttattagatactacactgaatgattctatttttaacggtgtaatagataatctatcaaacaaaaatattgcatatatccctttagcgcataagaaaggaattgcaaagtcaaatctcttttttatttgtattgatggtaaaaaagtatttgagcaggttaaagaggacttattgcaaaatctatcaagaaataaaaatattacgaatgattgctattttgttcatgggtttggcgtggcgatgacacgctcacttgaggaattgcgagatcaaataaaagctaaattagtgatttctgatcaaggtaaaaaaattcttttccgttggtatgaccctagagtcatgatctacttggatgagatttttaaaacagaatatgtaggcggcttattagatggctttaaagaatggcattttttgcatccaaagggtctatttagctttaaatcttacgatgaatcgcgatcaatcttgaatctaaaaaaagtgaaccttgagcaatctatagaattggatttaattgaaattgctaataatgtatttcaacaattaagtgaatttgaacaagttgatctaataaaaattcatccagttgaaatccatcaaaatcttaaagaggcttactacgattttggtattcaaaatcatttagatttagttacatatggtctttacagccaaattatacataaaaattttatacagcatcccatggtaaccaatgtgctctacgaccattgtgtaatgaataaaatgtcttttacggacgctatggattatgtaacgaaagacttatatgagcagatagctaaagaattgaatggataa

SEQ ID NO: 45396 - DNA, 2754 bp, Acinetobacter baumannii
atgtcagaaaatcaaaaaatgatattgggcaagtcaaaatcaaataatttatttaatgaggctattgctcagcaaaaacagaagcagagtcaaattcctgttatgggaaaaaccaaagcagtgggcgatatgcgcaacccaacagttgctaaaaatattaataagaagattgaagaaagtgaaattgcaaaatcagcgaaacagtcaactgctgcaaacatgcaaaatagtagtgcggggcaggcccagaaagagtgttcaaatttttgtcgtaaaaaaggcttcaatattttacctttacgatacaccgttgttaaagataatccacctgctttgcctccaaccttgggtaaaaatgtcaaagatattcagttaagccatctcaaatatgcagttgagatgattaatactggttatatctatcgcttagtaaaaagaacatctggagctttggagtgggctggatataaagttactccaaatggacatttgtcttattttcctgtgggtaaagaagcacctaaaagtgttccagagttcgcatgtaaaggagcaggtcatagttttaattcatctgtgatagctgtagaaagtaaccctaaagatgaggcgaagattgcatatattattcatacgcatgtgcctatgagtaaggccaaaatatctgaatatgaaaaaaatgccgataagtttgtaacagaaggaaagtggcagaaaattttaattaatggtggaagtgcgcaagaacattgtattgctgcaagccaatttaaaactacggtttataatctaaacagttttggtaaaaaccgtatcgatgcgacattaaacaagtttaaagatgagcctaaatcgcttgcctgtatggctttatatgatccagttggtattacgagaaagttgaatgacagtcgtaatagtcagtttggtaaattaacaaattatctagccaaaaatgtagaaaagattagcaatgaacaccgactacaatcttctcagctcgtagatagtattaaaatagttgttgagaataaactaattaatcaacaattaagcgcacgaagccaaattgctgatctatctgcaaaaatagaatatgctaaagataaaataccaaaatttggttcgatggatcagagggaatatttaagtaaaattcaagaaatttgggatcgagcacctactgctgaaagagataaatttcttctgcaaaggaataaaaaatttgcagaaggcgaacaaaagttaaaagagaaaattataacgcaatcaaaagctgaagctaaaataacttgggaaacaaaatatgcacctaaaattaattgggatactaaaaaagcttttgataaagaagtaaaaaaactaataaatgaaggccgtacacttgctcaaacttatgcaagtgatcatattaagtggcttaaatctaagcatttgctgaatgcattttatgtttatgaccaaacaattttaaaagaatatggtgcattgttccatgtacacgctttagctgtgatggatggaatgacaggatgtgatgagggacaagcattaatggaaaaatggttgggggttgaagaaatttctgacgataatctatatatgcgggcagtcacttataaccaaaaaaatttaattgatcaatataatgcaaaaagctctgagattacctctttgacgtgggatcagacccaatccagtttaaaaagcttaatcgctgcatttgtaagtgctgaccagctttgggagcaatggttagctgatccaaataataaaattaatgagctgaaatggtataaccctgctaaatccttactctggatttcagaaattactagaagtgtggctaagtggagcctgcaatataatataaatccattgattgcaaaaagactttcacgtgtttcattcattgcttatgcgcatagctcactattaacagacagagtgccaaagtggtcgttgctctataatgtagattttaaaatgacaaatgcgagtacccaactgaatgtaacagagatagaaagacgctggaaaaatgcagggcaaaataccgctgcacaaaaaatcaaagaaatccttagtaagtctccagcaagcgtagcaattaggatttcaagtattgtggctttgtttgaattaataaattttggagtgcaatctaataagtttattggcgaaagaaattgggaaaatgggtttcaattaatatcaggtttattagcatcttcagcagcggtattggatattgctggtgggggaatggatgccttaagttttcaagagaaagcaaataaaattcgattatatggtgcaagactggctgtttcagcagctattatatctttttgtatagatgcatttgctgtgtataaggaaaaggaaggtgataaagataaaattcttatggcttttctattcacaaaggcaaccgtatccttagtaatggttggagttggttttggattgttactaaatttaccgatattacaaaattcatgggtagtgtcatcagctaataaaatagcttttacaagaatccttttaagagcaaattttatacgtattgcagcatattgtaattggatcggtattggttttttggttattgaatatttgcttaaaacatatgtgttagatgatgatttacaaaaatggtgtgagaaatcaatatttggtaaagattcaagcaagtttaagctatttaaagatgaagaagaagcttttagtaaagctattatgagtatttag

SEQ ID NO: 45397 - DNA, 777 bp, Acinetobacter baumannii
atgaaagttattcaaggtgaaattcagaaacttactattgaagattctaaaattcttcctttaaaaaatatagaaaaacaagcagttggttctgcgatgcttggagctttagcatcaagtagtactttaatgactaatgcaccaattatgcttatggctgcaagaggaattgatgctaaaacttttacttgtgaaatcaatggttataaggtcatagggcaatttactactgtacagtttcaagaaaatgatccacttgttattgtgattagtgatgaacaagaacagggacggcatttagcttactctatattggatcctcggacgggtctattatatatgttatatgaaatggggaggtcacttaaaaactcttataaaaatatttggcagctagtttttatttggtctataagtgctagtattatttttacgggactattttttatatttgatattttttctggaaaagaaattttcaatttttcttatttaattgaaaatctaaaattatttttcttaattctttgtgtacttttaattttctttagtttatttatgaatcttgtttttagaagaagctttaaacaagctgctgagttatcagagaaaatcttttctattttaggctttaaaaatgtagatgaacaagatttttataacgattttattattaaagatggagtacatgtcagtgttatggagtatcgaaaaaatttaaaaggcccagatccatacccagaagattattttagtaagaatacaacaagcgaataa

SEQ ID NO: 45398 - DNA, 477 bp, Acinetobacter baumannii
gtggaacttaaattaaaccttaagctagttaaaggtccaatacattctttagaaaaagcaaattctaaaattccagtaaatcagaatattggtggaattgcggctgggaccgcttttgctggtgtgctcgctgagagtagttcgttgctgaccagtgcacctatattagtaatggccgctaaggctaaggatggtataacttttattggtgaagtagagggatatccagtaatcggacaatttacgacagcacgttttgaagaaaatgatgagttgattgctgtaattagcgaaaaacctgtagatggacgttatcaggtctatgcaattatcgaccctaaatcaggcttattgtatatgatttatgagatggggcgttcagtaaaaatgggttataaagccatttttaagcaaacttattattttacattgttgtcatggggttttctcttaatttttattttattttatttttaa

SEQ ID NO: 45399 - DNA, 294 bp, Acinetobacter baumannii
gtgaataccattttatattttttagaggttgttggcattactttatttgttactgtagcaatttctggttttgttaattattttggttataggaaatcgtatgaaaattttggagcattatcggagcaaatatttgaaaagctaggatttgaatatccaaaagaacaggatttttataatgattttttaacggatgatggtgtccagattagtgtaatgaagtatcgaaaaaatttaaaaggcccagatccatacccagaagattattttagtaagaatacaacaagcgaataa

SEQ ID NO: 45400 - DNA, 783 bp, Acinetobacter baumannii
gtgggacttaaattaaatcttaaattggttaaggggccaatacattccttagaaaaagcaacgtctaaaattccagtaaatcagaacattggtggaattacggctggaactgcttttgcaggtgtgttagctgaaagtagttcgttacttaccagcgcacctatattggtaatggccggtaaggctaaggatggtataacttttattggtgaaatagatgagtatccattagtagggcaatttaccacagtgcgttttgaagaaaatgatgaattgatagctgtaattaatgatagccctgtggatggacgctaccaagtttatgcaatcctcgacccgaagtctggtttattatatatgatttatgaaatggggcgatcagtaaaaaagggttataaagctatttttatgcagacctattattttgctctaatttgttggggtgggctttctataattcttttagtcctttatatattggatgctaattactcatggggttccttttttgatttgatatcttgggttctcttatttttaattctagcttttttatttatgggttttattaattattttgcttatcggaaatcatacgagaattttggtaatttgtctgaacaaatatttgaaaaattaggttttgaaaatcctaaagagcaggatttctataatgattatttaattaatgatggaatcaacatcagtgttatggattatagaaaaaacttaaaaggtaaagacccttatccagaagattattttgataagaaaaatttttga

SEQ ID NO: 45401 - DNA, 906 bp, Acinetobacter baumannii
atgaagcttagattgtttgtcattaccttaatattagtcacatctgcatgcagtcagcagaaagaagaacacacttatggagctttgactaaagattataaagatgtgtctgaatataagtctaaacatgaactagaagaggctgcaaaagcaaatgacgttgaggctatttttgtattagcatctatgtatgccacaggcgaaggtgaaaaacttgatcaaaagaaagcactggaactatttgagaaatctgcacaactaggctcctcaaatgccatgttgcaattaggattaatttatcggaatggtaatgatttaataaaaaaagatgatttaaaagctttaaagtggtttgaacagggggctaagaaaggtaatccttcagctatacataatttaggcgtttcatattataaaggattgggtataacagaagataaagcgaaagcttttaagtattttagtcaatctgcagaattaggcttattacaatcacaggtaatagttgcgggtcttttatacaacggtgaaggtgtaactaaagatcacaaaaaggcttttgagtgggcattaaaggcagccaatcagggggatgttgagtcacaaaacaatatcggtttagcttatgaaaatggagatggggttgcaaaagaccctgtgcttgcaaaaaaatggtttgaaaaagcagctaataatggttctgtattagggcaatataatcttgcacttaagtattttgatggtaatggtgtagagcagaatttttcaaaatcaattgagtatgcagaaaaagcagctaatgcgcagaataaagctgctatacaattgttggttgatatctattcaaatgatagaagccctaaatataatcctgagaaagctaattattggaaatctaagctttaa

SEQ ID NO: 45402 - DNA, 177 bp, Acinetobacter baumannii
atgaatggtgcgaacaaccctattcgaaaaggaaacaaactagatattggtacagtaagttctaaccagacagtacagtacgatattcctttaacggcgcgttattatcaaactgcttcgaatgtaacagccggtgaagtcaaagctaatgcaacggtaacgatccaatatgattag

SEQ ID NO: 45403 - DNA, 750 bp, Acinetobacter baumannii
atggcgggtcattctaaatgggccaatattaagcatcgtaaagcgaaacaagatgccagtcgcggtaaagtttttactaaatatattcgtgaaattgtcactgctgcaaaacttggtggtgcagatcctgccagtaaccctcgccttcgtgctgttgtcgaaaaagcgctttctgtcaacatgacacgagataccattaaccgtgcaattcaacgcggtgtgggtggtgaagataatgatgatttaaaagaagtaacctacgaaggttacggtgtaggtggtgttgctgttcttgttgagacaatgacagacaacctgaaccgtacagttccagacgttcgccattgtttcagcaaaactaatggtaacttaggtaccgcaggttctgttgcttacttatttaccaaacgtggtgagattacttttgacgatgtttctttagaagataagatcatggacgttgctttagaagctggtgcagaagatattgaagtttcagaagatgaaattttagtaatcacttctccagagacttttggtgaggttcaagatgctctagcagctgctggtttaaaatcagacaatgctgaagtagtgatgagcccttctactaaagcagaaatcactgatattgatcaagctaaacaagtgatgaaactcattgatatgcttgaagatctagacgatgtacaaaacgtttatacaaacgttgagtttagtgatgaagttttagcgcaacttgatgcctaa

SEQ ID NO: 45404 - DNA, 894 bp, Acinetobacter baumannii
atgaaacgttctgcaacctctctcattgtttcaacagttatgctttgtacggttggtgctacttctcaaattcaggcagcagatacattagctaaaattaaaagtactgggaaaatcgttattggccaccgagaatcgtctgacccgatttcatatgttgttgcaggtaaaccagtaggttatgcagtcgacatttgtaaccagtttgcaaatgatattaaaaaagaattgaaaatgccgggtttaaaagttgaatacaaggcagtaacttcatcaacacgtattcctgagcttttagcgggcaatattgatatggaatgtggtaccaccacaaactctaaacagcgtcaacaacaagtgggtttctcaactaactactatgcaacagaagtacgcatggctgttaaagcaaactctggtattaaaagtttggcagacttaaatggtaaagcagttgttacgactcaaggtactacatctgacaagtacattaagatgaatgaaaaaggccaagcaattaatgtacaaaatatttatggtaaagaccatgctgactcttttgccatgatggcatctggacgcgctgctgcatttgtaatggatgataatattttagcaggcttaattgctaagtcttctacacctaaagcatttgcaattgttggtccagtactttcatcagaaccttatggcattatgattgcaaaagatgatccaaaatttaaagcaattgctgaccgtacagtaaataacttatggaaaactggtcaaatggatgctttatataaaaaatggttcttatcaccaattccaccgaaaaatactaatttgaacatgcaacaaagttcatcttataaaaaactcaaagctcacccaacagatgcaggaatctaa

SEQ ID NO: 45405 - DNA, 783 bp, Acinetobacter baumannii
atgagcaataataattttcaacagctattgttaaatatgagaaattttttacaacctattgctgataaatttgaagaaatacaaaagaatcctgaaacatcgaaatttattcagaatgttgattacttagttagaaaccatgaaagaacatctcctttcatgaaaaaattattagcagaaatggaaggaaactctaacttatcagaagcactggaaactattccttatagacaaatttttagactactcgccaatagtgagcaaattgaaagtgtaagtattctgcaccttatcaatgatgatctttttcaaaagggaatattggaatgctttgatgagatccagataggaaatcattttaaaagaagaaaacaactgattgcagaagcatttaaactttatgaattagaatatttttcagggtgtctttgtcttattcactcacagttagaagggatcattactgattacttaatatttaagaatattattagaaaagagatagctaacggtaaaactaaattcatctgcaattcggatggagaaaatgtagttggactagctagaaaaattgagttagctaaagatataaatgaaaattttttaagattggaaagtttccagtttgataatgatcaaaataaaaaatttcacaatgaaagaaatgatcttctgcatggttcaaatattgataacttcaatgctgaacggtgctttattgtctttatctggatagattcaatacttgggtcaatatatagaaatgaagtgatattaaattga

SEQ ID NO: 45406 - DNA, 1074 bp, Acinetobacter baumannii
atggctaacggaagcagtaagactaccagagaagtgcaaagcaccttgcttgctcatggtgagcagctacttaatggatctaaagttaggcgtgttaatcagacccaaagtttagatacttttttaaatgacctgtctaagcctaaaaatggatctggccattcagctaaatcagcccctaaatcatctccaaatagtgttaaagcaactttagatagaattagtaaaaagactcctgaagtaatggtcaaggttactggtggaggtaattctatggggaaggtgaaagcccacatgggatatatcacacggaatggacaattagagggaattgatcaggacggaaataaagttaatggtaaggatgatatagaagatactgctgaagattggcaaatgtcaggtacacctatttctgatgaagaatctaaatataagcaggcttttaatattgtgttatctatgccgaaaggaaaggatgaaaaaggcgtttatgatgctgcaaaagaatttgcagaggaacattttaaagaccataaatatatgatggtgcagcatacctttaccaatgacccttcaaaagatccaagtgaaaacccgcatgtgcatgttgttgttaaagctgtttctgaaaaaggtgatcggttaaatatcaggaaggctgaccttcaggaatggcgagaaagttttgctgaaaaattaagatccagagggattgaagcgaatgcgacaaaacgtatagctaggctgcaaaaaaatagaagtgataagcagtcagttaaacaaatgaaagagcagggcaaatcgtttaagcgatatggtaaaaataaggctagtccagaacgtgtccagaaagctaaacagcaagaaaaagaagcattgacgcattacaaggaaattactaaagctctatcacagtcacccgatccacaagatagaaaactagcagttgatctagtggactatttgagaaatcaggtagaagtgaaaaaaccaacgccacagccacagattcaacctaataagccagatccgcagcagggaaagagcaaggggaaagaacaagatagataa

SEQ ID NO: 45407 - DNA, 660 bp, Acinetobacter baumannii
atgactaaagacaataaaatctttttcagagttgatcgggcagtgcttgattggtgggaggcaaagtgtgaaaaacagggaattaagaaaggcgcacctttccaaaaagcgttagaactttcttatcaaaaagagaatgatccagaatattcaggacaagatttttccttgaatcttgaaaaggacttagccgaaaaaatctatcagttagctaagtttgaagaagtagatccagacgacctgctcaaaaaaatgatcaaggaaaagttatctgaaatagaaaaaatgcaagacgtcatagatgtatttgaaaaaacatcacgcaaagaattacggcttaaaccgagtttgatgaaagccattaatgaaaaagcagcacaggtcagcatgaaaccgaatcaatatatcatttcggttttaacagctaatgtcacaaaagattcaatattctttagccaggaagaagctcttaaacttggcgaatcaaatagtcagcttttggcgattggtagaaacctaaaccaaatggctaagaatatgaatcagggtatttatgaatcttacgatagagaatttgtcgagcgagtacatcagctagtaaaagctcaagttaggcatgttttcactctattagagcgcaataaaaagaggtgggaataa

SEQ ID NO: 45408 - DNA, 1038 bp, Acinetobacter baumannii
atgttagatttatcagctttggaaggtattgatctaggtaatcctgcaccagtagcagacggaacacctaaacagattccacttacagatattcttgaagatccagatcagccgcgtgttgaatttccagaagatcagatgcaaaaaatggtcgaatcaatcaaggctcgtggagttaaaacaccaattagtgttaaaccccacccaacagaacaaggcaagtggattatcaattatggagctagacgttttagagcttcagtgatggctggcaaggaaactatccctgcttttgttgataatgatcatgatgattatgatcaagtcatggagaataaagaacgccttaaccattcacctattgagcttgcacttttcatccaaaagaaaattaagcaaggtgagaagaaaaacgtaatcgctaaaaaattaaatgaagatcctgtttttatttctacccacttagctttagtagatatgccagagtgcttatctaaggcttatgatgcaggttttaaatctccaaagactttgtatgacttacgcaaactttgggaatcattccctgaagaagtaaacgcttgggtggatgaatctttagagaatggtcaagacattatcagatcgagagtacaggctctatctaaaaagttaaaagaacctaagcaagctgaagcgactgaagcagatccagaatcagaactacaggcgcaagaaagccaagagcaaaccgccattattgatgataatgaatctttcaattttgatggggatgatcaagctgaagcgactgaagaacctgaagttaaaaaactgatggatcaatcaaaccagaaagagcagccagaatctaaagaagaagatccagacaaaatcaaaaaaccgcttttagttgttattcatgacggccgacaagcgaacctcatgcttaataaaaagccttcttctttgggttttgcatggatcaaatatgaggatggaacagaggtatctgtagattgcagcagccttgaaatcgagtatttacaagaagcctaa

SEQ ID NO: 45409 - DNA, 777 bp, Acinetobacter baumannii
atgaaaaaagttgttgcttcaaatcaaaagggcggtgtgggtaaatctgcaatcatttgccagtatgcacactatttaaattctttgggcttgcgtgtattagtcattgatctagaccatcagaaaaacactacaaaagcattgattactggcggggctgtgactgtagctaatgtatctgctttcgacatgctgactaaagaagatcaaactatttcaaatcttgaagcctttactttggtacaagcaacaccagaattaacagcaattgaaaaaaatggcactttgcataataactttgccaccaattaccagaagtttttaaaatcagtagattctttatttgatgtttgcctgattgataccaatccaaatcccgacattcgccaagtagcttcattaattgttagtgactatgttttaagtccaattcagttgaatcaggaagctattgacggcatcggtggattactcaagcagatccaagcgattaatcaaaagctaaacccaaatttaaaattaatcggcatccttccgaatattgttgaaccaactccattccagaaagacaacctaaaagctattgttcagcatttttcaaagtacctgatcaaaaactcagacggtagctatgctttcgttaaaaaaacgactgcaatcgctgaagcgcaagcgcaaggcatacctacaaataaattaggtaaaactagcggttttaccgcatgggctgaattaaaaacagtttttgaaagcattaacaagtttatggagatttaa

SEQ ID NO: 45410 - DNA, 381 bp, Acinetobacter baumannii
atggaacaatacatttcagtttacacacgtcagcaagccattgaagatggttttctagttgcaatcaattctattagtcctaaattagatggactggcaaaagaacattataagcatcctatatgcttcacttctgtgctttgggcggtagttgataaggctgtaaaaaatgaaaaatggcttaatgacttagagggtgttattcatgacattttatggatgagccgagcatataagacacacctaagcccaagtgcggtacgttttactgtgattatcacaggcgcaggtcgcaagacaaatcatattttagaattgcacgtacatggtggagatcaaggagagccagtcataacaatcggttatcctgaagacttttaa

SEQ ID NO: 45411 - DNA, 264 bp, Acinetobacter baumannii
atgcgagcttcaatagttgcaatctttacaaactatcctacaggtaaactggttcatttttgcggtcatgaggttttaactggatctaacaataatatttggtttccaatctttgatgaaaaaacactattccaagaaattgaaaaaatcatgattaattgccgagtagctcacaatgttactcatattgaaagaatcagaaggggagataatgaaaatggttactttgaagattacagaattacttataacttagccgtttaa

SEQ ID NO: 45412 - DNA, 519 bp, Acinetobacter baumannii
atgaaacatttttcatcagttacatcattagacgagttaaaacttcagtacaaaaaactagcttttaaaaatcatcctgatcgtggcggtaaaaccgaagttatgcaggagattaacagcgagtatgaacagcttttaaatcgcattattaatgaagcttcaaaagatcagtatcaagatagttccgaaaatgggcgtggtttctggtcaagccgttcagaacattctgaagttgagaaaaaagtaaaacaggctattgatgcaattattaatctggatggtttagatattgaaattattggtgtttgggtttgggtttctggtgatactaagcagcacaaagacaaattaaaagaagcgggttttgtctggaatcgagtgcaatgtaaatgggttttcattggtaaaaaatcaaatggtcgaggcagaatgactttagatcaaatgcgagagttacacggcagccagaaagttaaaaaaaccagaaaggcagaagaaagacaacttttaaccgcttaa

SEQ ID NO: 45413 - DNA, 1158 bp, Acinetobacter baumannii
ttgatttgggaacgtactatttcaagtcaattggccaaagctgaatataaagccgttactttggaattactgtctgaagatggaaaatataagttccatgctaaaagccgtgagctaataaaaaaagggtggatggtttttggtaaagactgcctgaatgaagatgaaaacgagccttcaggcgtggtgccggtcttagaagttggttctgtagttgatgttgaaagcggtgaagttattgcaaaacaaactaagccaccaaaacgctatacagaagcttcactaattaaaaaattggaaagctgcgggattggtcgcccttctacttattcatcaattatggccaatattctgaataagggctttctggaggtagaaaagaaagtcttaaaaccaactaaattagggaatgatctaattggtagtctgttaaaagctaagtttagctttctggatctgcactattcaaaagagatggagttgcagctagataaaattgcatctggtgaaacttcatataattcggttgtttctgccttatacactcaacttgctcaagagctaagtacagcttcaaaactgacagctataaacgcaataccttgtccaaagtgtaaaagccagttaaaaaaatttaagaatactaaaaccaatcaattcttttggatttgtagcaatgaggactgtaagcactcgatgaatgacgacaagggtaaaccagtcgaaaaagttattcattcatgccctaaatgtaaaacaggtcgcttaaataaattccaaaattcgcaaactaaagaatttttttggatctgcaatgatcaggaatgtaagcactcgatggatgacaagaaaggtcagccagtagagaaaatcaaatatccttgccctaaatgctcaacgccattattcagatccaaaaaagaaggtaaagatccgatctggttctgtcctaatcgggaaacagattgcaaagtctttttgcctgaagttaataaaaagccacttcttgaagtctattcatgtcctcaatgtgccagtgatttaagacggatcaatggggcaaatggctatttttgggggtgtaccaactataaaaatgggtgctccgctacttatccagatcaaaaaggtaagccaaaatttgaggtgaaaaagtaa

SEQ ID NO: 45414 - DNA, 678 bp, Acinetobacter baumannii
atgattgatttcgtagttttggcacaacaatgtgcgccacaagttgatgtaaatattgcgtctgcaattgttaaatctgaatcctcatttaatccttttgcgataggggttaatcgtgccgcaggtcttaaaaaacagccgactagctatgaagaagctgtaactgtggccaaaagattaattagccagggacgaaatattgatgttggttttgctcaaattaatagtgctaatttcaaaagactaaatcttagtatcgagcaagtttttgatccctgcactaatctaagcgcaatgcaatttatctttaatgactgccgaaatagggcaaaaggcaaagatatttataaagctatgtcttgctataacactggcaaccattcatcaggatttagaaatgggtatgtagcgaaagtatcaagaaatttgaattattttgctaatggttcactcaataccatgcctgtaaaattcaatcctccctcacctcctatgaatagctcggaacagcttgcttattttgctactaatgcagatatgcctaactccagtggatataccgaaaatacagaacttcaaagccttccagtagtggagaaacggccttcatttttcttaactaacggcacagattttaaagaaaaagaaaaaagtttaaaatcttctatgatcttttaa

SEQ ID NO: 45415 - DNA, 306 bp, Acinetobacter baumannii
atgaaagcaaatcaaacgcaaataacaacgactaaaacgactggtatcaaagcaagcgtattgatgttgttcatgacgttaatctcaagccctgcttttgctcaaatctcaaaagttaatacggttatggctaatgttcagtcagtcttagcgggtgtggctgtaactgtatttaccatcactatcatgtgggctggttttaaattggcttggcaacaagcaaagtggtcagacatttctaacatcgttatcgggggcattttggtaggtggtgctgcgggtatcgctgcttggctgattaactaa

SEQ ID NO: 45416 - DNA, 2463 bp, Acinetobacter baumannii
atgcgttcaaaacagcaagttaaagatagcgcaaatgctgaagtcgcaatttcagactatctgccgtttggtaatcatgtttccaacaatgttattaagcttaaaaatggtgaatacattgctacatggaaattagaaggcatttcgtttgaaacagttgaagccgatattattagaatccgtaaagaaggattaaataatttttatcgtgctttaggtggcggtcactttgctgtttggacgcataagattcgtagaggagttaatgaacgtctaaatggcgtttatgaaaatgattttattgctgattttaatgaaagatattatcagcagtttcagggtgaaaagaataaacagatggctactgaattgtatttaacaattctttatcgtcctgaaatttccagattaacaaaaatttttaagagtaaagctagtcgtgatccagtagccctgaaaaagcagattaagcgggatctggatattttggatgatgtagccaaacaggttgaagcaagcctatatcactacaatccagaacgtctggcgacctataccaagaaaggttttgtctactccgaaatgtgtaatctgcttggttttttaactaatggagtttgggaagaaatccctttaagacaggctaatcttgatcaatatattccaagtagtcgcttgttctttggtgacaaaaacggctatttacagatcaaacatcctgaagcgcaaaaatatgtaggctttctggatattcaagaatttccacgtttatcagaatcaggaatgtgcaattccatcctgtatggaaactatgaatacattgaaactcaaagtttcacggtttatggcaagcgtgatgctgtagataaattgaaaacaattaaaggccaactaaattctgtagaggacgtttcagatcaagagattcgtgatattgatctggctatgagtgaagctaatagcgggaatttccagttaggcgaatatcactatacgcttgcgatttttggcgattcaccaaatcaagttgctctaaatgtttcgagtgccagaactgctttatcagatgaagcagggttcaaaatggctgtaattgatactgttcctgaatgtgcatggttctcgcaattagcgggtaactttaatatgcgtccaagagaagcatatctcacaagcctaaatttttctgctttaagcccttttcataacttcgcaagaggtaagcgtgacggcaatccttggggtgaagcactagctttatttaaaactccaagtggccaaccattttactttaatcatcatgtcagccctgataagcaagattctacagatgacaagatgccaggtaatacgtgtgtcattggaacaacgggtgtggggaaaacaaccctagtcatggccatgatgatgtttgcttgtaagtataaaaatctgaagggtgttttctttgataaagataggggcgcagaaattgggattagacggattgggggtcaatactatgccttagagcgtggtgtaccaactggctttaatccgttgcagctaccaccgactgaaacaaatattcagtttgtagaaaagcttgtaaaaattctggtaggtagcgttcgtaatgctgccgaagatctggaaatcagtcaggctgttcgtaccattatgcgtgatgatatgccgttagaactccgcagactttcagctttatatatgaatctgaaagtaaatggcgggggtgattcgcttcaggatcgtttagctaaatggtgtaacactgctgatcatgacggaaatttatcttgggtctttgataatccatacgatactcaagacttttctaaagccaaaatgccaatctttggttatgactacacggaatttttagatgatcctgaagtccgtacaccaatcatggcttatctattacacatcacagattcattgattgatggtagtccgtttatttactggatggacgagttttggaagccattaacagatgaatatttcaaagattttgccaaagataagcagaaaactattcgtaaattgaatggtctaggtgtctttatgacgcaatccccaagtgacgttttagattctgacattggtaaaacaatggttgaacaaagcgttactcaaatctttttacctaatcctcgtgctgattacgatgactatgtaaacggatttaaggtcactccgcaagaatttgaaattattaaagagctagaagaaaactcacgcatgttcttagttaagcagggtagccgttccgcactctgcaaaatggatctaggcgaaatgcgtgacgttttacagattatttcaggctctaaggacaatgtagaacttctcgaaaatctcatgaatgaagttggtgaagatcctaacgattggggcgaacttttcttacaacggatcgcagaacgtaaaaaattaatttcagaaaaaggagttgcttag

SEQ ID NO: 45417 - DNA, 300 bp, Acinetobacter baumannii
atgactaagtttttagcactatcaagtttgttggttatttctactttaacaactgcatgttctgatgataaggaacaggttaagcagttaaaagaagaagtgaaggctgcacaacaattaaaacctcaagacttaactgctgaacagcaagaagaattgaagcagcgcaaggctagagcatcccaaaagggcaatattcttgatgaatatgatccttctgcacctcaaaaaccagtaaaagcagaaaccaaaaaaggatctggaaatatccttgatggatataacccagattcaaaataa

SEQ ID NO: 45418 - DNA, 1026 bp, Acinetobacter baumannii
atggcaattattactacattagaaacaaaaattgattctctattagcaagttacgtgacaggtgttagtagtaatatcgcttctgcaattgttcctatagctttgactgctgcaacaatttatatcctgatcattggctacaatattgcgactggtgcacaagaagattctatttataccgctttatggaagttttttaagatcgcttttgttggtggaattgctttaagtgctggagtctatcaatcctttgttgttgaagctattaatggattggctatcggtttaattcagattgttagtccaggtggtgaaacttcgttaggtgctttactggatcaagtgagcgttccgtggggtgaattaatccaaaaattaggtgaggaagctgaatcagcttctggcgttttccctgatattggcttgtatttatctgctgctgttgtttctgtcgctcaattcctattgttcttcattggtactggcctatatttactggcaaaaatcagtctgcaactttgtttaggcgttggtcccatattcattctgtgtgcaatgttccctgctacacaaaaatattttgaaagttggctttctcaaacattgagctatgttttcaccataggctttatcacagcaattatcagtatgctctttgctttcgtttcaggcatgtgtacgcaaatcgctaataactttgatgcgggtgacattcttacttctgtagtttccctctgtattgttgcgggaactattgtagtgatcatgtggaacattccaacgatggcttcagccataacaggtggggcgggtgttcaaggtgtcggtcgtgctgtagctcaagcaattactaaaggtcgtggcggtaataattcaaaatctgacagtgcttcagctactcctaccactgggggaagtgttcaagggaattctagcagctctaataattccaatagctcgaatacaggaggatctaagccgttatatcaacgacacactctctctaacctcaaaagaaacaaatag

SEQ ID NO: 45419 - DNA, 237 bp, Acinetobacter baumannii
gtgggattatatacaattagatatggttatcgtaacaacagtttttttattgcttcaaatacggctgggcagtttattgtgattgatgcattaggagcagatttccaaattggtcatcaaatttcttatgaagggagcaaaataataaatgaaacattaaatgatgaaacagaagcaaaagttcatcttgagagcaacgaaaaagaagcttatgagtatttacagacaatgaaataa

SEQ ID NO: 45420 - DNA, 2439 bp, Acinetobacter baumannii
atgaaaacttttcaattaaaaacactttcggtttttttaagtgcattaggtgcattttcatatagttctgttgctcaggcacagctcatgtttagccagtatgttgatggtagtagtaataaaaaagggttagaaatttataacccggatggtactactgttaacttggctgattatgaaattcaacaatttaataatggtgggactgcgaaaacagccactttccgtttacaaggtacacttgcaagtaaacaaaagtttttggtggggcgttcagagttacagacagaacttggcaataaagtaaatcaagtggctgcattgtcttttaatggggatgatgcagttgtgcttgtttataaaggcacacctgtagatcgttttggccgtattggggagcgacctgaggcaggatggggaactgccgtttcaagcttgggaaatagctttaaacgtattgaaactgaaaatccagctttgagtattgatccgacagctgcatttgatttggaccattcatggacagcatgggcaaaccgaaatgattttacaaatctatcaggtactactactcagcctcctattgaaacggtcagctgttcaagctcagatacaccaattgccgatttagcaacatcagcacaaaaccagacttataccgtgcgtggggtaattactgccgactatcgttatgcaaatggtttctcaggtttttatgttcaaacacctgatacgaaagcacgtgcaaatgtgagcaatgccatttttgtttatattccgaatagtagtacggtgaaaggtggacaaattggtgatgaggttattttacatggccgtttaaccagctatcaaaatcagctacagattgaccaattacaacaagatattcaaacctgtaatagcaatatggcaaatcaggttcagccaattagccttgaactaccattttcgagcttaacaggcggttcaacccattctccgcagcgttatcaaggcatgttggtgaaattgcctcagactttaacggtgagtgagaattataattatggtcgttatggtgagttatcgttaagtttaggtcgcttatatattccaaccaatttatatccagcgctatctcctgaagctaaagctctagctcagaaaaatttattatctaaaattatttttgatgatggttataacaatcaaaaccgtacaccatggttacctacaaattttagtgctgccaatacattgcgttcaggctaccagcttaaaaatgtcgaaggaattttagagtatcgttttaacggttggcgcgtacaaccagtgcttggacgtacgcaaccagaagttattactcaaaccaacccgcgtcaaaatattattacgaaaaatgccaatcatattcgtgtagcttcatttaatgtcttgaactatgacaatggtgcaacaggtttcccaacagagcgtggtgcaaacacacaagcagagtttgataaacagcaccgtaaaattgtgagtgcactcaaatcgattgatgctgacgtttacggtttaatggaaattgccaacaatggctatggcccaaacagcgcgattgctcatttaacgagtgcactaggtccagactggaaatatgttattcctgaaaatctggatcgtttaggtagcgatgttattgctgttgcgattatttataacagcaagcgtgtgaagcctttaaataaagctgttgtgcttgatttaggtgataaaaacagaacgaccttagctcaaacgttccaagctatccgtggtaataaaacatttaccgttattccaaaccatttgaaatcaaaaggatgtagtggagtagatgccaactcttctgatgcagatcaaaatgatggtcagggatgctggaatccaacccgtgtaaaagcagttgatcaaattgtgcagtggctagcaaaaaatccaacgcaagtgcctaagcaaaatgctttactcgttggagacatgaacagttatgcaaaagaggcgccgattttggcatttgaaaaagccaattataaagtcttactcaatgacgctaaagttgggcaaggcgctcaggcgtacagttatgtttttggtgtggcaagtgatgcaaatggtaatggtggagcgggtaacttagaccatgctattgctgatgcagatttatatccaaaagtagttcgtacttttgcttggcatattaatgctgacgagccgacggttctagattacaacgaagaatataaaactgatgagcaaaaagctttgttctatggtgaagatgcctatcgttcttcggatcatgaccctgtgattgtcgatctagatttaaatggcaaagactcgaatcagccaaatgataaccagaaaagtccaattttcgatttcttatctcaattaatggaatggattagccagctttttaaacgtagttaa

SEQ ID NO: 45421 - DNA, 1224 bp, Acinetobacter baumannii
atgaaccagctggtctataccgttaatagcctgggcggtgtcagcggatcggtttatgatctcaatggcaaggtgattgcccagtatcaatataccgccttacaagatgtcagtggctgggcgagcaaagatatcgtgactgctgccaatgtaacggtcagtaaaaccacggctaacctgacccgctttgtttacaataaagatgggctggagatctaccggattgatgccgaaggcgcagtaactgaaacccaatataacgagctgggtaaagttgcccatgtgcttcagtatgacaaggtggttaccctgacaggagaggcattaactgccgatggcatcaagactgccctcaccacagccaaagcctctgctcaaacccagtcctattattatgatgccttgggccggatggtttacagcatgaatgcagcgggttatgtgacccgtaatgtctataatgccctgaatcagatcatacaagtatgggactttagagttgccaccacattggctcggaatagcacttttgcccagatgaatgcggtctacaccgtttctccgcccgcttattttatccactatatgtattatgataagctgggcagaaaggtctatgacctcaaccagcatgaaattctaacccgttatcgctatgatgaactggggaatctgattggtaaaaaagaaacgacgcttagctataaaacagtacttgatttactaagaaccaaggatgcggcaggtaacttaagcgcccgcccacctgcaagcattgaaaactatgatgctggcttggccttgttgaccgaggcgcaataccgcgagaccaactacgactattttcatgtaggttctctctttattgtttctcgaaaattgaaaaatatctttgaggaaaaaaaagttttagcagaatactttttgataaacttatataaggaaaatggtgaatatctagaagaagaatacttttttgttaatttattaaaaaaaattgactgtattaataaaattgattctaaatattctgaagaagatggttttattgatgaaatctataaacttgttattgatgaagataaagcaaaaaatgaagttttattcagggttgataaaacatttaacaatataatattagtacatgattcgttgagtgatgtaataaaaaaatcaggttgtacaggagtaaattttattaaagttgatgactggaaatggtag

SEQ ID NO: 45422 - DNA, 993 bp, Acinetobacter baumannii
atgaaacctttggcagctttaccgttaatttttatagcaattcagcaagtgcaagctgaggagagaattgcaattttaaagcctcttgtttttaaggcaaatgcattaaaggaaaaaaattatgtggtggacaaagaaaaagtagaaagttccaatacaataggtgatgctcttaaaaatataacaggtatacaaagtacttcatttggacccaatgcaggtgcaccagttatacgtagtttgagtggaaatcgggttggagtaattgaaaatggagaatttattaatggaatgaatgcatttagtggaaatattaatataccattcgatccaatttttatagaaaaagtgatagtgaacaaaaatacagataatattcgttatggcggaaatgcaataggcgggagtgttcaaatagaatcgggtttaattcctaaaaaaattgaagaaaagccaaacaaattagatattgtctttcggaaaggatttaatgattttgatgtaaaggggttcaattttaacatcaatgatcaaaaaaactggtctacaaatataagatattcagaatatgaaatttcttcttataaaattccaggaaatagtaaagccaaattatgtgaagaccagattttttcaaattcaggtgggatcaatagtgcattagcagcttcctgtcaaaaggatagtagagtccaacatatttataacaagtcgtcacaaccatacatagataaatttatgactgagaatcctgattgggcagatggggatttttctttttatacagataagcccacatctatatggggaggaaaaacatatataaatccaaaaaatccagagtacatacctaatactccgcaaaatacaataaaaaagatcaatacggatgttacaccaaattattttaaaaaattaggtaacagttatgctcagaatgagaatattgggtttggaacaacatacttttttgatacaggtttctttcgatga

SEQ ID NO: 45423 - DNA, 1995 bp, Acinetobacter baumannii
atggcacaagaatcccgtttggtcattgttattgattcgcaaaatgctgtacgcaatgctaaggctttagctgatgaaatgtctaaaattaccgaaaaaggtgattcagctacacgtacttccaaagaactgggcaatcaaatcaacatcacaaataatattgttcaaaaatttaataccacggttaacaattcttcgtctttggtaagcaaaactagtgaagttactaaacaagcaactcagcaagtccaaaaatatggacaagaaataaaaacgacaacacaagaattagacaaacaagaaaagtctgctcgttcttacagtactgctataaagtccttagcagggtatatggctggtttagtaacgattaatgctgcaattaataatatggacacttatacgggccttcagaaccgtttaaagctcgttactaataatcaggctgaattgaataaagcgactgaagatacattccagatcgcacaaaaaacctattcagcttgggattctgttttacaggtgtaccaacgttttagtgacaatgctaaaacactgaatttaactatggatgatacggcccgcttaactgaaacggtatcaaaagctgtggcaattagtggagcaagcgcagaagctgctgatgcagcattagtacaattcgggcaagcacttgccagcggtacattacgtggtgaagagctaaattctgtaatggaacaaaccccggcattagcaaaagctattgctcaaggtatggggatcaccgtaggagagttgcgttcaattgcagctgaaggaaaaattacttcacaagcaatcgtgaaagcacttagaaatgtagaatctgatgttgatgctctttttgctaaaacagatatcacaatcgggcagtctctcacactcctaaacaatgaaattactaaatttgtcggcgaggcaggtaaaggtagtggtgcagcacaggtattagctggatccattcaaactcttgcgagtaatttagatttaattgctgatggagcattagtggttggtattggttatatcactcgcgcaattttgatgaagagcactgctgttaaagagggaatgacatcaactttagcgagccgccaagcatctgtgttaaatgctcaagcagaatatgctgaagctacagctgccttgaatgcagctaaagctcatctcgcgaatgtgcgagcaacaaatgcagaaacccaagctaaatttggtgcaactgcggcagcaactcgatatgcacaggcacaggcagcagttactgctgctacaaatgcacaaactgctgcacaaactaggctctcagcagcttcttctttagttggtagtattggtagtcgagcattaggacttatcggcggaccaattggagcaataaccctaggtgtatccgctctagcagcaacatatacttattttaaaggtaaggcagaagaagcgaatagaacacttgctgaacaagccgaagtggctaaccgtacagctgaagaattaaaaggcttaaaaggtgaggcaaaaactaaagctattaatgacttaacaacggcctttaaagctcaaaatggggttcactcacatcgatgtttggttcaatgtttggtgagcagtctaaagcatacaagatcatgtttgctgcagataaagcttatgcgattgcagcagccggtattgcgattcagcaaaagagtaaattgtggtactggctttgcaaaacctcttttacagcgtgcactaaacttattgaataaccaggttaaagcaggttggccagatcttacggtcgacggaatttatggacctgctacattaaatgctcttaaaatttatatggccaaacgtggaaaagatggcgagaaagtattagtgcgagttcttaatatcatgcaaggccagcgttacattgaaatttgtgagcacaatccaagccaagagcagtttttctatggttggatcgccaatcgagttgttatatga

SEQ ID NO: 45424 - DNA, 993 bp, Acinetobacter baumannii
atgaaatcaataggcaacaaaaaagcccatgatcttggcggacagggcttaattgatgtcgcaatctacaggaaagacaacatgtctaatttaacacaaaactttttaaatccaaataataagccattagttattggtgaatttactattcgccaagatgaagatgggcgttattgcttgaatgaccttcacaaggctagtggagacttggctaaacataagcctgctaactttttgcgtaatgagcaaacgcaagaattaatcaaagaaatcgacagcttctcaaatatgagaagctcagaaaacgaccacccctcaaatatgaggagtgctgtaaaagtggtcaatggagttgggacatttggagtaaaagaactagtttatgcatatgcaatgtggattagccctaaatttcatttaatggtaattcgtgcctatgattcacttgtgatggaatggttgcttaatggaaaacaaactatctcaccagaacaagctggcattctttataacattgttcatacaagagcaaaaggtaataaaaatttgattgtgcaaatgtggagtcgcttaaagaatcactttaaatactcagcaagttaccgagaattgagagcgattcactttgaagatgctaagcattatttagaagttatggatttaaaggcaaaaccagaggaaaagaaacctcaagatcctttatttgataaagatgcctatgagctggttcgcaaacttactgaagcagtcatcatagaaaatgatgaaatcgttccagttctgcttgctgtaaaaatgcttgatgtgaagaagttcgcgtattactcacacttagtagtgaaagcgaatgaagcagcgcgagatattgctcgattgttggatttcaggaacctacaaaatgagcctttgatcgatgcaaactgttcggtgatagccatgtctaatggacaaagatttctagcacgaccgaactggtttaactgcccagcttag

SEQ ID NO: 45425 - DNA, 156 bp, Acinetobacter baumannii
atgaatgttgtacaaatgaatacgcggatgcctgaggagctaaaagagtttttgttagagcaggcaaagaaagaagggcgctctctgaataactacttagtgagacattttgaagagcttaaaaagaaactaacgcgagagagtgcgaaagcatga

SEQ ID NO: 45426 - DNA, 240 bp, Acinetobacter baumannii
atggctgatattcaatttaatctacgcattccagaggaattgaaagaaaagattaagcaagccgcaactgagagtggccgatcaattaatgctgaagctcaatacaggcttgagcaaagctttgaattaccacgttcaatcaatatggaaaaagtgctgcgttttattgatgctgttaacgctttagaaagaattgaaaaattggaaaaggaattggattctttaaaaaaaatagaataa

SEQ ID NO: 45427 - DNA, 795 bp, Acinetobacter baumannii
atgaaaaagattattttattaagtttggtttttggtttggtagggtgtgaaagcaaggaggagaagcaggcaagacttaacttggtggtaaaatcattttctgaggagattgttaagcaggatttaatagatccaagctccgccatgttttcaaaccagaaaggtttttgtggtgaggttaactcaaagaatcgaatgggtgggtatgttggtaaaactagatatattgtgcttaataataaaactgtactctttgaagatgaaaacaatatagctaatcaacaattttcaagagcgtggtctgaaatttgcaaccaacaaccaaaatttaatgacaaggatgaattaatacccccaaacttcaaaatacctgaacctaaatataaggatgctgaatatcatttttcagcaaaacatgctgcagcaacaccatctagcctaacagttggtgagggttttaaatacatctatcctattttaagacttggatgtgagggtggcacaacatctataagtttatggtcacaaagacacttgtcttatacaagtgaagattatgtttttgttgaaacagacaaaacaacagaagctcaaccgataaaggtccgtagtgaagaggactggcaggattttggcgagaatgaggagttggttagtctaattaagtcggcaaataaactaaagattttctttaaaacaagcgatggcgggatttcattacaagaattcaaccttgtcgcactaaaggcgggcatgagaaagcaaaataatgcatgtgggtggaataagttttaa

SEQ ID NO: 45428 - DNA, 324 bp, Acinetobacter baumannii
atgggattgaattttagaaaaagtataaaaattgctcctggaatccgtgtcaatattagtaaaaaagggctatcaagtgtttctgtgggtgggaaaggtgcacgtgtaaatgtaagtaagaagggtactcgcacaacagtaggtattccaggtactggtttatcttattctaagttctctagtcatactaagaaaacgacacgtagaagagaacctgattttaataatccagataatgtatggggttaccctaaatctgaatggataatcagtggagttattttatttatagctttaataatttttatttggattattagctaa

SEQ ID NO: 45429 - DNA, 561 bp, Acinetobacter baumannii
atgaacttatttattagcaaaactatgttcactctcaacgcttttaaaattgtcatatatcgacaatttattatttttaccctttttatatttcgtcacttaaaaagctatccaattcgatttcttacacctgaagaaaaagctttagcacaaagggtgtttgggagtttgctagattgtgaacgtcctaaaattattgctactcgttacttaccgtggcaagcgcatggaattttgatggctccaaatgggaatatatacgtcaatctttctgactacagcagtaattacgcgctagagtctaaattcatacaagggatttttattcatgagctagctcatgttatgcaataccaacgaggtattcatgtattactaaaaggtgcgttactacaatccgcctactatctgagctttaaatattacaatccttataaatatacttatcatcctcagaaagcatttagttcttacaatattgagcagcaaggagaaattgctagagatatctgttcaggtaaactgccaaatatcatttgtttacctcaacttgatttgtaa

SEQ ID NO: 45430 - DNA, 1626 bp, Acinetobacter baumannii
atgaaaagttttaaagttgcccttgctcagttttctccgcatattggcaatattgactcaaacacccaaaagatgattgagcaagcaaatcaggcgaaaaaacaagacgctgacctgattatttttcctgagctttctgtgattggttatccagctgaagacttattgttacgtccaaatttaaataagcggatgcaaaaggcttttgctcaacttagtgaagttaaagatattttgatggttttcggcttcgtaaaccagacagaagatggccaacgctataattcagctgctgtcatgaaagacggtcaggttttaggtgtcttcaataaacataacttgccaaactatggcgtttttgatgaaaaacgttatttccaaaaaggccatcagcacttggtgtttgagtatttaggccataagtttggtgtactcatttgtgaagatatctggtcaatcaatacagtaaaacaattaagccaattaaatgttgatactgtacttgtgcttaattcatcgccatatgaagtgggtaaaccacagcatcgtaaacagacattaagtgagcttgcaaagcagcttcatttaaatattgtttatgttaaccaagttggtggacaagatgatttaatttttgatggcacaagttttgtcagcaatcaaaatggtgaaattgctttacaagcacctagctttaaagaagatctctatattgctgaatttgaccgcgatacaaaattatataaagttgtcgagtctgctcctgcactagaaacttttgcagagatctatcaaggcctagtcatggcaacacgtgactatgtagaacgctcaggttttcctggagtaattttaggtctttctggcggtattgactctgcccttacgcttgctattgcagttgatgcaatcggtgcagagagagttcaagctgtgatgatgccatatacttacacatctcaaattagtgtagaagatgcagcggaacaagctcgccgtatgggcgtgactttcggcattgccgaaattcattcaatcgtaaatagcttcatgcaaactttgtatccgttctttggtaattcaccagccgatgcgactgaagaaaatttacaagcgcgtgctcgtggcacattacttatgggcttatctaacaagtttggtaatttagtcctttctacaggtaataaatctgaactttcagttggctattgcacactttacggtgacatggtgggtggctttgctgttctcaaagatgtttataaaacaatcgtgtttgaattagcaaaataccgtaatagcttaagtgaaactccggttattcctgagcgtgtaattactcgcccaccttcagcagaactgcgtccagatcaaaaagaccaagactctttaccagcgtatgatgtattggatgctatcctttatgcatacattgaagaagatttaggtcaggcagacattattgccaaaggttttgataaagaagttgttgaaaaagtcatccgtttagttgatcgtaatgaatataaacgtcgtcaaggtgcgattggcccgagaattacttctcgtgcatttagtcgcgaacgacgttatccgattgtcaacggttggacagcgaatgactga

SEQ ID NO: 45431 - DNA, 564 bp, Acinetobacter baumannii
gtgaataatctacctaacctatcggatttaaaggttttttgcacagtcgccaaactaaaaagttttgtcgaatctgctgaggaactcgggacatcgccagcttttattagcaagcgaattaatattttagaaaacacgttgagctgcaaactttttcaccgcagtacacgtcacgttagcctgacagaagatggcaaactcatacttgagagagtttcaaatattcttgaagaatttgatgaagtctgcgaactggtcaataacccgctcagtacgcctacgggtcgtatggatattattagtagctttggttttggcagaaaacatgtcgcaccaattttgtctaaattaatgatgctgtatccaaaactacagattcattttgataccatcgacaataccaaagacctgattcaacacagtattgatttagacattagaattggtaatgaaattgcacccaatatgattgcgaagaagctggcttctaattttcgtattttgtgcgcgtcaccgagttatttacttaaacacggcgtaccggacagtatgggactgttctaa

SEQ ID NO: 45432 - DNA, 1188 bp, Acinetobacter baumannii
gtgaagaaatcattgagcgtgattttaatcactatatttctggatgctgttgggattggtttaattatgccgatcttgcctgaattattacggtcattggctggagctgaagcaggcggtgttcactatggtgctttattagctgtgtatgctctgatgcagttcatttttgcacctatccttggagcgttgagtgaccgatttggacgtcgacctgtattaattatttcaattgctggtgcaacggctgattatctcctaatggctgctgctccttctctattgtggctatatattggtcgtatttttgcgggaattacaggtgccaacatggctgttgcaacagcttatgtttcagatattactccagcccatgagcgtgcaaaaaggtttggtctccttggagctgtctttggtattgggtttatagcgggtccggtaataggtggagttttgggtgaatggaacttacatgcaccgttctttgctgctgcttttatgaatgggattaatttaataatgacagcagtcttattaaaagaatcaaaacacagcaataaaatgactgagaaggttcaggagcaatcaatattaaagaaattatcctatttgatcactcaacctaatatggctccattgcttggtatctttttaattatcacattggtttcacaagtccccgcaactttatgggttatctatgggcaggatcgttatggctggagtatatttattgcaggtgtttcccttgctagttatggaatatgccattctattgcacaggcttttgctatcgcccctatggtaaagaggtttggagagaaaaatacgttgttatgtggaatagcttgcgatgcaattggtttacttcttttatctattgctgttgaagaatgggtgccttttgcgttgttaccattgtttgcccttggtggagtagccgttcctgctttgcaagcaatgatgtccagaggtattagtgatgaaagacaaggtgaattacaagggctattaagcagttttaatagtctgggggctataattggtcctgtattagttactagcctctattttatgactcaggcatcagctcctggaatggtatgggcattagctgcaatactttatgtaatcaccctacccttattgcttaagtatcgcctgaataaatattctggagttccataa

SEQ ID NO: 45433 - DNA, 705 bp, Acinetobacter baumannii
atgccttctctagcaatgatagaattaatattctctcacacactccctatcagtgatagatttatgagtaaaaaagatattgcacctcaacgtctgacacgtgaaatagtcctgcgtaccgcattggatatgttgaatgaagaaggcatagattcaataaccacacgcaagctagctcaacgattgggtattaaatctccaactctatattggcatttcaagaataaatccttgttaatggaagcaatggcggaaaccattataaatgaacaccatttagtttctttacccatcgatgggatgacatggcaagattggttgctcgctaattctgtaagctttcgtcgagcactactagcttaccgtgatggtgctcgtctacatgcaagaactagccccagtcaaggacatttcaacacgattgaggcccaagttgcgctgttatctcatgctgggttttctcctgttgaagcagttgcattacttatgacattaggaaggtttattgttgggtgggtccttgaggagcagcaagaagaaataagatcagacccaccattcgaagccgatccaactatatatccactcatgctccaaggagtgaataccttacaaaatatgaatgcggatgacatttttgaaaatgggattcgtatggtgattatcggtgctgaaagacaacttgatattaaaatgcaaacttaa

SEQ ID NO: 45434 - DNA, 498 bp, Acinetobacter baumannii
atgagtaatcaaaatgatttagatgaccagttatatattttattggcatccatgaaggaatatcgagaagccatagcagacgataagaagcgattagagcagttttacaaccaagtcgctagtggagtgctagacaaggctgaaaaatcgctagaaaacacaaataagaagcatacaggtgcattaaacaacagtattcaggcattaaacgaagctacaaacaggctcaacttaaaacttatctttatttttgccagcacgtttgttgctgtgatgatggtgttcattttggctatctttttatacataccaagcaaagacgaaattgatgaacgtagagcagatatggctgtactaaaaaaatatccgctacaaattcgagaaagtgatggtgaaacattggtgagaataatgaggaaaaattgctactcgtttgaaccgagtagtgtcaaagaaaaaacgtatgactggtgtcagatcgaccctaaaaaatactag

SEQ ID NO: 45435 - DNA, 972 bp, Acinetobacter baumannii
atggcaatttatcattgttccactaaaacggtgaaccgaagttcggggcgaactgcggttgcatcatctgcatatcgtgcaggggaaaaactagaagatgaacgcacaggactgacccatgactttacgagaaaagacggtgtcgcccattctgaaattctgtctaatttagatattgaaattgaccgtggtgaactttggaacttggcagaaaaaaccgaaaaccgtaaagatgcccgaaccgctagagaatgggtcattgccctacctgatgaattagacgctgatcaacgtaaggacttggcaaaagactttgccaggtccttagttgatcgctatggagtgatcgcagatttagccatccatgaacccagcaaaggcggtaatgataagaatcatcacgcccatatcatgcttaccacccgaaaagccgaattggacacggacaataaactcaccctgaccaccaaaaccgatattgaactcagcaacgccaaacgaaaaagccttggtatgggtacaacccaagacgaaattaaacagattcgggaaacgtgggcaaatttagccaatcacgcattagaacgagcaggctaccgagaaaaaatagatcaccgcagctatgccgatcagaataacggactacaagccaccatccatgaaggcactaaagtcacccaattacgcagacaaggcatagacactgaaatcagccgttttaatgacaatgtgaaacagcagaacgcccaacagcttgaccaacagaaacagcagaaagagagcgttttacagcgtggtttaaaccgtgtcgatcaaggttttgatcaatggcagaagaaccaagaaaccaaacgtctagaactggaacgccaagcggaaatgaaacgacagcaagaattagataaacaacgagccgagcaagcactccgcaaggcatatcaaaaactaagtagaggcggaatgtcattatga

SEQ ID NO: 45436 - DNA, 285 bp, Acinetobacter baumannii
atgacaaaatctgctgaaaatatcgaaaagaaaattgaagcccaattagaaaagttgaaacagttaaaagctcaaaaacaggctattgatgcaagagaaaaaaccaagcaaaaggaacaagaaagaaaggacgatacaagacgtaaaattttgctcggttcttacttaattaaaaagatgcaatctaatgaagccaataaagaaaaaatactcgctgaactcaacgaatatttaacagaaaatagagatagacagctttttgatttgcccgatattgaagcctaa

SEQ ID NO: 45437 - DNA, 297 bp, Acinetobacter baumannii
atgattaaattaaacaacctatcaactgatctaaaacatgtgaccgttgaatacctcgacatcgtaaattatgaaattgcgagggaaaatatatgcggttatatcttcctattatctcgaatatccaaaaatgcagaacccaccaaaaaaatgcagatggaaagcaaaatacaggacttaatttactatcgagataatttgcagatagaggacaaagacaatattcaaaaggttttaaatacgctcattcccgagtatcaagccgaacagaacaaccaaacagctaagaaaaattag

SEQ ID NO: 45438 - DNA, 924 bp, Acinetobacter baumannii
atgaaaaaggaactagtcgttaaagataatgcactaataaatgccagttataatttagacctatcagaacaacgtttaatactgttagccatacttgaagctaggcaatcaaatacacccaatgataaagatttgacgattcatgctgaaagctatatcaaccatttcaatgttcatagaaatacagcctataaagttcttaaagatgcttgcaaaagcctatttgatcgtagatttagctatcaaaagctgactcaaaagggcaacattgagaatgtaataagtcgatgggtacaacgaatatcttatgtagaaaatgaagctcttgttcgtattaagttttctgatgatgttgtaccgttgattacaaatttagaaaaacacttcaccagttatgaactagagcaagtcagcagtttaactagtgtttacgctatacgcttgtatgagttgcttatcgcatggcgtagtacaggcaaagtgactatggtagagctagaagagctaagattaaaattaggcatagaacccaacgaatacaagagaatggggcaatttaaagaaaaagttttacaccttgccattgatcaaattaatgagtacacagatataaaagcagagtatgaacaacacaaacgtggtcgttcaattattggtttttcatttaagtttaagcaaaaatcacagccgaaaaaattagattctaagcgtgacccaaacacacctgacttttttgtcaaaatgaccgatgcacaacgccatttatttgccaataaaatgtcagaaatgcctgaaatggggaaatattcacaaggtacagaaagctaccaacaatttgctatccgtatagcagatatgcttttagagcctgaaaaattcagagagctttatccaatattagaaaaatcaggatttcagccatga

SEQ ID NO: 45439 - DNA, 594 bp, Acinetobacter baumannii
atggatgatatcaatataaggattgcacatcgaatacgagagctgcgtttagcacgtggatatactttagatgtgttagctgcccgttgccaagttagccgttcagctatttctttaattgaaagaggagaaacgagtcctacggcagttgttcttgaaaaactagcaaatggtcttgaagtacctttaactcaaatttttacgaatgaagcggggaattcatcatctcaaccgcttattcgtcggaatgaacaagctgagtggcgagatccggaaactggctatatacgccgtacagtttcacctccgaacttaaaattacccttccatattgttgaaattgaatttccgcctcattctcgaattacttatgaaactaatgaaagctctagagtggtacagcagcagctttgggtcgttgaagggaaaattgaaattcaattaggtgaaacttcttatgcattaggtcaaggggattgcttggcaatgcaattagatcaacctgtcatatacagtaatcattcagctcaagttgctcgttatattttagtcgtttctaatcaactggtgcccgctcttaaggaatctttatga

SEQ ID NO: 45440 - DNA, 1086 bp, Acinetobacter baumannii
atgaaacgcttaaagtcccttgtctcagaacaaagtcaaatcaagcacctctctacccgactatttcgtcctcaaacattagtattgtcacaaagcactccatttgaagtgattggtgaattcaaccaaacccgtgttcgttattatgcagctacagaaaagagctttagagaaccattagtatttgtggcacctttagctattaatatggcgatttatgatttatatccatatcgttctcttatcaaatacttccaaaatgcaggttttgacgtataccttgtcgattgggggcgtttaggctttaaagatagacatcttaactttttatcgtttattgaagattttattcctaaagctatagagcttgttcgcacacattcaggtagtgatcaaatttctctacacggatggagtatggctggcatattcgttactttatatacagcgcataatcatccaaattatgtcaagaaccttatagttttaggtagcccaatcgatagctatgcttctggttatattggaaaactctaccgaaccataaacaacactattgcccgcaataaaaagcttcaggaacgtatttactcaggtttaccgaagcgtttgattcatactccgggcattttaaattctttaggctttaaaattcttgaccctaaaggctggttcgatggtcatattcaattacttaagaaccttaatgatcttcagttcgtacaagaacatgccacattaagcagttttttaaacaatatgattgattatccgggaggcattaatcaggacatgttatttaatgtttggctgcaaaatccattaagacaaggttctattcagttaaaagataaaaaaatcgaattaaaaaatatcgactgttcactcttagttggagctggtcgtagtgatcaattagtgacggcagatgcagctcagccattaagtcagttaaccagtagccaagatgttacatttactcttattcctggtggtcatttaggtctaatgtcaagccaagcaagtgcgcaggaattctggccaaagctagcaacatggctgagtgagcgttcaacaaaaatctaa

SEQ ID NO: 45441 - DNA, 537 bp, Acinetobacter baumannii
atgaaaaaatttatttttattgcggctagttctctttttaatattacagcagcacaagcagctgatggtacgatcactattaatggtttagtaactgataatacgtgtacgattgatactggtgataaaaatctcactgtaaatttaccaacagtatcatctcaatctttgaaaaatgcgggcgatgttgctggtcgtacaccttttcaaatcaatttaacgaattgtgcttcagttggtaaagtcgcgacttattttgaaccaggcgcaacagttgattttaatactggtcgactattgaaccaagctacctctggtgcagctgccaatgtcaacatccaattattgggtagcaacaatgcagtaattcctgtaattgcgaaaggcgcttctggtgcacaagataactcacaatgggtaaatgtttctgctggggggaatgccgatcttaattattatgctgaatattatgcaactggagcatctacagcgggtactgtaacgtcacaagtgaaatacacaattatttatcaataa

SEQ ID NO: 45442 - DNA, 741 bp, Acinetobacter baumannii
atgctttttcgtggtcgtaaatttttttggggaatggcttgtcttcaagcattaattgctactacagggcatgccgaaatagtacttcatggtacacgtgtaatctatccatcagatgctcgagaagtaaacttacaactcagcaataacggtacagcgccttccttggttcaagcttggattgatgatggaaacgctaaatcaactcccgatgaagcgaatgtcccttttatcattacaccacctatttcaagagtagaaccctctaaagggcaaactttacgaattactgcactacctaatgcttctcaattaaaccaaaataaagaaagtgtattttggcttaatgtattagatataccaccaaggccggaaggtaacaaacaagaaaataatgaagtattaaccaataattttcttcaattagcgatacgttcacgaattaagttcttttatcgaccagtaagtctaaaagaaaatattaatacattaagtgaaaaaattcagtgggtaaaaaatggtgaaaacttgcttattaaaaaccctactcccttttacattacaataagctcaatttttcaagaaataaatcatcaaaaaacagatttattaaaacagggtttaatgctttctcctttttcagaagatcaaataaaacttaaaaatagcaatataacaaatatgagctttgtttatataaatgattatggtggaagaattgaacaagtaataaggttctaa

SEQ ID NO: 45443 - DNA, 1437 bp, Acinetobacter baumannii
  misc_feature (1421)..(1430): n is a, c, g, or t
atgtcagaatggttcatatccagtatatgctttaaaaagcgcactacatattatttagtattgagtctcgcaattaatattcccttaactgtatatgcatcagacaatatgaatagggaaaatattttaaaagctgattttgatactaattttttagtgggaaatgcacagaaaattgatattggtcgatttaagtacggcaatcctattttaccgggtgaatatagtcttgacgtctatattaatgggcagtggttaggaaaacgaaagtttgtttttaaaagtactcgttcgaatgagaatgcaaagacctgttttaccccagatatgcttttagaatatggagttaaaccagaaattcttcatcatgaagtaagtagtacctttacctgtaatgacttggacaagtgggttaacgatgctttttatcaatttgatacttctcgtctgagacttgatatttcaataccacaagttgctttacaaaagaatgctcaagggtatgtcgacccacgtttatgggaccgcggtataaatgcagctttttttgcatacaatgcttctgcctatcatattgtaaataataaccatgaaacaaatcatgcgtttacgggtacaaatgttggtctaaatctctatgattggcaattacgccatactgggcagtggaaatggcaagatcataatgaaatacaagaaaaggtttcttcctacacatcaaataatacatatgcccaaaaggcttttcccaagctcaatagtgttgttactttaggtgattattttaccaataataatttttttgatgccctaccttatcgtgggattaacatatcaagtgatgaccgcatgcttcctaacagtatgctcggatatgctccccaaattcgaggttatgccaaaaccaatgcaaaagtagaggtacgtcagcaaggaaatttaatttatcaaacgactgttacacccggaagttttgaaattaatgatctttatcccacaggcttcggtggcgaattacaagtctctatatatgaaacaaatggagaaattcaaaagttttctattccttatgcttctgtcgttgagatgctacgacctaaaatgagccgatattcttttactttgggacagtttagagatgctaatatcaatctaaaaccatggctagtgcaaggtaaatatcaaagaggtattaataactatttaacaagctatacaggctttcaggcaactgaaaactaccagtcttttttaataggtagcgcatttgcaactccaatcggtgcaatttcatttgatgcaactcagtcgtcagctgaattcgaacaaaagctcacccttaaaggacgaagttatcgtttaagttataatcgactatttactccaaccaacaccaatttaactttagctacgtatagatnnnnnnnnnncgtatag

SEQ ID NO: 45444 - DNA, 576 bp, Acinetobacter baumannii
gtgaaaggccaaaaagtaggttatgtgcgagtcagttcggtcgagcaaaatacggaacgtcaacttgagggaattgaagtcgaccggatttttgttgaccgtgcttcaggtaaaaataccgaccgaccgaaatttcaagaaatgttgaattatgtccgagaaggagaccaggtgatagtacattctatggatcgttttgcgcgaagtttaaaagatttggtgactgaagtagataaactggtcaaacgagggatctccatccagtttgtaaaagaaaatattacttttacggctcaatccactccgatggataatttgatgctgcaactgatgggtgcttttgcacagtttgaacgtgaaatcattttagagcggcaaaaggaaggaattaaactcgcctctgctcaagggaagtacaaaggccgagtacataaattaaaacctgagcaagctgaagctttgcgacaagcatggaaagaagggaagtatccttcaaaaatggtattaggtcaggcatttggaattagtcgccaggctgtataccgctatttaaaagccggtgataactcaatttaa

SEQ ID NO: 45445 - DNA, 588 bp, Acinetobacter baumannii
atgaaatttgatgttaaaggcttattttacgttgatgagtatggctatccttgtcgtaagtacctagatattactaaaaaaaatgttgagtgtagcagtccagaattaatggttatcatgatgaatcctggctcttcaacaccaaaagatggtttagataatggttgtacgttaactgaaaccattccagatcctacacagttccaaatcatgaacattatggagaatacaggcattaatttttctcgaattcttaatttatccgatttgagaaatcctagctcttctaaattttattcaatgattaaaaataatcgtaaggatacaaagcattgtatttttgatgactctagaaaagaggatttggatgctctttttattaaagggttacccactatttttgcttggggcgtggattcaacattaaaaacattagctgatttagctgtaaaaaaacttgaaatagctaaaccattgggagttttaaaaggaggttctcagtattatcatgcgcgacctcacttgaaaagtgagcaagaaatttggatctcaactattttaaagcaaatgagcataaaagattcttaa

SEQ ID NO: 45446 - DNA, 348 bp, Acinetobacter baumannii
atgattgtacctgtcgaacgagttgcttacttattagctcttatgttgaaaagaagtaataaaacaaaaggacgtataagtgaaaaaacattgagaataatatctggaagacaacgtctgagaggagcttttcatattaatctttatgaaaatttagcaaacttaggtctagaaatagttgaattagatagaggtggttatgctctctatcatagatctatcatggagggagtgcctgttttaactgctaagaatcttataccacgagaagagcggatagcattatcattagaagaaatcatcaaggaattagatgatgagaatgatgacttagatatagaagagtga

SEQ ID NO: 45447 - DNA, 273 bp, Acinetobacter baumannii
atggataacaacttatttgatgacctggttgcttcaatcaaagaagctggtgccatcaaacgcaatgaaatcaaagcaagtcgagtgactgagcttgaattaccagatataaaagaagtacgtgagaaaactggcttaacccaggcagaatttgctgcacgtttgcatatcagcgcgagaactctgcaaaactgggaacaaggccgtcgatatccgactggtcctgcagcgactctaattcgcattctggatgcccatccaaccctaatttaa

SEQ ID NO: 45448 - DNA, 321 bp, Acinetobacter baumannii
atgttattcattgaaaccagtatttttaccaagcaaatcaaagagcttgtcagtgatgaagagtatcgtcagctccagcaagatctcttggtacagcccgataaaggtgacttaatcaagaatggcggtggtattcgtaaagtacgttgtgctcaaggtaataagggtaaaagtggtggtatccgggtgatctattattgggtcacagaggatgatcagatctttttcctagtcgcttatccaaagtctgtgaaagataatctgacagacaaagagacctcgatcctacgtcaattagtgaaggagcaatttcatggataa

SEQ ID NO: 45449 - DNA, 639 bp, Acinetobacter baumannii
atgtctatcaatggtcatgaatattgtgttcagaatggaatcaataggtcgaatataggtaaaatcatctatagtctagcttctataatatcatcattaatcattatagaaattttaaaaaagtataatgttatcaatggtatatcagagtcaattatttcagctctatttacggcagttttatttttaactatttacaagatttttaataaatggatatggcgaattaaatacctagttaattttataaactatcctaacctttctggtacatggaaatgtgaagctgtaagttcctataatggtggacacccgtgggaagccataataacgatagaacaaacttgggataaactaagaatagtattagctaccgaactttcttcatctgaaagtgttgctgctgctattatttatgacccaattaaagggtatagactgctctataactataaaaatgaacctaaagacttgaatggtgagttaacatttcatattggatttgttgagttaatattagcaaatgatagccaaagtgccgaaggttcttattacaacgttgcaggaagaacaagctcaggcactatgaaatggacaaaacaaccttcagaccgaaagatatctaagattttcttttga

SEQ ID NO: 45450 - DNA, 1206 bp, Acinetobacter baumannii
atgcagaaaattattggctcacaaggcttagaggaatatacacaatctaatacaagggcaaaattgaccgatttagttgtgacccgcaatgattttcctactgccagatatagcattgatctcaatcttgagaagcttatgtactgtgcaatgatcatcgtgagaaagaatgagcttaaaaataagacctcaattactcatgacgacttcatttatgtgagcagcgaaaactttggagaattgacttccccaatggccagaaaggaagtgcttacagcaacagataaacgtgaaattcagagaaatgctgaaactgctttaaaacgtatttatacaaaatttgataacccaactatgttggttaaggatggggaatctgacgaacctgctaaagttccgatgatgacttattgccattatgacaaaacaactaaatgtattaaggttagattcgcaaaagaattttttgagtatttctatgatctagttaagaaagtagatgaaaaaactaagtcatttagtagccatgaactaaagcatattatcttatttaattcgagctattcccttcgtttgtatcggatcttaatgagctatatgtggcgtacatcagaggtcactattgatctggaagaattaagatggatgcttgaatgtgaggataaatataaagagttggccaattttaaaagccgtgttttgaatgtggctcaggatgaaattaacgaacttagcaatattaatgtcagttttgagaacgtaaaaaatggaaaggaagtagttgctattaagttcatttttaacttgaaaactgaatataaagagcaaggacacatcaaatttatagataaaatgaaaaagggctatctggctgctgcaattccgtttagtgatgatggctcacactttaaatcacctgatcgaattaagcatttcaagccaccagtaaaggtatctccaaaacaaatcagcaccttagtaaattgcaaagaatttttactagattacggatatttcttaggtaatttagacgaggatacttctaaggtaatcatgagaactctattaactgaaaagttagataggcttaatgctcataagccgatagatatggattattacttctggttacaggcaaaacgggggattatcactaatagcaataatgataagaaggacgatcaggacacagacaatcaggattaa

SEQ ID NO: 45451 - DNA, 273 bp, Acinetobacter baumannii
atggctttaacgatgaatgacttgaaaacagtcgatgacttcaacgccaataactatggtgttgaaattggtatgaacgaacagttccaatattttgtgactgttaaagtaaatgatgttgatcacgccattcataccgcatcaggaaaaattcgattcacacggaatttaccctttttgattcaagagatttgttcaatgtgcagcaatgccaaaacaatatctctaaactttgaaggcaagttattcgtactggaaaactcatctacatag

SEQ ID NO: 45452 - DNA, 321 bp, Acinetobacter baumannii
gtgtataaaaaatttattttaggtttaactttagctagtgcatctgccttagttgcagctaaagatgaaaattatggctgtcgcgcttttatgtgctttgctggcggtcttaatgtttctgaatgtcagtctacaattagtgacgtaaaaaaagatctggctaaaggtaaaggctttcctcactgttcattcgtcagtagtaatcaagacggatctgttggaggtggagaggggcaacctaaaatttcatcctatacacataacaaaagagtctatctttatgtagatgacaagttagtcactacagttaaaaagtcctga

SEQ ID NO: 45453 - DNA, 249 bp, Acinetobacter baumannii
atgactgaagaaacaaaaacaaaaacagaagaaaaggtactagatcgcagaaaaagatatagaaagaagcctactaccaaaactccactttcagtttatttcaatatggatgttcctgaagatgttgaagcactggaagccttggaatacttaaaagatatttatggtggggaaaagcaaggaaaaagtgtagcagtcaaagaagttataagaatcttctataaacaattacaagaaaaaaaagcctga

SEQ ID NO: 45454 - DNA, 525 bp, Acinetobacter baumannii
atgatcaaattaaatttccgtttagcagaatttagtgacatcccaacactagtagagttgattaatcagtcatatagagaacaacaaggtagaagctggactactgaagttgaatatgtaaaagggcaacgtattaataaagagcaattgaaacatcaattagaattacctaattcagtattattaattggagaaatagattcttcaaaagttgttacatgtattggtcttacatttcaaagtaatacagttgagataggaacattttgtacagatccgcatgttcagaatatgaaaatagggcgttgtgttttggagtacgctgaacaatttgctttacacaaagtacctgaattggacagcgcaatcatgtatgttttaaatgtgcgttcagagttaattgcttattatgaaagacgcggatatataaaaacaggtaatcatgaaccatatccgcttgacgcaaatgttggattaccacttataccaattaaactaatcgaaatgaaaaaggacctcaaatga

SEQ ID NO: 45455 - DNA, 1773 bp, Acinetobacter baumannii
atgataactaatcgacaaaatgtgcaaaataatactaatacatcacctcatccaattacccaaaatacacttattgatcggtttagtcctatttactggagaatagacggcccacaaaccatgtcttttgccattacaaattatggaaatggatttgaagcatcttttagatcacgtatgacaaatgacttggtagggattagctgggattcttatgatacgaaagatcataaatttttagcatatgaaaccaaatatagttatgcaggggtagtttgggattttgatattgaattatcggcttctatgcccgtacttaataatccaagtttaacgccaactttaacggtgtactatcatgacaatggcgtagataaaattgcatatatcatcttatttaattatgcaaataatccttcgtcgcgaacggcgcacattcatattaactgggatacagttaaagctggtttttctgctacagatagctttccggtaaccaatattcaatgtatctcattttcaggctttactagccattataacggtcagtcagctacgccgttaagccagccggaagatggttatattcgtattaccaattcagtcgtgactggaacaaatgcaaagctaaatctgagtcgtgttgttgtacctcagcacaattatgggatctgtaccagctatgatgaccattatgacttgaacccgcagcgcctagtcaacaatatggtcgctttgggatatcaggggttggtaaaccactattgtggaatgtcgcattatcccgaaatggcatggaaaagcgatattaataaatggcaaataccagatacgttggtaacaggtgaggcactcgtcaacgcatgtacccgaaaatggcatgagaaatatgcccaagctctacataatgcaaacatgcaacccatttttggggtaagttttgagatgtattcacttggagcaaatgagttttgggcacagcgtgattggaatagcaatttaggtaaaacaggttaccaaccaccgagttatttctttagcttaagtgatcaaaatgctttggcttatttgcacaaagtttttattgagttcgcagatacaatggttgctggcggctgtaatgttaacatgcagatcggtgaaccttggtggtggtataacacggacacgaacctaccttgtgtgtatgactatccaacaaaattagcctttaatgccgatacaggactatatgcgccagacctaggcacaatctatgaggctatgaataaaacaggtacaccgtatgatgagtttaaaacttggttaagaaataaattaggacagacctgtcaaaatattcgagcggccattaaggctaaatatgcaaatgctcaagtgtgtcctttaatatttttcccgtccattcgttctccaatacaaaccctagcaacctatatcaactatccaagccagcactactcatatccaaattttgattacatcatgactgaagcctatgactggcttttagaagctaaattagatttagctcatcaagctgtttctcagataccaactcaagatttaggttatccggcaaataaagttgcttatttatctggatttgtaccagatgcatctattgcttatatctatggattcgacaaaaacaaaccttatcggacaccaatttggcagaggatttttggcgatatgaaaaataacgtatctcttggcctaatgaagcagtttatctgggcttatccgcaagtcaagcaagttttttcatag

SEQ ID NO: 45456 - DNA, 1164 bp, Acinetobacter baumannii
atgtcaaaattaatacagcctatcatttttaaggctttgtttatatttactcctcttctgtttgtatcaataggttgtagtgaaacgctatattcccaaacaatcccatcagtaaagtcttcttcagaaaatatcgactatccagagatcgatacagcattaggagaaaagttacaaccgaatgaggacgtaatagctcatcaaataactcaagttattgagaagtcgattcgtgaacagtatacggcgggaaatgctttgcgtgatgcgcaccctaaagcgcatggatgtgttcgtgctgaatttcatgtatttaaaaatataccagctcaacttgcaaaaggtatttttattccagataaaaactatgaagcatggattcgtttttcgaatgcttctaatgatgcttctagagcagatattgaaaaagacgcacgtggaatggcaataaaaatcttagatgtatcaggtcagaaaattttagaaaatgaaaaagaagctacaactcaagactttattatgattaatcaccccgtcttttttgtaaatgacgggcaaagatacctttcttttatgaacgatctaaatagccataatatgatcagaaagcttcatatgccgtttgctttaggttttaaaggtaccatgaatgctttaggtgcgcgtaattctaaaatttcaaatccattatatacatggtactggtctatggtgccctatcaattaggattaggtgttgaccgtcaggcggttaaatactccgtaagaaattgctctactgtgtctgcaactctacctgatcaccctagccataattttttacgagatgctttaaaagatacattgcaaaagcaagacgtgtgtatggaatttcttatacagccaagaacttcgactaaaatgctggttgaagatgcaatgaccgagtggaaagaaaatgaagcacctttttatcaagttgcgacgattcatattccaaagcaaagctttgatacacctgaacagaatcaattttgtgaaaatctctcttttacaccgtggcatgctttacctgagcataaaccgcttggcgcaataaatagaatgcgtaaaattatttatgaaaatataagcagagttagacacgatatcaactcagctccccgacaagaacccaaaaactaa

SEQ ID NO: 45457 - DNA, 597 bp, Acinetobacter baumannii
atgtctactttcttagataaaattaaaaaccgtcgtactatttatgcaattggtaaaaatgttgcattagatcgcacaaaaattgaagaaactattcgtgaagcggttaaacatagcccttcagcgttcaactctcaatcttcacgtgttgttactctttatggtgaatcacatgctaaattttggaatttagttcgtgaggcattacgtaaaattgttcctgcagatgcctttgccggtacaaatgcaaagattgatagcttcgttgctggtgttggtacagtactattttatgaagatcaagctgttgttaaaagcttgcaagagcaatttgaattatatgcagataacttcccagtttggtctgaacattcaagtgcaattgctcagtttgcgacttggactgcgctttcagaacttggtttaggcgcatcgttacagcattataacccgattgttgatgctgatgctgctgaagcatttgatgttccagcaacttggaaattacgtgctcaacttgtatttggttctgttgaagcaccagctggtgaaaaagcatttattagcgatgaagatcgttttaaaacattcaactaa

SEQ ID NO: 45458 - DNA, 1470 bp, Acinetobacter baumannii
atggttgcgattgtatcaggcaatggtttgggtttatttaatagctcattaaatcagcttggaaaacgaggggtacaaggaaatgcaagctttgggcaggcccgaattgaagactatattaatattgccgaagggaatctggtcattcgccagcagggctataatctggcagcaacaggccaggatatccaatcagtcctgacctataattctaaaggtttattaaataataatgcccagtggagcggggagtggagcagacgactgagtctggtcggtaacctaaatgaagcgggcagtaaaattattgtcactgccgaagatggccacgaagttacttttaacttttcctctgccaataattatatttctaaagaaggcgatggagcgtacgataaactcaccatttcaggaacaacctggatcgttaccgatggtaagacgcttgcccgagaaagctatacgtatgatgcggccaaaaagacaggccgtttaaccagtattcaggataataatggtaccaacctggtatatagctatgacagcacagaccgcctgatttctattaaggataatagcagtttaaatgagctgatctatcaatatgacgggaccagtaaccggattaaaaggattgatactaaagtcggtggggtggccagccagaatgtctattatgaatatgacacggccaatcgcctgagcaaggtcattactgacctaacaccaagtgataaccagattagcgaccagcaggtctataccaccacttatggttatgatggcagctcttcgcgtattgcaagtatcacgcaaagtgatggcagtagcgtacagtttagctatgaactggatacggtaaaaaatgtttaccgggtaaaaaccgtaaaggacagtcagggaaccaccacgtttagctatgctgccaataaaacgaccgttaccaatagcttacaagaggtatgggaatatagttacgatgccagtcagcagttaaccagcatcaagaatgccaatgccgaggtatcaagctttacctatgatgcggatggcaatgtactgaccattaccgacaatgaaagtaacaagcttacctaccgctatgatagtaatggcaacttaaccgaagaatatggcccgactggtaaagcgattaaatatagctataccaataatacccagcttgccactgttaccgaatatcttacgctcgcgattaaggatgccagtgggaactgggtcttaccaacgacaggcgagaccaagagtacccagtatctgtatgatgcccaacgcctgcgctttgtaattagtgctgaaggtgcggttttagaatatatctataatgataagggccaattggtcagtaaaggcggcaactatcaggccaaatatgccagtaccatgacgtatgcggctgtggatacctgggcaaaaaaaacagctaaaaaaagagttgagcagctatga

SEQ ID NO: 45459 - DNA, 1455 bp, Acinetobacter baumannii
atgttaacgaatcttcgagaacaatggttctctaatgtccgtgcagatattctttctgggcttgttgttggtttggctttaattccagaggcgattgccttttcaattattgcaggtgtagatcctcaaatcggtttatatgcgtctttttgtattgcggttattatttcttttgtaggtggccgtcctgccatgatttcggcagcaacgggtgctatggccttagtcatgacgaccctagtgaaagaacatggtcttcagtatttattcgcagctactattttgacgggcgtcatacaaattatagtaggatatcttaagcttgctaagctcatgcgctttgtctctaaatcggttgtgattggttttgtaaatgctctcgccatactcatttttatggcccagcttccagaactagtcaatgtaagttggtacgtctatctattagtcgctattggtttagcaattatttatctattcccttatgtaccaaagcttggaaaaatttttccatctccccttatatgtattgttatagtcacattacttgccttctttttaggccttgatgtgcgaacagttggcgatatgggagcattaccaaatactctacctatttttttaattccagatattcctcttaatttagatacacttcttatcattcttccttattcattggcgttagctgcagttggcttacttgagtcgatgatgacagccacaattgttgatgaaatgacggatagcccgagtaataaatttaaggaatgtaaaggtcaaggtattgccaatattgcctcgggttttatgggggggatggctggatgtgccatgattgggcaatcaatgattaatgttaaatcaggcggtcgcacacgcttatctactttatgtgcaggcatattcttgctgattttagtagtatttttaagtgattggttgaaagttatccctatggctgcgcttgttgctgtcatgattatggtatcaataagtacttttgagtggcgttcatttacccaatttaaaactaatcctaaaagtagcaataccgttatgattgcaacggttgttgtagttgtagctactcacaatctagcattaggcgtattgactggtgtactactttccgcgcttttcttagccaataaacttgaaaatgatatacaggtaataagttcattagaaggcaacgctcgtttatatgatttaagaggacaaatcttttttagttcttcagatagattcatgcaaagctttaactttaaagaagacgtaaaagaagtcattattgatttgactcattcacatatatgggatgtcacttcggttgcaatgcttgattcagcagtagaaaagttccaaaagaatggcatacaagttactgtacgtggtttaaatgaagccagttcaatcatgattgacaagtatggaacacatgcaaaaatttaa

SEQ ID NO: 45460 - DNA, 1179 bp, Acinetobacter baumannii
atgaatattcgccaagtgtctgctatttgtctttcaatagcagctactcattttgtgtatgccgcttcaaatgttgtaaatcctgtaaatgattcttcccaagcaaaaggaattattaaaaatcaatatattgttatattaaataaggatgcaggtccttctaaagatttcgcacaaaatattgctaaacaacatgctggtaaagttttacaaagctacgatactgttcttaaaggttttgcaatttatttacctgatacagcaggggcagcctttattgaagcgatgaaaaagaaccctcatgttctttcagtagaaagcgatacaatagtaaatattgatgcaactactcaaagtaatccagattggggactagatcgtatagaccagaaagctttaccattaaattcgacttattcttatttacagaccggttcaggtactacggcttatatcgtggatactggtatattatctagccaccaagagttttcaggacgtgtgttaagcggttataccgcaatatctgatggcaatggtacaaccgactgtaatggacatgggacccatgttgctggaacagtaggtggtacgacctatggtgttgctaaaaatgtcaatttagttcctatccggattttggggtgtgatgggtcaggggcctcaagtaatgttattgctggtttagactggatattaaaaaatggtaaaaaacctgcagttgtaaatatgtctttaggtggggcaacaagttcttctttagatagtgcagtggaaaatttatataataatggttatgtcatggtcgtagccgctggcaattcaaatacagatgcatgtacatcttctccagcaagagtaagtaaggccattacagtggctgcgacagataataccgatactcgggcaagctattctaattatggaagctgtgttgatatttttgcaccgggtagccaaattaattcttcttggattggaagtaatacagctaccaagatattaaatggtacttcaatggcaaccccgcatgttgctggtgtagttgctgaaatgcttcaaagtacacctacggcttcacctcaaacgatctctaccaatcttttaaatcaagcgagcagtaacgtagtaaaaaacccttcaggtagcccaaaccgcttgttatataaatctccttaa

SEQ ID NO: 45461 - DNA, 624 bp, Acinetobacter baumannii
atgtctacgcgaaaaccccgtcaggcacgagccaaagtcactgtcgataccattattgaagcaggttttattgctgtagcattgcatggaccaagtggtaccaccacacgtcatattgcagaaattgcaggggtgagtgtggggtcactctatgagtattttaaaaacaaagaagaaatctacgatgcgatgaatcactactttgtgagtgaaattttagacatgattaaagaactaactcccacaattttagagttggagttagaacctgtcattgaaatgattttttatacgttcagtgatttattaaagaaaaataatgaccgttacttaaccgttttacgttatgcaggtgagttgcaatacgataaatatattccaaaaattgaacaggctttaatggaagttatcatgaagtatatgatgcataatcctaaatatttaaaaattaataacttacctgtaattacctatatttgtattaatagcggtatttttaacgttgcaaggcatcttattttacccaacccatttattagttttgatgaaatggtgcaggggctaaccactatgattatgagttatatcaataccgaaatggcacgctcagaagatcaatcataa

SEQ ID NO: 45462 - DNA, 723 bp, Acinetobacter baumannii
atgtttgatatgcgtttatctcatgagcgtggtgcagcacatcatggctggttacagtcaaaacacacgttttcatttgcaaattattgggatccgaaacaagttggtttttcagatttacttgtaattaatgacgatacagttgctccatcaaaaggctttggtactcaccctcaccgtaacatggaaattatttcttatgtgcttgaaggtgcgttagaacataaagactcaatgggtacaggttcggttattgtgcctggtgatattcagttaatgagcgcaggccgtggagttgcacatagtgaatttaaccactctgctcaagaaaacgtgcacttcttgcaaatttgggtagttccaaatgaagtgaacacaacaccgggctatcaacaattgcatatttccgaggaagacaaacgcggtaaattgcacttgatgatttcaccaaaaggtggcgaaaaaactttatccatcaaacaagacattaatatttattcaggtctttttgatggtgaagaaacagcagagtttgcaattcctgaaggtcgttatgtttacctacatgtggcaaaaggccgtattgatgtaaacggtaaaacctttaatacaggtgatgctgcgcgtattcgcgatggaggcaagttatcatttaccaatggtgacaacgctgagattctgatttttgatatgcgtccagaagaagttccaaccatgccataa

SEQ ID NO: 45463 - DNA, 396 bp, Acinetobacter baumannii; identical to SEQ ID NO: 45286

SEQ ID NO: 45464 - DNA, 267 bp, Acinetobacter baumannii
atgacgaataattttaatgctgaacaggcaagaaaaaaggcgaaagacgtaaaaatagatcaagcactattgttagaaaaaattttatctggaaccgaggaaatctcgaaagaaggtaagcgacgggcagtttttcaatttccaatagatgctttgcatcctgaacatatcacacaggtagaggaagagttaaaaacacgaggttttaatgtctcaaccaatattgagcaatcaggtacaacagtcaatattgaagtcagtttctaa

SEQ ID NO: 45465 - DNA, 963 bp, Acinetobacter baumannii
atgaatcttgtaatcgttgaatctcctaacaaatgttcaaaaattggaagttatttaggatctgattttaaagttgtggccagtgttggccatgttcgggatctaccaagaaaaggcttaggtattgatatagccaatgattttgcaatggaatattcatttattcctgatgccaaagttaatgacagaacttttgacggtggcgaaaaacgtattgaaaaaataaaagcctttttgaataaagcagacaagatttatttagctaccgatccagacagggaaggtgaagctatttcatggcatttaaaagaatgtttaggtctggaagatggtcaatttgaacgaatagaatttaatgaaatttcagaaaaagctattaaagatgccattaataatgggcgtggtttagattatcagcttgtatatgctcaagaagcacgtagggctttagatcgcctggtgggctatctagtttcccctattgcatctaatcttatgggtcagccttcatctgcggggcgggtacaatctcctgctgttttaatcgttgtccttagagaaatcgaaatccagaaattcaaagttactaaccactttggcgttaatttgagttttgataaagagcctaaaaaatggatctcgcaatgggttacaacagaatttgtaactgaggatcagccttatgttttagatcgttccttagctgaagaagttgcaaaaactaagaaagttaaagttttaaactgcactgaaaaaacagagtattcaaatgctccttctcctttctctacagccctacttttacaagctgctagtgtagcgttaggctttagccctcaacaaacaaccaaagcagcacaggcattatttgaacaaggggcaattacttacattcggactgacggcctaaacatagctgatgaaagtgtagaagaaatctttgcttatgctagggcttgttga

SEQ ID NO: 45466 - DNA, 204 bp, Acinetobacter baumannii
atggctataagtttaaataaatatggaaattttttaaaattttttctagttatttcatgtgtttatcttgtgtgcttcatgccacaagatgcactgcttttagaaatccttgtagatttcactaaatttcaagtagttgctttcttatattcatcttttctttgtgggctttcgagtttcctaaatttcacaatttggaaataa

SEQ ID NO: 45467 - DNA, 279 bp, Acinetobacter baumannii
atgactgattttataaatattgatcctgattattctatttcagaggtggtactagaggaatctaataaacaaggatttattaaagagttaattattaatgaatttgagggtggattttttatcacagcaaaactggcatggtcaggccaaaaggtttggactttaacaaccagacgagaaaaggataaagctaggatctttaaggatctgactaggcttaatgatttcttaaaagaaaaaatttatacagaagaagtaaaaataataagaatcaagtaa

SEQ ID NO: 45468 - DNA, 1329 bp, Acinetobacter baumannii
ttgagtgcagataagaaaaaaagtgaatatggtgtaccaggattttcattacaaaatcaatcttttgctgattcttatgaaacattaccggttggtgtgaaaatagatcaaaatcgttttgtattaaattccaattttatccaaccaatttcctctgcagaagagataagtttgaattttcaacagctttctaataaatctggagaatatgttggtactgcaaaagctaatgagtataaaattgataatcaattaattgaattaataatgaaacagtcatcctttaagggattagatgggatacttggttttagccttaaaaataggaatatcgaaggaagtggtagtcagcgctatttacctaatgtaagtactattagtaaagctatattcttacaagaagaattaaatatcaaacaatttactttaaatacgggctatcgttttgaaagaattgaacatgagcttcaagataatgattttaaactagcaagaaatgctagtaattcaagaatagaaaatagaaaatataatttaaaccaatattttatcggaggagaatataaggttaataattttataaatttaaaagttgattatggtatttcagaaagagcacctgaagtgaatgagctctattcaagtaatgttcactattctgttatggcacaagaagaaggcgaccagaatctcaaaccagaaaaatctaaaagtttagagttaggtatgtttttgaattggaataattgggtcatgcaacttgttgggtatcaaatggattttgaaaattatatgtatttatctcattcaggtgttgctgtgcaaaatcgattacctttaaaatactggaaacagacagacactgacgtcaaagggtttgaaattgatttaatttatgattttaatctagctcatattgggaatattaaactaggtggtttagctgattttgttaaaaataaggctgttaatcctacaggtataaggttagctaatgatggagtttacctaccaaatatgcctactaatcgttatggcatgtttcttgagtggagaaatgattcttggaaaggtaaaatttcaagtatttactacgatgagccaagatatctaggtaagaatgtaatacaggaagttcctttatctggttacaacttacttgaatttaagatagataaaaaattaaagattaaaaatgcttcatttgatatatttttaaatggtacaaatctgctgaacgaagaggctagaccacaaaactctcctctaaaatatattgcccctctaccagggcgagcatttcaactggggataactatgcatatttag

SEQ ID NO: 45469 - DNA, 771 bp, Acinetobacter baumannii
ttgtttgaactaaacttatgtaagtacatttatgaagaagaaaaaaaagaaattattgatgaaatttattttgaaaaaatatgcgttgataataataaagttgtagtaagtaattttaataatttgcaacaggttgaaaagtctttggagatttttaatagttatctcggaaaaaataattattgctattgttatataatgattgaatctcggcataagctcactacagaattaaaagaaaataatatagcaaattgtttaattctttctgaaaactttacttttaatggtgaagaactctctattgaatttgatccagattttgatcttataacaagaaacaacttagaagattttgaaaaatttaaaaagaaagaagagctattgattcgtctttcaaatgaaactataggtaaaaagagatggctaaattttacaaagctagaaaaaaattgctggttagattttgcttattttagaatgaacaaaagaggggaacctttatcattaaatataacagttgatggtaaatacctactgtgtgaagaagatgtgtattgttattttggagaggaggtttatggggtattaggatacttaggttataactttaatgcatttgctgatgtactgcgggatttgcctttaaaagttaaatggataaattttcagtactctaaagataatttcgagtcgaaagaagatttttatcatttagatgattttattgaagtgttaaaaaaatactcgtcattagaaatttcatattag

SEQ ID NO: 45470 - DNA, 753 bp, Acinetobacter baumannii
atgagttctgaacttacagaagagtatattttttatattgaaataagtgaatttagtgagtttgatgatgatgtaactatttggagcggatatctttcagaaaattgtgtaatcactgatactcaagttgtttttcatggtttttttggtgagggtgaaataaataaagataaaaaaagtaaaaagtataagtatgatatctatggcattaatttattcttcttaaaagaaaataacgaatatttcggggttttaggttctagtattgaatcttttgaagtgaaagataataaattgatattaaatttatgcgaagaggagacttattttgatgagtttaaatttgatttaattaagaaatatcgaaaaaatcagcttagattacaagattggtgtaatttaaacgaagaagagaaaaagaagtggatagaagtttcgcattgggttcaacagtacaagcctctagacctagtaagttcaatagttatagatggtagaaatattaagtcatttaatgatttcttatgctgtataggtgaggaagtgaatggattgatgggctactttggttctagttttggtggtttgtcggatagtctcactggtgggattggttgtataactgtacctttaaacattacttggaagtactttgaagaaacaaagtattcttttaataactatgataaccctgatgattttgaatacttaattgaacttttaaacgaaaaatctactttaaatattacgtaa

SEQ ID NO: 45471 - DNA, 1566 bp, Acinetobacter baumannii
atgttagatcaaaacattaaaactcaattaaaagcttacctagaacgtttagaaagtccaatcgaattagttgctgctttagatgaatcagacaaagctgctcaaattaaagaattagtaactgaaatcgctgagctttctgacaaggtaacagcccgttttgacggtaacaatacacgtcgtccaagctttggtgtggctaaagcaggtgaacagcctcgtgtgttctttgcaggcttaccaatgggtcatgagtttacgtctttgatcctggctctgttacaagtgtctggctatgcacctaaagtgtcggatgaagttttaaatcagattaaaggcttaaacctcaaagctaactttgatgtgtttgtatcgctaagctgtcataactgtccggatgtagtacaggcgcttaacctgatcgcgatttataacccgaacaccacagcaaccatgattgatggtgcattcttccaagacgaagtggaacaacgcaaaatcatggctgtaccgatggtcttccaggacaatgagcacattggtcaaggtcgtatgacgcttgaagagattgtggcaaaacttgataccaattcagctgaaaaagacgcagcagcactcaatgccaaagatgcgtttgatgtattggtgattggtggtggacctgcgggtgcaacagctgcaatctatgcggcacgtaaaggcattaacacaggtatcgtggctgaacgctttggtggtcaggtcatggacaccatggacattgaaaacttcacttctgtgcaaaagactcaaggtcctaagtttgctgccgagatggaagcacatgttcgtgaatacgatgtggatatcatgaacctgcaacgtgtcagcaaaatcacgggtgcagatcaaacagcaaatggcttggttgaagttgaacttgaaaacggtgccaaacttgaatcgaaaactgtgatcctttcaacaggggcacgttggagagagatgaatgtaccgggtgaagctgaataccgtacccgtggtgtagcgtactgtccacactgtgatggtccattgttcaaaggcaaacgtgttgccgtgattggtggcggtaactcaggtgttgaagcggcgattgaccttgcaggtattgttgagcatgtaactctggttgagtttgacactaaacttcgtgctgaccaagtcttgcaaaacaagttaaacagcttgccaaacaccactgtgattatgaatgcgttaagtacagaagtattgggtgacggttcacaagtaaccggtcttaaatataaagaccgtgcgactgatgaagagcatgtggtcgagcttgcagggatctttgtacagattggtttacttccaaacactgacttcttaaaagacagtgaagttgagctaaccaaccgtggcgagatcattgtgaatgaccgcaatgaaaccaatgtaaaaggtgtatttgctgcaggtgactgtaccactgtaccttacaagcaaatcattattgctacaggtgaaggcgctaaagcatcactctctgcgtttgattacatcattcgttctgggcagtaa

SEQ ID NO: 45472 - DNA, 459 bp, Acinetobacter baumannii
atgtcttatacaacagtacatatgcgtcatacgagtagtgggtcaagtagttctagagatgccaaagatgtctttatatctggttgccgtaatgattttgattttagtcaaattactcctgaaaaaatcagtaaattaagtaaagaaaatcaaaattattttcataaatgtgatgatgcgatcaataataaattgtcagtagattcattagtttattactcatcatttattttacctattatttgtatccttatttttataagaataggtaaaaagcattatcgaattgctgaagaaaaaattaagaatgcaaaatacctggtaatttttgctagaaaaccagaaaataatccctctaattcaatggagatcgcactagtaatcggtggggtactggcagcgctaatctatatattaatttatattgtttatattattatagtagaaattaaatattaa

SEQ ID NO: 45473 - DNA, 882 bp, Acinetobacter baumannii
atgacgcttaaacaactaaaagcttttttggcccttgcgcgtacactcaactatgccaatgcttctttagagttacatctcagccaatctgctttaagtctcaccatcaaaagcttagaggaagaattaggcggaaagctctttaaccgtaatacacgccgagttgagcttactcaagaaggcaaatcactcattccatatgcaaaaaaattactcgccaattgggatgaaatggaaaacgatgttaaacaacgctttaaactcaatcgtggaaccttaagtattgcatctatgccctttgtgacccatgcaattttgccagaggtgattcatcaatttttagcagtccatcccaatcttaatttttcaattcacgatattccaaatgagaccattatagaaaaagtacaagatggtatttttgagcttggtatttgttttgaacctgatctcaccgaaggtttagagtttaaaccgttgtttgaagaagacttcttagctctattacctaagaatcacccactcgctcaatcatcttctattacatggcatgagctttgttcaaatccatttgtaaccttgcaaaaaccctcaattgttcgatatttagttgagcaaaattgtttgcgaaataatataacgcttgatttaaaagttgaatgccaccaaatttcatctctttcaagtttcgttgcttatggaattggggtaagtgcaattccaaggcattttgctaaacacattgataaagaacataacgtactgattgatttaaaagatgaagccattcataaaacagtaggaattgtttataaaaagaactttgaaatttcaaatatttctgctcaatttattgaggcactggttcaatataaattttaa

SEQ ID NO: 45474 - DNA, 627 bp, Acinetobacter baumannii
atggcggtaaaaaatcctaaaggtaatactggaaaacctagtaaccaactattttccccaggcggtgataataaaacacttcataaagtttcccttagcagttttaatatgagtgcttataagactaccttagaagactttaatatttttacaaaagcaactggacaaattaagagtacatataataaacgatatagtgcaagcattgctcatgaaatagcaactggtatggcgtggcaacaagccaaagattattgccaatggcttggacaacaagtggatacatccatggatttacccactgaatcgcaatgggaatatatagcccgaaataaaggacaatatgataactacaggcattcacatgacttacaaactgtcgcgaatattccggttataggtcaaacaccaccaaatcctttaggtttttacgatcttgttaccaataattatgaatggatgaatgattggtacgataaagattattataaacactcacctagtgataacccaacaggactccaaatgggtacagaaaaagttttaagaggtactctagcaatgggagccgataacttaatgagagcctgtaaattattttgtgtaagttccattttttataaatga

SEQ ID NO: 45475 - DNA, 468 bp, Acinetobacter baumannii
atgccacaatatttaatgattgctgaaaaggtgtataaaaaaattaaagaagatgatcttttctctaatactccgaccgagcatttaaataacttaataggtgtgattcgaaaggaaatcaaaggtacaaagtttaagcttaaatataattttattgactttgatgaatgtttaacaaagccactagatgaatgtgccgtaaaaattgatattagcctcatgcctagtcataaaaataaagatgaatatattttatggttagctggatttatagaacgaatgacgacaggcggagaaacccatcttccacctatctcaaaatttattccgcccgattttaagtttaattgcgaatttgataacgctaagacaccagcaaaatctacacatccagatgatgaaggtgaactgatcattaactattttaaatctgaagcttttatgaaaattataaacgaagaaaaataa

SEQ ID NO: 45476 - DNA, 300 bp, Acinetobacter baumannii
atgtgtttaacattaactgaagctaaacaaaaacttagagcatttgctagagatactagcaaaatcaagttaactgcacatgcaaaagaaagaatgaaagaacgctgtatctctatgaagcaaattatttgctgttttgagcatggagatattactgaggggccgtacccaaatactcgtggtgattgccagttaaatgtttctgttcgcactgcaggcgaatacataacaacagctgttgcaatcaagcagagcgagaacggtgaattctcagtagtagtcactacatttagagagtag

SEQ ID NO: 45477 - DNA, 459 bp, Acinetobacter baumannii
atgtatcactatgaagaatgcggtctgagcaatatttggctgcgcaatggatttacaattgaaaatgatgaagactatggtgaactcgtatctattgaatctgttcatgagcttcataatgccattgggttgttcttaattacgcaaaagcctgacttgaatggtgaggaaattcgttttttacgtaaagaactaaacttgtcacagaaaaatcttgctgggcttttaggagtcagtgagactagtattagacattgggaagctgatcgcggtttaattggtaaacctactgagctattacttcgtgcattatataaagagcatgttcaaggtgatggcaaactaagaaatatgattgagtcattaaatcatcaggaacgaactttagtaccaagtgaaattagtttttcatatggaaataaccattcatggcatcaaaccaattgtgaaatagcttag

SEQ ID NO: 45478 - DNA, 1191 bp, Acinetobacter baumannii
atggctaaagccaagtttgaacgtaataaaccacacgtaaacgtgggtacaatcggtcacgttgaccatggtaaaacaactttaactgctgcgattgcaacaatttgtgcaaaaacttacggcggtgaagcgaaagattactcacaaatcgactcagcacctgaagaaaaagcacgtggtattacaattaatacatcacacgtagaatacgattctccaactcgtcactacgcacacgttgactgcccaggccacgccgactacgttaaaaacatgatcactggtgctgctcagatggacggcgcgatccttgtatgtgctgcaactgacggtccaatgccacaaactcgtgagcacatccttctttctcgtcaggtaggtgtaccttacatcatcgtattcttaaacaaatgcgaccttgttgatgacgaagaattacttgaattagtagaaatggaagtacgtgaacttctttctacttatgacttcccaggtgatgacactccagtaatccgtggttcagctcttgcagcgcttaacggtgaagctggtccttacggtgaagaatcagttcttgctcttgtagcagcacttgactcttacatcccagaaccagagcgtgcaatcgacaaagcattcttgatgccaatcgaagacgtattctcaatttctggtcgtggtacagtagtaacaggccgtgttgaagctggtatcatcaaagttggtgaagaagtagagatcgttggtattaaagatacagttaaaacaactgtaactggcgtagaaatgttccgtaaacttcttgacgaaggccgtgcgggtgagaactgtggtatcttacttcgtggtactaagcgtgaagaagtacaacgtggtcaagtacttgctaaaccaggtacaatcaagccgcacactaaattcgacgcagaagtatacgtactttctaaagaagaaggtggtcgtcacactccattcttaaatggttaccgtccacagttctacttccgtacaactgacgtaactggtgcgatccagttgaaagaaggcgttgaaatggtaatgccaggtgacaacgttgaaatgtcagtagaattaatccacccaatcgcaatggacccaggtctacgttttgcgatccgtgaaggtggtcgtactgtaggtgctggtgttgttgctaaagtaactgcataa

SEQ ID NO: 45479 - DNA, 945 bp, Acinetobacter baumannii
gtgactctaggaaccaccaaaactacactacaaagcagttatgcctatagcaaacgaggcgagctgaagagtaccattttagacagcaccggcttaaaaaacactacgcttaagcagtatgatgcctatggccgtgtgatcacggaaaccgatgccaatggcaatgttacccgctttgattacagccaggatcagggtcgcaccattcaggtgacctcagcggatcaaggggtcaccaaaaccacttatgatgcctgggggcgtcagcttatcgttaatcgcaacaataacctgaccagttatacctataatgatcaggcgaagaccctaacggttaaaagcccggaaggtttgcagaccatcacccagtataatgagtttggtgatgtggtgcaggtgacacaggccaatcagggcaaaagcacttatttatataatgataatggacaaaagaccaaggagaccaatgcggtaggggcgaccaccaattatgtatatgacaagaaaacagggttattaagcgaaagcaccgatgcggtcggggtaaagaccagctattactatgacaatgccaaccgggtcatctcgcagattgttacattatctgcaaccgagagccaggaaaccagctatagctatgatggtttaggccagcgtcttgaggtgatcgaagccaagggcagtgccaatgaacgggtgacccagtatggctatgacaaggccgggaacctgatttcggttacccaggatgccaagggccttaaattggtgaccagctatagctatgatgagaccggacgtcaggtgaaggtaaccgataagggcctgaccacggtgtatacttatgatgtgctgggacgacggatttccgaggtgaaagacccgggaggactggctttaaaggttgagtaccgtacgatggggactgttctaaattttgtgtaa

SEQ ID NO: 45480 - DNA, 522 bp, Acinetobacter baumannii
gtgagcaacaatgccggtaatggcgattatggtctcgctaagctgctcaaagccggttcaattaaaaaagtgatttgctctttcccacgtcagtctgactcttatgtatttgatgaactgtaccgtgccggaaaggttgagcttgaactggtaccgcaaggcaatctggcgtgccgtattcaggcagcaggtatggggcttggggcggtgtttacacctactggctttggaacacttttagctgaaggcaaagaaacccgtcatattgatggtaaagactatgtgcttgagtatccgatcaaggctgactttgccctgattaaagcttacaagggcgaccgctggggtaatctggtttaccgtaaatctgcacgtaactttggcccgatcatggccatggctgctgatgtcaccattgcccaggtttctgaagtggttgagctgggtggattagatccggaacacatcattaccccaggtatctttgtacagcatgttgtacaagtacagcccgcacagtaa

SEQ ID NO: 45481 - DNA, 786 bp, Acinetobacter baumannii
atgattgaagaaaagtatattcagttatctcagtatagttatgcaaaagctaatttatctatgcgtgtacttagagcggtctatcgtttttcaattatgtattatcaaaataaaaattgtgaagtaattataccaaagataaacccggttaatttgttaaagaaaaaacagctctgggaagaaattccacctcgaagaaactatatcgatgtggataatttaaccaagtgggtgcaagcaattattgaatataaaggtaggggacaggaaaatgaaacaaataaggattttttattaacacttatattaacagggctttttaggaatgagtgtgaatctttacattggaaaaatatagatttagtgaaaggaactctgtcttttataaatccatacaataatgtgtactataaaatttatatgggaaactttctttggcatctgatgaaaaaacgaagaatgcaaaataaaggagagtgggtttttccatctgtaaaatctgaatctggtcatattattaatatttcgaaatttagaaaaaaaattaatgagcaatgtaatctttcttttacttttcaagatctacgtagaacattttattttgtgttaaatcatttaattaataaaccattagctagcaaaagaacagatcagtatgaagaaaagctggacgttaagaatattgctcatgttcaggatatacgtaatagaatgaacaaggttgagcaaattattcttggtccctatcgagatgaacttattaaatctatcaatattaatctataa

SEQ ID NO: 45482 - DNA, 684 bp, Acinetobacter baumannii
atgcgggttttgtatcagtttcctttgtctcattattgtgaaaaagctcgctggttattagaccataaagaacttgattacgttgcacataatttgattcctggatttcaccgtgcttttgcacaacttaaaacaggtcaaaatttgttgccgattttaaaagatgaccatcgctggattgctgagtcgactaaaattgcgctttatctggatgatacttatccggaacatgcacttttacgccgtgatgaacaacttagacagcaaactcttaaaattgatagtttggcagatgaacttggggtgcatgtacgtcgttgggcacttgctcatactttagctcaaggtgatcatgctctagagattatgatgggcgaacaaggctacttacgacagtttgagaaaatatcaaaaccgtttctcaagactctagtcaagaagaactataagcttgaagaagagctcgtaagtcagtcaaaaggacgcatggatgaacttattaatgagttaaaccactatttaattgagaaccaagcacgttatatggttggtgaccgcttaagcctcgctgatatttcagtatgttctatgcttgcacctttattagaaataaaaggtacaccatgggaaagggaagaagatggggaagtatcgcccgattggagtaattatcagaaatattag

SEQ ID NO: 45483 - DNA, 387 bp, Acinetobacter baumannii
atgacttgtaaaattcttgccttagtggatagtctaggcaacctcattaagtttcgattaatgcctggtcaatatcacgatttagtagaaaccaaacctttaattgaagatgttgattttcaagcattactagcggataaagcatttgatgcagattggctcatccaagaactcaatgaacgtaaagtgaaagtggtgatcccacccaaatctaatcgaaaagtaatgagagcctttgatacgattatgtataaatggcgtcatctcattgaaaactatttctgtaagttaaaagaatttaaacgtatagcgatgcgtagttgtaaaacagatacgagttttgaagccatgattcaattgtgcgcgagtttaattaactctcggtaa

SEQ ID NO: 45484 - DNA, 348 bp, Acinetobacter baumannii
atggatagatacatacttactgatgcccaatgggcaaaaatggaacctttttgcctaggtaaagtgaccgatcgaggtcgtagtggaaaagataatcgattatttttagaagcagtcctatggattgcccgtacaggcagtccatggcgtgatctacctgctcattttggtaaatggaataccgtctttaaaagataccgtgattgggtgaaagctggtgtatttgaaactatttttgcatctgtaaatgaagatgttgatttggaatacgccatgattgatggaacgattgttaaagttcatcgacatggccaaggtgcaaaagggggaccttcaaacagtctatag

SEQ ID NO: 45485 - DNA, 573 bp, Acinetobacter baumannii
atgtcaaaaagagaaacgattataacaacagcaatgaccctttttaatcagaaaagttatacctctattggggtagacaaaattattgctgaatctaaagttgcaaaaatgactttttataagtacttctcttctaaagaagttttaattgaagaatgtcttcgccgaagaattttagaagtccaaacttctttattagataaagttaatagtgcagatgacccattaaataaactgaaaagtatttttaattggtatatcgactggattaacactgaagattttagtggttgtttatttaaaaaagcaacgatagaagtcctgcaactctatccttctattaaaaaacaagtaaataaataccgtgaatggatttacagtttagttttatctatatttttagagttagaaattgaagatccaaaagtattaagcagtctttttcttaacattatagatgggcttattattgacgggactattaacaaaccagaaattaactctgaagaaacatggtcttatataaataaactcattgagcttgaaacaaaacaaaaatatgaagctgcttaa

SEQ ID NO: 45486 - DNA, 234 bp, Acinetobacter baumannii
atgattcaacgtatctctcatcatgatttagaacatgtatacgcaactgcggttaacacaattcaatctcaaatgaatttccaagatgcagttgcacagttagaagaagttgctcgtgctggtcacggtaaagctgctttgttcttagcagaactatactaccaaggtttccgtgttgaacgtgattccatgaaagcacaatactggcagaaactagccacgatgcaagcataa

SEQ ID NO: 45487 - DNA, 219 bp, Acinetobacter baumannii
atgttaaatacacctttaggcatatttgatttttctacggcacgttcgattgcctgcgctacaaaatctgctgtcgccatgtgtccactatgggctttcaccactacagaacaacctgcggccagtgccgaagcagtgtctccacccgcagttgagaatgctaaaggaaagttacttgccccaaagactgcaacagggccaacaccgattttaatctga

SEQ ID NO: 45488 - DNA, 318 bp, Acinetobacter baumannii
atggctttcattaccattttagggcttattccaacagcaactttatttgtacctctactgcgtaagccaaaagaactgttgaccagaaaattttggaaagatgcacatcgtggcgtcaacttaatttttagtccaaaagatggcgtatttggtagcaccattggtcagatttttgattacttacgtccagacttccatccaaatgatcatgacacgaccgaatatctggagtactacaaaaagaaattacttaacgagggcggtgcaattgcgccttactttgtgaaggaatttacaccaccagtacgcttgtcttaa

SEQ ID NO: 45489 - DNA, 408 bp, Acinetobacter baumannii
atgcttgaagaatctgagcataaagatattgcttatgatgtatatcaggttttaaacggtaattatccgttacgggcaacgggctttttaatggctttcattaccattttagggcttattccaacagcaactttatttgtacctctactgcgtaagccaaaagaactgttgaccagaaaattttggaaagatgcacatcgtggcgtcaacttaatttttggtccaaaagatggtgtattcggtagcaccattggccagattttcgattacttacgtcctgacttccatccaaatgaccatgacacgaccgaatatctagagtactacaaagacaaattactcaaagaaggcggcgcgattgcaccttactttgtgaaggaatttaccccacctgtacgcttgtcttaa

SEQ ID NO: 45490 - DNA, 1299 bp, Acinetobacter baumannii
gtgaaaatattttcgaccaatacctgtccggtaccgaatgaccttgaatcggtcattcatcacaaagatgaagtacctgccgaactaggtggaatgagtgaacagcaagttcaaaaaatctggaaaagtattgagtcactctacaaaaccggaaactatccgcttattactttttgcttacgtcgacaggggaaaattttattaaatcgaagcattggctatgctcaaggaaactcgccggctggtctgcaagagaatgcactcatcgcaacgccggatactcccgtttgtctattttcagcatccaaaatgattactgccatgttaattcatcttttagatgaaaaaggcgaaatcaacttacttgaccccgtgagctattatattcccgagtatggggtgaacggaaagcgccgcgcgacaatctttcatttgttatctcatcgtggaggtattccttatgttgatggagatgtcacacctgaactgctttttgataaagatgaaattttaaggcgtttatacgcagcaagacctgtttctccagcgggaaatcacctcgcctatcatgcagtaacggcaggttatatcttaggagaaattattgaacgggttacagggcaagaccttcgccaatttgtgcatgagactatcgagaaaccgatggatatgccctattttaactatggcttaaaaccagaatatcgtgctgaagttgctcttaattgtgcaacaggtttacatcctcgcttaggaacagatcattatctcaatcatgtactaggtggaggcttacaactcgctgtagatgtcactaatgatagccgttttatggataccatctgccccgccggtaatatttataccagtgcagagcaagctggacgcttctttgaaatgcttttaagtgggggaagctaccaaggcaaacaaattttaagcgagaaaacaatttttagagcaacgctccctaccacaggagttaacattgaccgaactttattaataccgatgcgctatgccttaggaccaatgctaggcagtaatccggtaggcttatttggtccaatgactggacaagcttttggtcacctcggtttttccaatattttgtgttgggccgacccagagcgtgatatcagcgtttctttgttaaccactggcaaatctgtggtcggtacccaccttcctgctctagccaatctgctttatcaaatttcgactcaatgtccacgaattcctagagatcaacgccgttcactatttggtagtgattcgcatgaaaccgatctggtatag

SEQ ID NO: 45491 - DNA, 615 bp, Acinetobacter baumannii
atggtaacactacatcttgctcatttaacgcttacacatgcccaaccttcttatgcggcacttgagtgtattccagccatgcaaaggagacgtctgtcacctttagctaaattagcattaaatactgcaattagtagtttagatggaagaagtgcagactatattgtttgggtatcaaaatatggtgatgaggcaaaaacgttaaatatcttgcaagacgttttaaatgatcaaactccatcgccaacacaattttcaacgtctgttcataatgcaatttcgggcctctactcgattttatgtcaggatgatactccctctacaagcttaagctgttcatggactgaaggtttgattgaggcttatgcacttttaaagtcaatgcctgagattaagcgggtcttagtcgtcgcctatgatgagccattacctaatatttatgctgaggcgatcaattttcctgcctatgcgatggctgctgtcgttactctagagcaacctaatttacaaattactgcgtggacgcatacagatgaagcagatgctcctgcttttgctcatttttggcaggatgctgaccagttaacatctgcatttgggtggaacaaatgctaa

SEQ ID NO: 45492 - DNA, 795 bp, Acinetobacter baumannii
atgctaaatcttaaaaatctcaagcaaaaaagtaattattgctggcgtgtggctgctactggctttagctttgccagttttgggctaggtggtatagccattgcctcagtgattgcacctgtactcaatgcaaccacttctgatccgcaaaagcgacagcaacgtgcgcaaaatgtgattaaacatagtttcaaaggctttactgacatgatggtcaaactcggcatcatgacttattcggtagaggggctggaaaaactacaaaatagtcgccaagagctggtgattgccaatcatccgactttgattgatgttgtagtactaattggtatgatgcagcaggctaattgtgtcgtgaagcagtctctttggtcgaacccatttaccaaaggacccgtacaaagcgcaggctatattttaaatgcaggttctcagcagtttgttgaagactgtgtaaagcgtctaaaagaaaataatgcggcctctcttttaatttttccggaaggaacgcgcactgaaaaagggatgaccttaaacgagtttcagcgaggcgcagccaatattgccattcgtgcaaatgtaccaattcgcccagtaattattacttgtacaccatcaactttaaccaagaatgaaaaatggtaccacgtaccatctcaaccatttcatattgaggtcaaggtattagatgctgtgcaagtatcagatctgttagatgatttaacagtaggacctaaacaagttcgtcagttaagtcgtagtttttataaaatttttgatgaagagttatcttga

SEQ ID NO: 45493 - DNA, 261 bp, Acinetobacter baumannii
atgagcaatcttgctgatgaactaaagcaaatgattattgatgttctagcactagaagatattactattgccgatattgatacagaagctccattatttggagaaggtttaggattagactcgattgatgcacttgagttgggactggctttgaaaaagcgttacaacattcatttaaatgcagaatcggatgaaactaaacagcattttaagtcaatccagagcttggttgctttagttgaagcacaacagaagtcataa

SEQ ID NO: 45494 - DNA, 249 bp, Acinetobacter baumannii
atgttatctcaagagcaagtattaactaaactccgcgaatggatggaagatttgtttgaaattgaaccagagactgttcaactcgattcgaacctttattcagaccttgatgtagacagtattgatgcggttgatttagttgtaaaaattaaagagttaacaggtaagcaagtaaaacctgaagactttaaaaatgtgagaaccgtacttgatgtggtgacggttattcagaacatgactgctgaatga

SEQ ID NO: 45495 - DNA, 555 bp, Acinetobacter baumannii
atgaagtttattcttaaagggataatgacggcactttttgtgctgtatccctttattgtgggctggagtttgagtcacggccaatttgtctgggtgagtgctttactcatcgggttgggtgtgatcagactttttagcaaaggcaactcgttattatggccattaacgggttttgccatcgtttgtggtagcctgagtttgttgtcacatgaccatgcttggctaaagctgtatccagtgggtatgagtttaggtgcattaattatttttgcgctgacgctcattaagccgccgtctatgattgagcgctttgcccgactcgttgaacctgatttacctgcttccggtgtacagtggaccagacaggtcaccaaagtttggtgtgttttctttttttgtaatgcattgattgctttaagcactgtgctttttacctcaactcaggtttgggtcatttataatggctttatttcttatgtgctgatgggcattttgttccttggtgaatttattttgcgtaagcgacatcagcgtttacattcttcaaatcattaa

SEQ ID NO: 45496 - DNA, 1659 bp, Acinetobacter baumannii
atgtattgccattttcagaaattcatcgattcagctcagccactttgtatagacggtactctaaactcgaccagttttaatcaattttggcaagatgtggcattacaagctgctgcaattgctcaaatggaaaatctaacttgggctttatgggaagcagatagttatgaatttctcgttttattctttgctgccttgttagcgaaaaagcaaatacttttgccacccaatcgagtgcgtgaattagaacaggatttttcagcacagcagatctattttttaaagcgtcaagaaattggagaagttgtacctttatctttaaccttagatgatacttttttagagcaggctcaactctatttttatacttcgggttcaactggggaacctaaaaaaattccaagaacacttagacaattacttaacgaagtccaagggttgagtcagagttttagctttgatgaacatgcaactgcgattgcaacagttagtcatcaacatatttatggattactgtttaaattactactaccacttgctagaggtcgaagtttttataatcctcaaatggcattccctgaagatgtggtacaagcccaaaaacaattagaaacaatggggttaagcaattatttgatctcaagtcctgctttattaaaacgctggacaaccgatgttgttttacaacactgccagatggtctttagttctgggggcaagctagaaagtgatgttcgtcctttactaaatcgtccgattattgaagttttgggaagttcggaaactggtggtattgcccatcgcgctaaagatgaagatgcttggactgcatttagtaatgtggctattcgtattgaagaccaacagcttatggtcaagagtaatcatgcctatgagaatgactggattaccacaggtgacggtgcggcatggacagatgcaacatgtcagatctttaagctgctggggcgtacagatcgaattgtaaaacttgaagaaaagcgtttaagcctagatgcgatcgagcaaagcattcaagctttagatgtcgtaaagcaatgccatgtattggtatttgaacatgagcaacgccaaatgttgggttgtattgttgttctaacagagcaagctcgtgaacagttacagcaacagggtaagtcggcttttgtcagccatttaaaacaacagttgaaagacggcttggaaacgatcgcgattccacgtcagtggcggttcttaagtcagttaccacaaaatactcagtccaaactcaataaaaactatttgaaaactctatttaagcctatgttgcaacccgtggtgctgtcacagtctcaaaattcagatgatcacatttgggaattagaatttccacctgagttggcttgttttaaagggcatttcccaacacaacccatttatcctggggttgggcaaataggctttttacaacactttgctaaatcaatttggtctgatttgagctggtgtcagggatatgagcagttaaaatttcaaaacctgattcgtccgtatgccgtggtacaactcaagcttgctcgaaaagagcataaagtgagttttgaactacgtgattcagaacatattctggcttcagggcgactattatttgccttgcaaacagaagtagaggattaa

SEQ ID NO: 45497 - DNA, 741 bp, Acinetobacter baumannii
atgcagtccaattacggctttgttgttccggtttataatcatccacattatttagcagatttgatttcttatctggacagttttcatctaccgattgtgttggtcaatgatggcagtgatgatgcttgtagccaaattttaaaagcattggcagagcaatattctcaaattcacttaattgaacatgaggtgaataagggtaaggggcaagccgtaatgactggtttacgtgcagcctatgagcttggtttaagccatgcattacaactcgattcggatggtcaacactgctgggatgacattccaaaatttattgagcagtctcaccagcatcccgatgcaatggtaattggtcagccatattttgatgcctctattcctaaaaagcgcttatatggccgttacattacccatttttgggtctggttaaacagtttgtcttttgaaattaaagacagcatgtgcgggtttcgcgtgtatccgcttgagagcacgataaaggttttaaatagtgctaaatttcagccacgtatgggttttgatagtgaaattttagtacgtttaaaatgggaaaatacgccttttattaatgtaccaacacctgtggtttatccagagcaaggaatttctcattttcatgcttggcgagataacttagggctaagcaaagcgcatgcaactttgtttatgggcatgctgattcgcttgccgaagctattaaaacaaaagctgcaaggttga

SEQ ID NO: 45498 - DNA, 927 bp, Acinetobacter baumannii
atgacagattcagcttcaccaaaatggaatgacattaaagagcgaggagggatgctacctctcatgctgatgttatggttttaccgttttggtggacgttggttatgcaagttggtgatgtacttcgtcattatgtggtactggttatttgctaccacagcaagacaggcttccttactttatttacaaaaactgcatcattttgctggatcgaagtcgccgtttaactaccaaccaaattggtcaaatagctatgcgcatttcatgcaatttggcgaatgtattttagataagattgagggctggctaggtaatattcccgaacaggaactgcaagtttttggacatgaaaacttctctcagcattatcaaaaaggtgctctgattattgtctctcactttggcaatattgagttgcttcgagctattaagtcagagcatccgcagaaaattaatgtgctggtttaccaaaagcacgcgacaaaatttaatgagtttttgaaaaaaataaatgataaggcagatgtttgccttttatcagttgatgagctaggtattgaaactgccatgctgttgcaagacaaaatgcagcaaggtgagtgggtcattgtggcggcagaccgagtgcctgtgcagtcagatcgtgtacagcatgttgattttttaggggagtcagcagctttcccacaaggtgcatggattttagcaaatttactcaaagtgcctgttattgctgtgttttgctatcgggtgcagcagcagtttcaagtgcatattcattcaattgccgagcagataaatttacctcgtgctaaccgtattgaaagtatgcaaaccatcactaaaacatacgttgccgtactagaacagcattgtctgcgtgccccttatcaatggtttaatttttataatttttggacgaaataa

SEQ ID NO: 45499 - DNA, 1536 bp, Acinetobacter baumannii
atgcgtgtgttaaccgtaggtgaacagccactgagtattgaagatgtcgtttctgtagccagaggcgaatgtcaggttgctttaccagaaacgtctgaatggcgtgaactgattcaaaaaggcgctgattttctcgatcagctccttgaagaggaaggggttatctacggtgtgactacgggttatggcgactcatgtttagttgaagtgccattgcatcaggttaatgaattaccgctgcatctttcacgttttcatggttgtggtttaggtgaaaatttagatgtcatcactgcacgtgcagtagttgtgacgcgtttatgttcgttagctcgcggctattcaggcgtgtcgatcgctttgctggaacgcttagtttggttgctgaatgaaaatgtaattccagttattccatctgaaggttcagtcggggcaagtggggatttaacgccgttgtcctatattgcgggaactttagttggtgagcgtgatgtctatatcgatggacaaattgttccagttgctcaggtgtatgctgaaaaaaatatgctgcctttaacgcttagacctaaagaaggtttggcgctcatgaacggcacagcggtgatgacggcaattgcttgtctaaactataaaaaagcagagcaaattgcacttgcaagtactttaattactgctctaaatgtattggctttggaaggtaatcctagtcattttgatgaagtcctgtttgcacagaagccccatccgggacagcaacacattgccaagcaattacgtgactggctgaatagtgaagtacaaacagcacatcaaagcccacgtttgcaagaccgttattcgcttcgttgtgcaccgcatattattggtgtgtttgaagactcaaaagtatggttacgtcagttcattgaaaatgagttgaactcaagtaatgacaatccattgattgatcctgtagggatgcgtgtattgcatggcggtcatttttacggtgggcacattgcacaagcaatggatagcttgaaaattatgatcgctaatattgctgacttgatggacagacaaattgcacagttggttgaccacaaaatgaatcatggtttgccacgtaatttaacaggtgcgacagctgaacgtttaccactgaatcatggttttaaagcggtacaaattggggtgtcggcgtggacggctgaagccttgaaaaatactttggcagcttcaattttttcacgttcaaccgaatgccataaccaagacaaagtcagcatgggtaccattgctgcgcgtgatgcgagccgtgtgattaccctgacacagcaagtcattgcagcactttgctgcgcgagtgtgcaggcgattcatttaaaaggtttaaccacacagttaagtccaacattgcaaacgtttatgcaatggaccttacaaagctttgcatttgtcgaagaagaccgaccattacaaaccgaattacaacagattgttaatcgtttagaccaacttgaattgtttaatcaaccagaatttatgggataa

SEQ ID NO: 45500 - DNA, 429 bp, Acinetobacter baumannii
atgcatgcagatgtaatcattgaaattccatttcatgatgtcgataccatgaatgtggtttggcatggacactatttaaaatattttgagattgcgcgctgtaaattgctcgatcaatttcattacaactatatgcagatgaaagaatcaggctatgcatggcctgtgattgaaagccatgttcgctatgcatacggtattgagtttgaacaaaagattcgggttcgggccattttaaaagaatgggaaaaccgtttgaaaattgattatttgatttttgatgctgagtcagggaaacgtttaaccaagggttataccacacaggtggcggtgaatattgaagctcgtgaaatgtgttttcaatcgccacaggttttgtttgatcgcttgaatgcatggtctgagtttcaaccgaagaggaatgcgtga

SEQ ID NO: 45501 - DNA, 630 bp, Acinetobacter baumannii
atgtctaaattcatcaaaactttaggtttaggtgctgctgtttggatgagcagtttaagtgcggtctatgcagcgccaacacagatcattcaaatttttcagcaattatcacagtctcctacggttcgtgctgatttcgaacagcaaaaaaaattgccatcgttgaataaaacttttgtatcgaacggctctttgttgttctcaaaatcttatggtgtagcgtggcaaatcaagcgacctgtgcaagcagatttgattgttaccccaaccaaattggtacagaaaactcagcgtacatttagccagatacaagttgatcaatcgccatatagttcggtcgcgactttattcttacagctcatgtctggtaatgaacaggctttggcaaagaattttaatgtggtaagtgcgaattatagtccagcgggttggagcatgagcttaactccgaaaagtagcttgtttaaaaagttatttgtgcgtgttgatgctcaaggtcaacagtacgttaaccaaatcgtgattaccgagaaagcgaataatttaacgaccattcgctttagtcaccagacttctcaaccgacgactctaacggctgctgagcatgcgattttccaactggcaaaataa

SEQ ID NO: 45502 - DNA, 2316 bp, Acinetobacter baumannii
atgcgattttccaactggcaaaataagttcaccgcgctttggttaattgctctgctattggttgctgtggggcttggcgtgacgtggctgaataaagatattcatattcaaactaatatttttgcgttattgcctaaagttcagcaggacccagaacttgcacgtactcagcagtacatgaatgagcaactcaacaataaagtatttgtggtggtagatgccaaagatgaggctgcgatacaacaagcgacgcattttttaaaagctcaagctaagcaaagtgcactatggcagccactcaaaccacagcttgattttgatcaatttgcaaaacagttgtatcaacatagagcagggttgttgagtactcaagatcaagccttattgcaaaaaaaggactatgctgcgctgactgaacaaagtctgatgcagatgatgagtccaggcatgcctgtcactgctgagtcacttaagcaagacccgttactgttgttccctcgttatgccatgcagttggcaaccccgtcgcaacaagatattgaaatggagcagggctttgccacaattcatcatgaacaaggcatttctcggcttttcgtattacagttgacgcaaagtccatacaatattgattaccaagaacagacctctacttggattgaacaaactaagcaaaaactagcggcaatgggattaaaatctcattggactggaactattttattttcaaattttggtacgcaatcggccaaacaggaaatctcaaccattggtgttggctcgacactgggcttaatttttctggtttggttcggctttcgctcattgcgacctttggcgaccgagtttattgcagtttcgactggaagctttgtggcgtttgcagtcacacattgggtgtttggtgaaattcacctgatgacattagtgttcggtgcaagtctgattggtgtttgtgttgatttttcattttattttatggcgatgcaatcgcagcacagaaagcttggcggttttcaaattttaaaaccgctattaccaagtttgtttatgggtttaatgaccacattagttgcatacatctttttgagttttaccccatttccaggatttaagcagattgcggtcttttcaattgtaggattaactgcggcgtggatcagtagtgtactgctattaccaagattaccagcactcaatgctcagcctgctatacaagcactatcgtggattggacaagcacggttatggtttcagcaacgaaccaaagttcgttctggcttgattgcaatcattttagcagtcggtacgtcgagtcttttctatcttaaaagtaacgatgatattcgtaacttacaaggtatggacgcgagtttaaagttgcaggaccaagcggttcgtgagcaatttggccagcaacaaagtagtgattattttgtggtgcgtgcagcatcggcaaatgaaatgcagcaacaagagcagcaactgatagggcaattacaacagttgcaaacaaacggaaaaatcagtgcatttcaagctttaggtcaatgggttccaccattggcagagcagcaaaataatctacaactattaagaaatattccaaaagcgactttgcagcaatatgcacaaagtatgggcctaaatgtcactgatgttttacagtggcaacagcaactagcggcacaaccgttattagatttttcagtatttaaagatcaccctttagcttttttacaacctcaagccaatgagcgattagttatggtgacaggggtgaaacaacctgacgcgttaaagcaacttcagaatgagcatatacatttccagcaaccgattactgcaatgtcacaaatgtttgctgaacatcgagtgcaggctcaacatcttctgatttatgccttaattggtctggcagttggtttagcgcttatttatggattaagttcgattgtacctttggtcttgccagtcagcttggctttactaagcacttttgctgttcaggcatggttaggtgtcgagattaacctgtttagtattatggcgacttttctgattattgggattggtgtcgactatgcaattttctaccgacatggacatgatcaccctcaagtagttggaatggcattatttttatgtatgatgtcgaccttacttggctttggattactttcatttagccatacttatgcaattcattgttttggtttaacggttttattcggggttattttctcgtttatctatgcgactttgttaacccccgcagatgaaaaacatatcgtgaatttacaagaccattcataa

SEQ ID NO: 45503 - DNA, 1296 bp, Acinetobacter baumannii
atgagcactatagaaaaaattgacgtcgtgattattggggctgggccatcaggtagttctgctgctgcacttcttcgaaaaaagggctataccgttacggtcattgaaaaacagcatttccctcgtttttcgattggtgagtcattgctaccacaatctatggtatttttagaagaagctggtttattagaaacagtccgtgaacatgttgaacaatacgcttttcaatttaaaaatggtgcggcttttttacgtggcaaacagcgtagtttttatgactttacagaaaaatttaccgatggtccaggcacaacttggcaagttcgccgtgcagattttgacgacttattagcaaaacaggctcaagcttatggtgcggatattcgctttgggcatgaggttttagatgttgatgttgcatctgaacagcctgtattaactgtattagataaagaacaacaacgttataaaattcaaactaaattcttgttagatgcgagtggctttggacgaattttgccaaagttactagatctagaaagtccatcaaattttccggtaagacgtgcgctgtttacccatattgaagacggaattacagatgacccagagtttgatcgtaataaaattttaattactgtccatgaaaaagatcatcgtgcatggtattggctgattccatttgcagatggacgagcttcttttggtgttgttgcagaacaagatttttttgacaaatacatggtcgaaaatgctgaagataatgaacctgaggcaatgtttaagcgtattttggccgatgaaccaagcttgtcacatgtcttgcgccgtgcaaagtttgatacgccagtgcggaccttggtgggctactcagcgaatgtaaaacatttggcaggtcacaactatgcgctattaggtaatgcgggtgagtttcttgatccagtcttttcatcaggtgtgacgattgctcttaaatcttcaagtttggcggttcctttggttgaacgagttttgcaaggtcagcaagtcgactggttagaagaatatgaaaaaccattacgccgtggtattcaggtgtttcgtgcctatgttgaatcatggtacgaagatgagttccaagatgtggtgttttcgcaaaatcagaatgaaggcattcgccgtatgatttcttcattattggctggttatgcgtgggatgaaaaaaacccgatccataaaaatgccaaacgtagactcagcactttggcagaatattgtcgtgaaggcttggcgcaagaacaggtacttgagggataa

SEQ ID NO: 45504 - DNA, 546 bp, Acinetobacter baumannii
atgcaacgcaaatgggcaacgatattactcagtagcttgatatttttaaatggttgtcaaatcatgccacatgccaaagggctacaaagtccactatggcaggctcagacttatcaaagacaagatcaggttgaggtccagtggaagcagcaaagttttagcttcttgttatatcaacagcaaaagggcgctgtactggatatggtcgctttaagcctgacaggccagcaattatttaagttacagtttgatgggcaccgagttcatgttgaacaacgcattgatcagatgcgtttattgccttttgagtttgtggtacgtgatcttttgtttgcgacataccctcagttttcgcatttagggcaacaagctgtagagatgaaacaacaagcagataagcaagttgtttatattgaaaagcagcctgtgttacagcttaaacagggacaaggaagtattgaattgattaatgaacaagtcccttataccatgatgctgagttcgattgagaacaccttgcagacagaagaaagtcctacgccatga

SEQ ID NO: 45505 - DNA, 1203 bp, Acinetobacter baumannii
atgaaacatttaccttcagaaaatgcagctccaatggcagtaggcatacaatttagtgttggtttatctgcattaggctgcgaacttaatcaaattaaacaggcattacaacagccgcagcaaaccttgagtttgcgagatgatttaatcgctgatcgtgatgtttgggtggggcaatatacgcatccattatgttcgagcgtacctgatgctatgcggtctgtagattcacgtaatctacgttttgccttaactgcattatctaaaatcgaaacagagttaaaagcttatactgcttcctttgaaaataaacgtttagccattgtggtaggcacctctacttctggtattgcagataatgaattattacttaagcaatattttcaagggcaaacagatctatcgatatcacactatcctcaagaaatgagctgtttagcgaaagcattacagcagtacttaggatgggaagggcctgcatatacgatttcaacagcttgttcttcaagcgctaaagcattagccgcagggcagagattacttcacgcagacttagcagatgttgtgctggtgggtggcgtcgataccttgtgcaaattgactctaaatggatttaatagtctagaaagtttatctgcacatatttgccaaccctgcggcataagccgtgatggtattaatattggtgaagccgctgcgttttttgtactaagtaaagaacaagcacctgtcatgttaatgggggcgggtgagaccatggatgcatggcatatttcggctccacatccggaaggtaaaggtgccgctttagccatgcaacgtgcactagatatggcacatatttcagctcaagaggtgggttatatcaacttgcatggaaccgcaactccacaaaatgatgcaatggaaattaaggctgtaagacaagtttttggtgtttaccaagttgctttaagtagtacaaaacataaaactggacattgtctcggtgcagcgggtgccatagaagcttttatttgtgagcaagttttaaaagatcaaagctggttgcctttacatcaaaatgttgagattgatccagatttggtcgaccaaaactatgtgcaagaagccgagttaacacagcccattcgttatgtcatgagtaattctttcgcttttgggggaagtaatattagtcttgtttttggagtgaagccctaa

SEQ ID NO: 45506 - DNA, 426 bp, Acinetobacter baumannii
atgaaactggatgcaattcaatatattcctcatgagcaaccgatggtatttattgaccatttaacagaggttgcagaagggcgggcacaagcagaactcacgattacaccagagctcatgttttgtgaagcggaaggattgccgacatgggcaagcattgaaattatggcacaaacaattagtgcttattcaggctggcaaggtcagcagtcaaaacaagcaccaaaagtcggttttttattgggaacacgtaaattaaatttacccatcccttatttctccttaggttcacaattgatcatccaaatagagcaacaatattttcatgaaggacttgggcaattttcctgtgaaattcaatatgctgagcactgcattcaggcaacgttaagtgtatttgaaccaacagaatcaccatttgaataa

SEQ ID NO: 45507 - DNA, 726 bp, Acinetobacter baumannii
gtgacaagacgaattttagtaacgggttcaagtcgaggaattgggaaagcgattgcattacagctggcaaaggctggttttgatgtaactgtgcacgcgcgttcacgtcaggcagaggctgagcaagtcgtacaagagattcaagcattaggacaaaatagccattatctaatgtttgatgtaaatgaacgccagacggttcaacagattttagagcaagatgtagagcagcatggcggattctatggggttgtattgaatgcaggtcttactcatgatggggcctttcctgcgttaacagatcaagattgggatgaagtgatttcgacctctttagatggtttctataatgttttaaaaccactcatcatgccaatgattcacttacgcaaaggtggccgtattgtcactttatcttctgtgtctggaattatgggtaaccgtggtcaggttaactatagtgctgcaaaagcaggtctgattggtgcgaccaaagccttagcactcgaattggcgaagcgaaaaattactgtgaactgtgtagctcctggactgatcgaaaccgaaatggtgacagatgaagtcaaagaacatgcgcttaaaatgattccgctgcaacgcatgggacaggttgatgaagtggcgagcgtagtgaaattcttgtgttcagatgaagcttcatatgtaactcgacaggtgatctctgtgaatggaggactcatctga

SEQ ID NO: 45508 - DNA, 1227 bp, Acinetobacter baumannii
atgaaacgtgtagttgtgacaggaatggcaggaattacctctttaggtgaaactgccgatgacatctttgcgcgatttgaagccggcaaaagcggtatacgttacatgccggagtgggagcaatatgttgaccttcggaccaagcttgctgggcctgttgaaacatttcatattccaaaacattttaaccgtaaggttacccgtggtatggggcgtgtagcactcatgtctgtggtttgtgccgaaactgcgttacaaaatgctggtttgcttggacatgaaattttatctagtggcgaagcgggtgttgcctttgggtcttctgcgggtagcgtagatgccgtgggtgagtttgcaagcatgttgcttcaccagagcatgagtaagattaatgcaaccacttatattcgcatgatggcccacaccagtgcggtgaacatgaccgtatattttggcctaaaaggattaactttacctacctcaagcgcgtgtacctctggttccatggcaattgggcaagcgtatgaagcaatcaaatatggtaagcaacaggtcatgattgcgggtggtgcagaggaactcagtgcggcaggtgcggcagtttttgatgtattgttcgcgaccagtggaatgaatgatcaacctgaaaaaacaccacgaccatttgatgctaaacgagatggattggtgattggtgaaggcgcaggctgtttaattctggaagaatatgaacatgccaaagcacgaggtgcccatatttatgcagaagtgattggctatggtagtaataccgatggtcaacatgtaactcgtcctgaatcagaaatgatggggcgctgtatggagttagcgcttaaagatgcatctgtagaagctaaagacattgcctacgtaaatgcacatggtacttcaacagatcagggggatgtggcggagagccaagccactgcaaaagttttaggctataaaccaattagctctttaaagagttattttggacatacgctgggggcgtgtggggctattgaagcttggttaagcatcgaaatgatgaatcgtggccgttttattccaactttaaatctagatgaaatcgactcactatgtggtgaactagattatatcgttcagcagccgagaaatttggatgctgacattattatgagcaataactttgcttttggcggaattaatacttcgcttatttttaaacgtgttaaacaataa

SEQ ID NO: 45509 - DNA, 435 bp, Acinetobacter baumannii
atgttaaataaaaaacttttatttgtagcaatgctaagtgcgggttttactgccactgttcaggctggagatgaagtacatcagttaaattttaaagaagctgtagaccgtgcagttgcagatgggactttagatggttcagtaaagttttatttaaagggtacaaagtctggcggtaaaatcattcaaaaagatgcggtaaccaataaaaagaccaatggttttggtaagtcagcagcaacttcttgtgactgggttttacgttcagcactgatccaaatgcaaaacaatgctaaagcacaaggggcaaacgccgttaccaatattgtgagctattttaaagccaatgaaacaacgagtacgaccacttacgattgctataaaggcgccatgatggcgggtgtggcattaaaaggcgacgtggttaaattttaa

SEQ ID NO: 45510 - DNA, 396 bp, Acinetobacter baumannii
ttgggaagcaaggatagccagatcaatgaattaactatcggctctaacttctcacgttccgcatacattgcagaggaattgaccttaaccccaaataaggcgcgtgctttatatggcgcacactttgaaatcgaaaatggagaagtgattggctatgacaaacctcgcggcgctgcaaatcgtactgcattggttgacagttatggcaatccgttatctttcgacaaagcgatgcaaaaaatcatcgaagcagatccagagcgagacaccttgatccgctctaaagttaatcctggagctggctcaaaaaccaagcaagaaaataaaggtttgcagaaagagcaacctaagacttccttggaaaaaatcatggctggcttaaggggtgaaagttaa

SEQ ID NO: 45511 - DNA, 903 bp, Acinetobacter baumannii
atgcctttattgcgcgaagaagcggaaaaactctcgaacaaccaacttgttcaaggcgttgttgaagaaatcattgaccgcgatgacctttttgccattttgccttttacacaagtaaatggtaaggcatatgtttacaaccgtgaaaaaacccttggtggtgccaactggcttgatcctaatgaagtgatcgaagaagaaggctcaacattcgacgaagtgacagcgcatttacgcatcttagctggtgacgttgatgttgataaattcttagactctacaatgggtgatacgaacgctcaaaaggcgattcaaatcaagcaaaaggccaaaggtgttgctcgcgaattccaccgtactttggctcgtggtgattcgaaaactaacgcgaaagagtttgacggctttgacaagcttgtaacctctactcaaatcgttgacgctggtgctgacggcaatccattaactcttaccatgttggacgaattgtgtgacgctgtgccgaatggcgcagacgtgatcgtaatgcgtcgtggtacgatccgtgcctaccgtgcattgcttcgtgcaacctatggtactgatgccgtaatgcaacagttatctaactttggtcgcccaatgcttactcacaacggtattcctatcatcatgaatgattggattgccggcgatgaagtgaaaggcacgaactcaaaaaccacttcgatttatgctgtacgcttaaatgaagttgacggtttacacggcctttatggtggtggaaatgcaggtatcgttgttgaagacatcggtacagtgcaaaacaaagatgctactcgtacacgtatcaagtggtactgtggtttagctcttaaatccactcgctcaattgcagcaattcgtggcgtgactaatatttaa

SEQ ID NO: 45512 - DNA, 495 bp, Acinetobacter baumannii
atgaaattaaaattaaccggagctggattcgaaaattatacaggtcaaatgggcgtggtattttttgaaaatggcttatcgaaatatgacgtgatgcctaatgatgcaattcgcattgcaagtaccattggcgcagtatgggaaaacggcgatcccgcgaatttaggtgcaattcatacacagaaccttatgactcccgcacctgatattcgccaacagtcgggacttgaattgctgcactcgattactggtcatgctcacttaaatgcagatcaggttcagcagcattccgatcaggttgccagtttaacgactggggtagaaaagcaggaaagtacagccaagaaagcggaacctaaatacactcaggaagctttggaaaagattgctgatgaaagtggcattgcgggattacgcgagattgcagccgaatttaatgtcaaaggcaattcaattgccacattaatcaaagccatcatgaatgcacaggaataa

SEQ ID NO: 45513 - DNA, 771 bp, Acinetobacter baumannii
atgaattactaccttgccggaacgtcagtatctcttcctatcaactttgtcgatgacgacggaaatccccttgaagtgacccaaggaagctaccgtattgtcgatcaaaacggtgtagagattaagccaaaggccgaattcgatgtcacccaaaccaaggtaactgtagaggctgaatataaccagattcccgctctcaaccctatggaaatcaaggttgaggacatggactcaattgagatcgatcatttgcgtattctccaatttgatctaatcaatcgggatgggaatacctatgcgtttgacgtcagctacctcatttcaccaagagaacggttgattgtaggtttaaacagttttcagacattaaatcaggcaaagctgacagcattgacgatgccggaaacggaagttttcctcacagaaggcgaagttcgtaaggtagcggctttgattgaggcgagacagcggatttgcacgctcaatattccaagtgtcaatttacgagccacgacaccatccgcctaccagaagctatcagagcaatttaaggctgccttgagaaaggcgcaagttgcggaagcgaatgcaattcttggcggtggtgatcccatcgaattagctcttgcacagggccttaaatccaaaaccattggcgaaacccatgagagctatatcggtgggcgacaactcaggttagcggttagcaaggcaactctaagatatttgagtggctttgtatcgacaagcaaggttattgcgagggtttaa

SEQ ID NO: 45514 - DNA, 696 bp, Acinetobacter baumannii
atggacgaacaaaagcgctatttgttggattatttctcaatgagattcacgagtctcatggataattatgttatggcaataaatggcgcttttttcactacaaggcgcgcaggctatacgccttcgcagtatcagattgaaaacgccaagaattttgtggctaacgcacattatttattccttgaagctgctggcaacactcttgagcagattgcatcaaatttggacgctcaagaggtggcttacaacatgttcgaacttgaacatgtcaaaaatcaacttgtatctatttccattgatatgttgcgccaagcgaaccgcgcaatttctacaggaatccaaaacaaggcgattgaactgcttggaaagaataatgctcacggcgcaatgggcttgttagtacaaaagaaaatggctgaactggaaattaccgcaacagatagtgcagggcgtaaatggagagagccatctagtcttgtaaaaaccatcgttcgggatttcatttatcaatcacttgtagatcaccagattaaggcattgcatgaatctggcattgacctgattgctgtacctgacattgataagcctgtgtccattcaagggcaggcaggttatgtggctttaaaagacgtaagacatcacttccatccgaatggatatgacttacctgtaggctacacagatgttcacacctaa

SEQ ID NO: 45515 - DNA, 351 bp, Acinetobacter baumannii
atgttcacacctaatcagttctgcttcgttcgggcaaggaatggctatgatcacttcggtttagccaaatttgggctaagacgaaaggaacgttgcgccatcgtcaagatgattcagcaaagcaacaagacctcagttcgtgcggactcgtctgcttcgcgcggcaacgcaagggaagtggttgcagatctggtcattttgcttgaacccaaaaccacggcaaccattgactcaatcattgagtttggtggggacatgtatgtggtgaaatcagtccataaacggtttgatattcgcggcaagcatgatcacaccgaagcggcatgtacctactggagtgataacgaatga

SEQ ID NO: 45516 - DNA, 387 bp, Acinetobacter baumannii
atgaatccactaattcctatcgctcaaatgctcaatgatgcaggggtcgccactttagggcaaaacctgtttatcaacatgatgccaatttccgtaacaaacggaatcctgctaaggaatccaatcaacggaaccaaaattgatcatgagttaaagggtcattacaacaccgaattcaaggtcattgtaaggaccaccaattatgagacgggttataaattgatgaagaaggtattcaagcttcttacactggataaccattttgttgaaggtatgcacattaaacaatgttatccggacaatgagccaatcgaatatccgatctcagaagggaacactctcgaactggcatcagacttcaagattgcctttagcgagattacctaa

SEQ ID NO: 45517 - DNA, 498 bp, Acinetobacter baumannii
atggcccgaaagaaccttcagaccacaggactcaatgagcttcgcaagaaactcaccaagttaagtgaaatgccaaatgttctggattccgagctaggcagtattgccaaacagatgcgcgatactgccaaggctatggcacccattgaatatggtggattacgcgaatcgatcaaatatcgtcgggtcggttatgaacgtaacaagctaggacagttctttaagggaggcttgggtcagcataccgtttacgttaatttgaatcagccgagtcgcggagcaacggttgcaaagtatttcttctttgtacacgagcacatgagcgtcggtcgtactggaggagagttccagccttccgaatattccgtgatgaatagcgcactacttggcgaagttgcgggcggtcgattcatggaacgggccagagtcaaatacgaagtgcaaattaccaaacttttgcagcacagagcggacgagtttattaaaactttgttctag

SEQ ID NO: 45518 - DNA, 546 bp, Acinetobacter baumannii
atggctaacaacgatacctcaaacgttaagcttggtgtatgtaaagtcttctttggcggtgttgatcttggcttcaccaaaggtggcgttgaagtgacggtagaaactgaaacccacgaagttcaagtagaccaatacggtaataccccaatttctgaatatgtaatgggtcgtaccattaccgtagccgttcctttggctgaaaccacgttagataaccttgttgccactatgccgggtgcaaaactggtaacagattcaacagccggaacttcaaaagccattgtacctacaggcgttggcgtgaacttgcttgatttcgctgacgagttggtattggttcctaaaggcgtaaacggctcattgaactacaacgatgcagtacgcgttcctaaagcggcaactccgggtgccatgacctttgcttataagcttgatgaagaacgaatcttcaactgtaacttcaaaggctacccagtcattgaaggcaatgatgaagtgctttatcaggtcggcacagttacaccaccagcagctaaagcttaa

SEQ ID NO: 45519 - DNA, 354 bp, Acinetobacter baumannii
atgaaattactcaacctagatccattagttaaatcagtagaaaaacgtgtagtcgtcgtaaatggaaaaaatcacgaaatccgcacattgaatgtggagcagtttctccaaatcgtcgatgagtccaagtcgattgtggaacgcgcagaaaagggcgaattcacattggcagatgaagttcgcttaacgagaaaagtcgtcggcttggctattccaaccatgacggaagaagaaatcaacaagcttgacgtaagccagattcaagccattgctgaatttgcaaaaggcaacgacgtcgaaggggtagaggaagtctcatccgaagagactcaggaagacccagagggaaagtag

SEQ ID NO: 45520 - DNA, 5589 bp, Acinetobacter baumannii
atggctggcgaaattaacaatacgctcaaacttgatgtcaatcaatttgaccaagctattcaaaaggcatcagatcgcctagataagctagacagcaatctggggaaaaccaacgcttccgtcgaaagcttggagaagattcttagtggtttgggcggagatattcgccagctctcttcctcattcaaaacgcttgatgacaatctggcagcttccttgaaaatgttaagtggggttcagaaaaatactgactcactttcacgctcattggatagcgtagacaaatcggcatcaaaaactgccaaaaccacagcgcaagcagccaaaagtattgaaaatttggctgactttacgcaagcctacgagaaaaagctcaaaaatttaaacccacttttgaatagagtttcaaagggtcagcagattcttgaggcacacgcaaaagcgactggtgacgaactagagaagcaatcaaaacgaacacttgcgaataacgctagagctttacaggctgagattaagaataacgagaagctgctcgctgaacgccgtgaaatggcttataaggccgcacagattcagaaacgtgcggaagttaatttagcagtacagcaaaaactttataacggcacattcttcggcaagaacaagaattccacttctgaaaaagcagtggaaatgcgcgcaaatattgaattgtggcgtaaagaggcagatgcggccaagcttgttaaggagcaaatcaagtctgtcattcgtgatattgaatatcaaaatggcgagctgcaaaaaggtgtaaacctgctcaatcagcagattgaacgcacccgcgcacttaaaaaccagcaatctgtagaacaagccaaatcccgtcaggaacaaaagagcctagacacagcacgtaaacgccaagagcttgaaaagagaaccgaggcttggtggaaagaagcgctctttaaccgtgaacgaagagaggaagaggctgagcgcagacgcattgaaaaacgacgtcaattagagcaggagtattcaaactggtttaatcgcgaactcgacaaacgcgaacgccgagaagccgatgcacgcctaaaacagcgccctctaattcgaaacatcgatgaagaacgccaagctcagacacgaactgcggatgctcgtcgtaagctggaacttgattatacgggttggtggacaagaacgctcaataaccgagatcaagctgctcaacgcgctgccgagcaggcggaacgtgacgctcatcgcgtgagaatgcagcagcttaatgaagagcgtaaggctcaagagctattgcatcgagagcaaatgtctgttgccaaagaccttgccgcaatgtacgcaagtatcaagatcaatcaaggtctaggcggcgctgtacacaaaaatatggaattagagcaatctaaattccgtctatcattgtggaatcttccaaaagaagaacaagaacgattccttcaaaaatccagagatttaaccaagactgagaaatatctcaccaatacagaagccattgatgcccgtcttgacgctatggctgcaatgggtggcaaccacgaaaagaccattgatgccacattagcaactgctacccgtgtggctcacatcttacgtgcaacgggtaatgaaacaggttcaaacagcgacctagtgaaaaacttgtacggattcgccgaatcccgccaagtcatgaacaatgtcgatgaaattaacaaatcattcgagacgctgttaaaaatctccaatatttcaaacggcaaaatcaaaattgccgacgttgaaaccattgcgcgtaacatgggcggtatgcgagctgacgtctcagccgatggctggttaaaaatcgcagcgcttggtgagcagttcaagaccgctggtggtggtaacggtggtggcgggggtatcgcaaccgtaggtacgatgctcaagatgatgggtttatacggttcgggtaagacaattaccaatcgtgccgtaaccgatctgatgggcgccgatatcctcaacgaattcaaggacggcgatgctgagaaggcgttcagagaaaacgctaaaaatatcaaagaatttaccaaaatgatgaagaacgcgggcttcaaggacttgaagtcgatgggcgaagatccggttaagttcttctcatctttacgcggtcagattcttgattacatgatgcgtgaagataacttcacccgcttctttggtgaagggaccaagcgttggacctacaaccagaaaggtcagatgatcaacagcgaaggcaaagttgttgatccgaatgaacaaaacaaaattgagcgcacgggctttactcgttgggcttctggcatgggctggtcaaataaaaccgtagacggtttgaccaccatgttagataaacgcttcattgaccgcgcaaatgaagtggcagaaagcgctaaacgttcagcagaaagtcagcaggccctaaaagaagctcaagacacattaaagggtagcacagacaacctaatggcttcattgggacgtttggctgaatcatttgctccgcttctaccttttttaacgggcttcgttaatggtctaaccaaagcggtagacggcattgcaaacttgatgaatttgcatcccgcaattgccattgtgacaggtcttggagctggttttggcgccctaaccttagcgacaagtttattttttgggaaattaagcctagttagtcgcctagttacaacactccttcctgcattgggtggcttgggtaagactgctcaaacctcttccggtcaattggctaccgcaacaagcactgcaaataacttagggcaggcggtatcaaaaatgggcgatggcacaaaaaatgttgtgcctaaagtttccaatatgagtacacgcgtccttggcattttgggcggcatgttacgctgggcaggctgggtcgggttaggacttcttgtaggtcaaatgttcatttcttggcttgatagcgtcaacaagaatgaaaccccgttaagatcatccttccaacggttagtgcaaggcttacgggatgacctgatcgcagggttaaaaggtctacataccatctggaacaatgctttaatccagttaggcattgatacagaaaacgcacgccgtaatctccgtgatttggcaaactacaaaggcgaagttttaaaaatcccagttaaaggtgtaacggctgaagagggcggtggctttacctcaacacctgcaacccgtgaacttggcaagaaaatcaccaaattgcttgagaagcgggagcttgtacaaaaggggaaaggcttcttaacgaatgcgcttgacggtggcaaacagcaattaaaagaaattgacgatatgcttgccgggtacagacgcggcatgaaattaggcgggctggtttatatcgagaaaggcccatacgctggacaagtcgttcttaaaaaggacattgaaaagaacgccaagcttctcaaaaataagcagaagcaagctgctgccgctaaaacttcgtctgcaacctctacaggaagtgtattacctacaccgtcaaatcttgccgattattctgcaccggcaattggttctggtggaggctcaacgcctaaagagaaaactggacgaggttacgatcgccaatggaacaacctatatcgtgctgatgttgagaaagccttgttgggcgctcaagaccgcgagactgatattagtgaaattctcggtcagcctgttgactacctcaagagagcgaagaacgactttatcgagcgttggatgagcggaaaatgggatgacaataatgacccacgctcacgtccattcacgaagggtacatacaatcctgatacaggttggactaaggatcaaattgactgggacggcatgtacaaaggtcaacatgtcaatgagttccttaacgcccaaatgaagaagttgatggccgatgactacaaggcatcaattcagtttgccgctgaaagatcggcttcaacagatgaggactttaagaacgtccttgatcaatttgtcgagaatgacaccaagaaatctgatgccttaatggctttagaacgtcagttcgcccgttatgaagtgcgtaatccaatggcacttcaagcaggcggttataacgacttcaaggactttgcgcttaaccatcaggtggccaaggacactttatccaaagcttatgagtctaaaaacatcaataaacaactctccattgacctaatggatagtgaagttgatcgacgtcaatcttctgccgactatgcgtatgatgaagttgccaaggagatcaatgagcagcgtaaggcgctagaaaagcggattcagattaccaaaaccatgatggaaaacgatgaggctgccaagaaggaatatgcagaactcatcaaagccaaagagctggctgaagaggaattcaccaagcgcttaatgcttgaaaatgaaaagcgtgttcgcgcctctgaatccgcaacacagcagatgctacgccaataccgtgatctgaaagtcggtattgaaagcattaaccagaagtggacagaaagtgctatcgactcagttgccgacctcattacaggacggatgagtttcaaggacttcgactggcgtcaaattggatctgatatttttgccgattatgcaaaagtctttgtaaaagattcagcaagtaagctaattaccaacgtaatgggtaaccaatccatttttgatcttggtaaatccttattgagcggtaaagctgctggcggaatgggctgggcatcagacttgctaaatagatggcgcggtttaggtccttatgctccggctgttgacccaaatacaggcgaatctacaagtgctgcggtcaatactgaaattactgacactataccgctatttgacaaactacgcgctaccttaaatccactgactcaaggattaagttcattatgggaaaatgtcagcagcgcatcacagggtctttggacttttgcgtcagatgctatcagcaaggcaattaatgctttgttccaatgggcaacaagcctgttagcatcaagcacagcttccagcggctcatcgggcggtaactggttaggtacattgttccaagtcggaatggccgcttatggagcttacagcggtgcaggagcaggtattggagacattagtagcggtgcttcatatcaagtcggcggtggcttcaacagcgctgtaggttggagtggtacatcacagttcgccaagggtggaatttttaccaactctatcgtgaatgaacctacaccgtttatgtttgccaagggtggaagttttgcaaacggtctgatgggagaagcagggccagaagcaatcatgccgcttactcgcgattcatcgggcagactcggtgtttccatgttgggagcgggtgacgcttcaaacgacatgcaaaatcacgttcaaatccaaatcaccgtaaacaacgatggaagctcttctacaagcgcatctggcggtgatgctcaagaatataaacaaatggcgaagcaggtcgaagccattgtcatgagcaccttggacaaacaaagcagaccgggaggaagattatataagaaataa

SEQ ID NO: 45521 - DNA, 327 bp, Acinetobacter baumannii
atggaatttatttggaagcccgatttgggcgctgaaaagtcgaaaaaaccttccgtctctacggtcaagtttaatgatggctacgaagcccgtattccaaattctattaacccaagtttgcgggtatggaactgcacctttaccaacaacctgcaaacggcaaatgaaattgacgagtttcttaacaaagccaatggcacaaccgcgtttgattggattgacccacaaggcaaaaagggcaagttcgtctgccgcgaatggaagatgaatcaaatcaaatttggtgtttttcagattaccgcagtgcttgaagaggtttatgaataa

SEQ ID NO: 45522 - DNA, 696 bp, Acinetobacter baumannii
atgggcgagaaaatcgctgtagctgaaattcaatcgttgtcaccaacagcagaagttgaactgtttgttattgatacaactaaatttgggggcgatgttattcgtttttgttctggcgtaaatgcgtttcaccaaccgatctactggcagggagaacgctatgaccctttgcctattgaagcaagtgactttgatgtaagcagtcagggcactttgcctacgcctaagctaattctggcaaacgtaagtggcttattttcgtcacttgcggcggagctggacaaccttattggatgcaaggttatccgtaaacgtacatttggccgcttccttgacgaagtgaactttcctaatggaaatcccgaagccgacccaacgcaacatttgccagatcaaatttggtttattgatcgaaaggttaatgaaagccgcgtttcaattgaatgggaattggcatcagcctttgatttccaaggcgttcaactacctttcggtcaggtgaccaagaatgcatgtcgctggcagtaccgttcgccagactgcggttggacaggcggttatttcacaaaggatgacaagccgacagatgacccgaatcttgatgcctgcgggaaacgggttagctcttgtacttgccgatttggtgaaaatgccgttcttccatacggcgcattcccaggggtgcagcgcgtatga

SEQ ID NO: 45523 - DNA, 750 bp, Acinetobacter baumannii
atgatcgacacacgcctacttaatgaaattaaacaacatgcgatggattgttatccaaatgaagcttgtggctttattgttgtcaataaatataagttagcgcttactataaaatgtcgtaacgattcgccgttcccgaaaactcagtttcttattaatcccgatgagtatcttcgcgcagaacaggaaggtgaaattgttggtgtatggcatacgcataccaatggcaatccgaagccaaccgaatctgatttggccggctgtgaagtgacaggcttgccttggtacatgctaatggtcgagaagaaaggggacgaattccactttaacgatctcgtagagttttcaccaaccggatatgaagccccatacgaaggtcgtccatatgtatatggctctttcgattgctggacgctttgccgcgacttttacctacgtgagtttggtatcgaacttcgtgactacccgcgtgtagagaagttctggaccaatgaagaaaccaattacttcatcaataagtacgaagaagtagggcttgtcgatgtgacaaatcagccccttcagtacggcgacattctcttcattcaaaccgacggaagtggcaacccgaaccacgcagccatttatgtcggtacagaaaaaatccttcatcactgcgagggtcgtttatctcgctacgacgcctatgtctacggctcctactggcttaagcacactgttaagcaaatgaggcacaaaagtaaatgttag

SEQ ID NO: 45524 - DNA, 579 bp, Acinetobacter baumannii
atgttagtcgatgtttatttgcatggagaacttggaaagaaatttggcaaaaagtggagcgttgccgcgcgaggtccaagtcacgctttaagacttatcaacgcaaatacctctggttcattggtcaactggttgcgtgaaaaagcagccaaattcgctcattaccgcgttttatgcgaattccaagatggaaccaagcgtcaattatctgatgaggattttggcttggttcacggtgaactcaaaaccattcgttttgtacctgtggttgtcggtgcaggtggtaatggtgtcttgcaaacagtggtcggtgttgtccttctagttgccagtatttggtatccagctttattaccaacagcattcgggatgctcgcaggcggtatctctcaattacttgcgcctaaacctaagaaaaatggcgagtcccaacgaagaacgtcccattacttcaatggcactgaacagaccgaagttcagggcggaccaattcagctcatttacggcagatgtctagttcagggaacgcctatttcagtcgctatgtcgattgaccagttgttgtttgaaggcgaataa

SEQ ID NO: 45525 - DNA, 11184 bp, Acinetobacter baumannii
atgaacgctaaaattaagaaatttggttttcctttaccaattgcaggggcttctggaggcagcaaaagcccttccgtgccgagagaagatccagataaccttcaatctagcgcgtatgtaaatatcattgatctaattggcgaaggtcaaatcggtggtctggtcgataacgttgacggcgacagtcttaccgaaaaagaaaaatcaatcttttttgatggaacacgcttacgtcatacaaacggtgaactgaacttcgcgaatgtgtcttgggcggaacgggtcggtttacagcgacaagactacatcgaaggatttggcgaaggggtagagactcctttttacaaaaacgtacagcttaaatccggcatccctagcgcatttacggtttcaaacccgaatgcagatcgcgttcgcatcattttggccgtgaactctcttttgtctaccgatcgcagctccggcgatacctatggcacttccgtagagttccaaatcaagttgtcggtaaacaacggcccttatgaaatccttgcaactaaaaaaatcactggtaaaacaacatcacgttatcagcgttctttctctttcgaccttccaaaaaagaaagctgacggtacaccaattaccgcttggtcattccagatcacaagaacaaccccagattcaaattcatcgtaccttcaaaacacaacattcttcgagagttactcggaagttgaattaaccaagttttcatatccaaacgttgcattggtcgctacccgattcagttcagaaacgtttagttcaattcctaaacgtgagtatctggtagatggtctattaatcaaggttccgtcaaaccgcaataaagacgggtcatacacagggccttgggatggtactttcaagcttgagtcatcaagtaaccctgcatggattctgtatgacctgttacttagcaaacgttacggtctaggcgaatacattacgcctgaaatgatcgacgaaagccgtttgtatgtaattggtcagtattgcgatcagcttgtagacgacggttttggcaacaaagaaccgcgatacacaattaactgcgttatcaatactcgtgttgaagcgtatgacctcattgtcgatatttgctcggcatttaacggcatggcgtattgggcaggccatatggtgggctttaccatcgatgcgccaggcactccgcaaatgctgttcaacaataccaatattgttggcgatttctcttatcagggaacttcgaataaagaccgtcattcagtcgcggtagttacatggaatgatccgaatgacgactacaaacaagttccagaagtagttgaagaccctgaactcattgaacgctatggcattcgcaaaacagaagtcatggcattcgggtgtacgtcacgcggtcaagctgctcgttatggccgttggttgctatacagcgagcaccaacagtcagaaacaatcacattcaatgtcggcattgatgcagctctcctattgccgggtgatttgatttacgttcaagaccgtgaccgcgcgggtaaacgttttggtggacgtttactagattgcacagccaaacaggcagttcttgatgatctggttgattttggggaatttactgatttgacgcttgtgatccgtttagaagatgggtcattagcagagcgcgtaattgcttctcataccaaaaagacagtaaccgtttctggacacaccaaagaagtaacagtggtggaatgggctgaagccttgacggttatgcctgtcaaatacgctttatggattatcaaagcggcagaattacaaccagtaatcgctcgcgttgtaaacgttgctcaaggtgaagaaaagggcacttataacattactgccgttcctcacaatcctaacaagtatcaatctattgaaaatgatttgatgcttgatgttccgccgacttcaatcttgaactctcgcaatcaggaacctcctgcaagtgtcgagattaagagtgaaattattaccactcaaaatgtcgcaaaaactcgcctcgttattagctggaaagaagcgaaaaatgcagcgcgttatgaagtcgaatggaaacgcaatgatggcaactgggtcaagcttccacagaccacttcattaagtattgaggttgaggatgtatacgcgggagcctatacagctcgcgttgttgcgtacaacctttttggcgcacgttcttatccgaagtattcaacaagcaccgacgtaaaaggaaaagttggcaagccaactaatgtcctttctttgacaaccacgccgttattgttcggcatgaagctcgattgggtttatccggcaggtaactctgacctatcacatgttgtcattgaagtgagtgatcgggctgatggttcaaaccctagattgctcggtaatgtttcatatcctacaaacaccttgactattcagggattacagggcggtcttgatcaatggtacagaacgaaaaccgttgataagtctggcaatgaaagtgattggtcgaacttcgttaaaggcacgactggaaatgacccagatcaggtacttgatctaatctctggtcaaattggagaaagcgaccttgcaactgaattacagggcaagattgaaaattcagtaaccgtatctgaagccgcaaagattgttgctgacaacgctcaaacggcagcaacaaacgcacaaacagcagcgacagatgccaaaacagcagcttccgaagctcaaaaagcagcaagctctgcccagacacaagcgtcatcggctcaacaaatcgctagtgaagcaagtgcaacagcggctaacgccaaaaatgcagcagaccaagcggtaacggctgcaaatcaagcaaaaacagccgcagataatgcagcgacaacggcagctacggcaagttctactgcatcaaaagctcaaactacggcaaacgatgcagccgcagccgcatcaaaagttgcttctgatttaacaacctcaacaaatcagttgaataagaaaattgctgatgaaactgatgcacgcacagtggcaatttctaaactgaatgatggcctgacaattgaaacatctcagcgtaagacagaagatgcggcgctgttaagcaatattgagacctataagtcgagcacaaatggcactttgtctagtctgcaaacgcaaattaataccaacgcgacaaatacaagcgcaaatacatcaaaaatttcttcgcttgactctcgtttaaccacaaacgaaggcaaaacagcagatgcgattaatgcagcggcaacagctcaacaaaccgcaagttcagcggtagacaaggctaatgctgttgcaaactccgttactgctcttaaatcagaattaagcagcggaaaaggcattaataacattgtagctcccttctcggatccgcaagaacttccagctcttggtggggcgagtcgtaccgtagctttggtggactctgcgttacgtcgaaacggcaaggcttacaaagtgtcattcacggcggcggctcattatgtgtatttcggcaccgctcaagccgctctagcaccatcacaaatggcgatgcaagttgaagcggggcgcgcttatacatttagcgtttggttgaaggctttatcaacagccgttccgtcattccgtttcaacatcctgtggtttattcgtgaccctagcactggaaacatcacaacaaatgccggaatcatttttccacaaggtcaaacagattcttacattgctccgaacgctaacggccaacgatactcatttagaccagtcaactcacctgcaaatgcaatcggcgctaccgtctatgtcgtaggtaacccttcagggccttctgccggcgaatacctcatcgatatgttgatgcttgaagagtctgtcggttccgaaaagcctgcttctacgtggacggcgggtcctgctgatctaaatgcgattaagaatgccttagatacaaacgctgtagcaatcaacaacctaattacacgcgtttcgaacaacgaggggaaaattacatctcaaggcaatttgatcacgcaactaaacaacagcattaatacgattaatggaaccctttcaaacaaagcggatgctacagctttaaatgcattaacaactcgcgtttctaatgctgaggggcaaatttcatcacaagggtcgtcaattgtctctcttcaaaacgatctagcatctaccaacaaagccgtttcaaccaaagctgactcaagcgctctcaattctttggattcaaaagtctcagaaattgatggccgagtaacaagtaatgccaacgctgttacatctcttcaaggtagtgtttcgagcattgagaaaggactttcaaccaaagcagacgcatctgcattaaacaactactacacaaaaactgaggctgattctgccgcctctggcgcaatcgacaagttcaacagtcaattgacgattggtggtgtaaacgttgttgcgaactccgaagctcctcgcacttcaactgccgcaacgaatcgcgaatatttactgtatgaacgtagcgccgaattaaaagcgttctatgacgaaaaccttgagaagccaatcacgatttcgtttgaaatgagcgttcctgtggctggaccggttcaagtttattcgtcaaatggttctgctcaccaattcgttacttccgttaatgcaattatcgtaaatcaatttgccaaatattcagtaacagttagtccaaaagcgcatacggcaagtacaactgtttcgacaattgagttctatggaacgtatggaactggccgtatcccgacgattcgtaaattacaaattgaagcgggcacaaaggctaccgcttggagtccaagccctcgtgatacaaaggctgcaattgacgccaatgcttctgcaattcaaacgacccaaacaaaagttgacaatatcgatggtcggctaaccactgctacagattcgattacgtcactaaattcgcgcatgtctacagccgaaggaaatatcaacagcacaaatactgcggttggtggactttcgacacgcatggcaaccgctgagggcaagatcaccaatcaaagtgattcaattgcatcgctacaaaatagcgtcacctcaatcaatggaacactggcaaacaaagccgattcaagcgcggtcaataacttaactagccgagtggaaacagccgagggcaagatttcaagtcaaagcgggcagattacttcgcttagcaatagccttgatctaacaaacagtaacttgaacgacgtaaacgttctggcgcgactgttatctcttggcaagcctctacgcgacgatccaactttcaaaacgacctctgctggtggtttatctgcatacagtttccctgcgggaacttcatgggttaagcaaactaagtcaacagacaacccaactggctcaacccatgaaatgttgatcaaagcaactcaagcgttgggtggtggttggtatccaactgcacctacgcttgtactcactgcaaataaaaccttcttaattaaacaaattattaagatgccagtgggtacaaaattacaagccatcggtaatgctacgggtacgggtggatacatccgaatcttgggtaatgatctaggaactggcaaatttgaaacgtactactctgtcgtacaaggtggggctgatttaagtggctctactattcaaggtcatttccgcgtaattgccggtactaacccgccagtaccaacggttgataatccagtctttgtgattcttgcttcatacgaagtatttgatgtaacggctgtaaacgacaccattccaaaagcttatagcgatgctattgcagccaatgcgaatgcgattaacaccctgtcaaacactgtcagccagcagggtaataccattacttcccatagtaattctattactcaactaaataacagcatttcaagcatcaacggcgcactttcgagtaaagcggatgcgagcgcattacagtcgcttgattcaaaagtaacactaatcgacggcaaagttacatctaactcttctgcattaacagcgttgcaaagcagctttgagggaattccaaatcaaggcgtgaacttgctcggccctgaaatttccaacccaatcgaaaagccaaattggatttcaggtcttccatttgaagttattcaatcaccagatacggtgaatgtgcgtgcgttccaattcacgatgcctgccaacaccactagcggcacttacttcaacattggtggcggccaagttccgcgacagtggctaacagaaggtacatacatttttagttttgttgccaaaactgttggcgggacaccaccgcatgctattgagtggcaactctacaatgtagatagtacacgcctgcgctttaatattaccgcaacattaacccgctatagcggggtgttcacggtgcccgctggtggtgccgctgcatgtatgctgttaatcggaaaccctacaggcaaacctgcgggacaagttatcaatatcgaaagaatgatgcttgaacggcaagttggcaacaacacaaccccttcggcttggattgcaggtagcgacccaaccggaatgattctttcaacgcaagccaaggcgactgatttattcaacacagccactagccaaaacgccgcgactgcgggacgcgtcactagcctcgaaagtcgcatgacgaccacagaaggcaatttaaacaaaaaggctgatgcttctgcgcttcaaaacctcgacacgaaagttacgaatgtcgatggcaaagtaacgtcaaataccaatgccattacagctttaagttcaactttaagcaacgctacttcaagcatttcaatgaatgcgggtaatgcacagggcgattggacattctttaatacgtcaggcgaatactcaattgttgcacaagcggatggccaagcgggtcgtgttattcaacttggaaataatgctggcaatgatattgtttggatgcatccgaataacttcattccttttgatgcaactaagacatatcgacttcgtgcgcggtatcgccgtcgtgccggaacaggcacaatttacctcggtgtctctcagaaaaccccagacaaggcactatacgtaacaacagccaacgcattatcgggcgatatggggtcttctaactatgttgttaatgcgcacgcacctgcgatcgatgaatggcaagaaatcgttgcgtatatcaaaggtcgatcagcaggagcagcatcgggttcaggctcaaaaacaagcccacgtactgtttcacaacaagcaggcttcatcacgccgatgtttattgcaaactattcggcgcaaacgggcattgttgagcttgattacctaattctggaagatgcagaggcaattgttggcaatgatgcaaatgcatcagcgattagcgctcttgataccaaagtatcagaagttgatggacgcttaacgacagcaacaaattcaatcacttcgcttaactctcgtatgagtgcagcagaagggaatatctcagcggcaaactcggctctaagcggtctttcaacgagaatgacggctgctgaaaatggtttaaccaatcaaagtaatgcgattactaatttaagtaacagcttaacggttacaaccaatacagcgaacgctgcattgcctaagattcagggcggtactggcgcagctaagttatttagaggcgttcttgtatggcagcaaaacggcgcaaatctaactggcaatatcgtaatccaaacgccaattaccttcacaaataaaatgttccgactttcacttactggctataactacttggccgctaagaatgaaattaatctgaacattgggggctatgcatattcgggcacctctctgcttcaacatggagtggtaaattcgggcaccatgccaattcgagttcgcatgggtgtccgaaatggcacagtagtcgttattttaacttctcaggcaccaggcgcttactggcaatatccaaaattcaatatcgacgctgaaattggctacacaactccaccagatagttgggccgatggttggtcagctagtttcatggctgaggcagacctcgcatctaatggcatttctgcaatcattgagccgtctttattagacatttcaacaacgcttaatgccactgcttctgcaattagtaatctgacaaatactgtgtctcaacagggcgatacaattacttctcacagtaattctattaccaccttaaccaacaagattactaacaatgatttatcgaatcttgttcttaatcctgatttcgtagacccgaaaagcgattggacatctggcgtaattgttgatgcgactgacgcagcgcctaacccgccttctgcaaaagcattaagactgaataaccgtgatagttattacggtcctttcgtcaaatgtaatgttggcgacatgttctatgtttcggcttggtttgcgacgccaaatacatcagcaaccgcttctgccgtgcttggtttcaatactcggaacagcgcaggcacttacacttggtatagcgttgccattaagtctacggacaaaaatgcttggggtatggtggaaggttatttcactgtgccaaatggcatggttgatattcgaccttggcttcaagtaagtattgctgcgtcagaagcagcggggcagcaatggcatgttacgaacattcaagtacgtaacattacaggtaataagaagttagcaaccgacttgcaagcaacctcgtccgccgtaactgatttaacttcaaaagttacaaacatcgacggtcgtttaacttcggcatcaaataatatcgttacgctcaacaatagcgttacaaacatcaatgccaccctcgcccagaaggcagatgcgacagccttaaattcgctctctaatcgagtaaccactgcggaggggaatatcacaagccaaggtaattcaattacctcattgactaattccctagcggttagtggaaaggcgggcacaaaccttctcatcaaatccaatgtagttggcacttatgatggtgtctcatacccacaccatacatacaaactcggtgaagattgggaagttggggctacatatactttaatttggtgtgctgaacataaacgagggactggcgatacaaactcatcacttgctgtatacgcaggtggtggctcacaacatctgcaagccgtagtaaatacgaatggtaaggttgtcagcaaagttacctttgttaaaaacagcgcagttgcctctggcccaattatccacttctacatgctcaaccgtccgacagccgacaagggtagcgttggtacggtttattgggcggtgcttgtaaaaggcgatgtactcacgactgatgcttggattccaagcccatatgattatatccctgatagcaatgcaaatgccgctgctatcgcaaatcttactaatacagtaagtcagcaaggcaatactattacatcaaatagcagcagcattacctcgctcactaatcaaatcggtaacacgaagtcatattcgctggtgactttccgtaacggctctgccgttggcatgccaaaggcggctggcgtctacactggaaacaatacgcgattatatggatttgggcgcggtttaaatctcattgtgtttaaaaatggggatgttgaaagctgtacgcaatatgacacctatggcgacatcgtatctgcatgtaacgccatctatgccgctatcaaggcgcttgcatcgggaacttactttgcaatcgtgggtacagataacattggctcagttggaaattcaaacccaaatactgatttacgtgcgcttttacttgcttctggtgctggcgacacatatttcagatcttggaactggaatgctcttcctatttttgtaggacgcaaagacctagatgcaggcaatggtattctcggtatgtttgattcgactgttcctaatcagtggattgaatacccgcttagttttgtgaatggtgtacctgtaggtttaggtgactcccgaactttaaccactcaactggatgcaaatgcttctgccatttcgtcattgtcgaacacagtgactcaacaaggtaaggatattgcttcacatagcagtagtattacctcgctaaacaatagcatcaccaatattaacggcacgttagcaacaaaagcagatagttcggctctaacaaacctcgccaaccgcgtaactacaaccgaaggtgcaattacctctcaaggctcaagtattacttcgctgaatgcatctgtgaatggcttattaaaggatgttgcagtatccgatactcgatctactaatcagcctccatcgtggtattggtcaaactatccattgcgtatcgttcgcgagttcaagcaagcctctgtgctaggtttgactggcatgggtacatatgtctcccttgaaacatacgtttattggattgacccatctggtggcccaatcattcaaattgcacgaggttcttcttcggcttttactgctgaacgaagaagtgctgattacaactcgtggttcgcatggtctcaggacattaaagcattgagtgatggcttatcgaataaagctgaggcctcagcgctatcttcacttgatgccaaggtatcaacgattgatggaaaagtctcaactcaggcgacaagtattaccaatctgcaaacaactgtgggtggacatacggcgtcaattcaatcgcagcaacaatcaattgatggattgaaatcaagagcaactttgaagttgcaatccggcaatttaattggcggtgttgggattgagaacgatagcaaaaccgttgatttcattattcaggctaacaagttcgccatcgctccaccatctaatgccgcagcgggttctgtagcgcctaaatacgcatttgtttatcaaccgacagccacaacgttgccaaatggaacagtcgtacctgccggactgtatttggacaatgcgtcaatcggctatatcaacgcggaaaaaatcaatgcctcaagtttaagtgcaattagcgcaaatcttggaactttaaccacacttaaggatccaacgaagcctaatggagcgcgaatggttattacaggtagtttgactaccgtttatgacgataacaacgtggcacgtattagattagggatttggtaa

SEQ ID NO: 45526 - DNA, 315 bp, Acinetobacter baumannii
atggcaaacgctagacttgaaataaggtatccagataactcaatcgcttatgattcgacaacggatcatgtaattacttttgtcactactgtaacgattcaacaaagttcttacagcaagcaaaacattgcaggaattaatgatggacctaggtgggctgttccaactgacgccatctacaccaatggtagatacataatctttaatgtagaaatcacctttggaaaaactactggtggagcacctgtaatttatgcaaagcatgattggggcctacctccagaaacaaacacatttaaaatatttcatcactag

SEQ ID NO: 45527 - DNA, 735 bp, Acinetobacter baumannii
atgcccataggtattgaaattaaagacgatactggtgaagttgttctcaacagtgaaagcaaagtcttagtaaaagctggtgaaatcgtatggactgcacaagatatgaccagttctaattgggcaacaggtgctcgtaaccctgttactggaaaatacgaaacgctgttcgtagcgccatataaactagcaagggatgatcaaataaactggtggcatgctgacgatgctgtaatttttaacccgcaaacattcacaggtagagattctcaataccaaccaggtttatatcaaggcattcatcagggacggcagactatatactgccgtcagtatacagaagccttagctataagctcatcttcatccgcatatttagaagtacgaaatgctaacaatgaaattgtatgggatttgcagaccttcatgaattctccaagaattcttaaaattggaacatttgaagaaatggttggaattgatgaatggaaagcaaacgttatacctaacggtgttccgggcaagatgtggatatgggttgatggtataaatttcttctggttcaacggcgaagggggtgatttgtacccacttcctcctacacaaaatttcttactagcttgttttaaagatacaactctctatttgcaactgagattaagtgaacctgctatcggtgatacagataccagatcttgggtaacaactatttatgtaggttatatgccaacttaa

SEQ ID NO: 45528 - DNA, 252 bp, Acinetobacter baumannii
atgtatttattaatacttactttgattttgaatggggctgaagttaatagcgtaattgctggggaatttaaaacagaaagtgcctgttccgctgaaagggccgaaatagctgtcgaaatggcaagtaatgaagcgcatatggaaaagctaaagggttatgacaaagtaatcatgaaatgtgtaaagcaagaagttaaattgaaccgacccgaaatgccgaaaattttatggaatggtaaagaaattagctga

SEQ ID NO: 45529 - DNA, 204 bp, Acinetobacter baumannii
atggcattaaagcagatcacgaaagatgaagctaaccttttgaacgttcttttagggcaagtcaacttgctcgaaggccaaaatggaaagccggttgaaaacttgaccttgatttacgatcggaagactcctggtctagctttggtcggactggtctatgcagatgaaaccactactactgaagaaaatggcggtactgcgtaa

SEQ ID NO: 45530 - DNA, 393 bp, Acinetobacter baumannii
atgaccgaaccagtatcaactactatcggtggattcgctgcttggaaggcatttggcatgactatcgtagtcgcaatctgtgtgatggcagttgcggctgtagtgctcatgatgcggatgccgagatctccgagagagtggggagttggcttgattaccacagtaatttcaagcttggctggcggctctttcatcatcatcaaatttaaccttcacgcttgggcaacagacgtatggggaatgatcgctcttggcggtttcttcttcacatgtggcttgccggggtgggctattgtccgttggattttcaactatatcgaaaagaaggagggttccgacattttcgaagttgcaactgatattaaaaacgacctgaaggagtttaaagattaa

SEQ ID NO: 45531 - DNA, 639 bp, Acinetobacter baumannii
atgagtagcatggtatccacgcttgcatcagtgcaaatggcccagattgcacaaacttattcttggcttcgggcgatgtcaggaggaaagttaacgcaagaacaagtaaccgctggtgatgagatcattgaaaaagcgggtttagaaacttttgccaaactcattggttacaaacttgaatctggcgttacagggcaatgggatatttccgaaaaaggatatgaacttattcgtggatttgaaggtttcaggaatacggcatatctggatacaggcagtgtaccgactatcgggttcggaacaatcaaatatccaaatggcaaggctgtcagaatgggtgatacctgcacacgcgctcaagcagaagaatggctcaaaaacgattgtaagtgggttgatgcatgtcttgataagtgtgtgaaagtgaaggtgtcgcaaaatcaattcgatgcactggcttcttttgtttacaacgtaggtgagacagctttcgttaaaagcacaatgctggttttactcaaccaaggcaattttactggagctgcaaatcagtttgatcgttgggtttttgacaacggtaaacggattcctggtttggttaatcgccgttctgctgaaaagaaattatttttagcatga

SEQ ID NO: 45532 - DNA, 1122 bp, Acinetobacter baumannii
atggcagaacttattaggaattcagatgtttataaagcgaatgcattgattaatgcaagctacgctttggacactgctgagcaaagaataattctactcgccattttagtttccagaaacaagaatgcagatctgactgccgaaacgattatcgagattcctgcttccttatatgcccaaaaatttaatacaacagtgagcgcggcatataaaacactgaaggaagccgaagataccttatttgaaagacgtttttcttacaccacaatgcgaaatggcaagattgaggtggttcggtcacgttgggtatcacgagtttcatacgttaaggatgatgcattattaacgatcaccctagctcctgatgtgattcctctagtaaccaagctagaaggaacctttaccaaatatgccatcgacaatttacgcgatgtgaccagtaaatatggcatccgtctgtatgagttggtcgctagttggaaaaattcggatatacgtaaaactcctgtttatgacttcgaggacttccgtgccaagatgggccttcttcctcatgagtatagagacaagaaaaatcccgaaagtacggatatgaccaacttcaataaacgtgtattgaagccggcaattgatcagattaatagttttactgacctgtttattactgaaaagaaaatcaagacaggacgtaatatcacgggcatttattttgaagtaagtttaaaaaccgataacttcattgaaggcgaagcgaaagaaatccatgacagcaagccttcttccgattcagctaaaaagacaggcactcctttagaaaacattaggcttccaaaagtatcgacccaagagtttttgggtagtgatctcagcgaagaggaccttaacaaagagaacccattaaaagaatttatcgttgaatctggcgtttataagtctgctattgaaaagccagtagaagaaaaggatgaatttgaattaaatggcataaaacgattgtatgaggctctattaaagctggatgaaggcgtaaccaaggaatacgtccgcgaatatgcccagattaaaggcgtaactctacaacacgcattaattgaactttataactctaaaagaccggcttaa

SEQ ID NO: 45533 - DNA, 732 bp, Acinetobacter baumannii
atgtcccaagttgaaaaacaaatacccaagtatttagattgggcgggtcacttttatggcaatgaccttgatttagaacattacgaaattctcaccattcaatacattcccaagaaagagcggaagctagaaacgcagttaatgacaaccaagtggtttgactataggctgatgcatcccatgcaagccacttattacttctttcggcttttcaaaaatgaatatcgaaacttttatagaaaagctattgatcataaggcggccgaattcgttaaacccattaaggagcgagatttcttactcagccgtgaggccttgtcattttggcgactcagacaggcaattgatgctttgggaatgcgttatgacttctatttaaaaaccgcatttgataaatgctttaaggtgattgcgaatggtagacctttgccacctagacctgctcaactaaaaaaagaagaactgttaattgaagtgttccatgagtgggagtcttattgtcaagcttcgctccagatcgctaaaagtccatattttaccgctacactttttcataacagtccaatgcaagttgattatgaagattttattgttaagcaggtgcggatgcgtcaagtgcagcattatgcattagggacatgcatttatcgctatgatgcacttcgcattgaaaaagctttagagtcttttgacatttcgatcatcaaccaagctattaaatccagtatttaa

SEQ ID NO: 45534 - DNA, 432 bp, Acinetobacter baumannii
atgagcgaatggcagaaagaacttgcgatacaaaacaagttcggcaatagcgctccaatttcaaaggagtctatttacttaaatacggaagaaaagcaaaaacttcaatttcagccgcgtaaaacgtatgggcgtaggctgcctgcgaacgaatgcgaaattgaagaaatgggctacatgaagtttgttcgcaagctgcaagagcaagaacaggaaattgtagtcattaaaacagacggcgaagttgtgcgtggatacatccgtgctgcggatgcagaaacgatctcgcttcgttgttatttgaatggtgataaaaacggtcgttatcgtgcgcgtgttcttttcaaacaccaaatttccgagttctcaccaactaaggggattgaagacctagttgatgagctagagagaaagtcgaaatctaaatcttaa

SEQ ID NO: 45535 - DNA, 1404 bp, Acinetobacter baumannii
atgtctactgctgtggccgaaattcatgaagaagaggtcgttgataaagaactcgaaggcttcaccgaagaaaagtttgattacgacgatgagtttcaatcaaaaattgcggctttaactttacgtgacgatgagtttcttagaagagccgcccatattctgaagccagaatttttcgaaaatcagggtgaagcatgtctggtcgatattgcgctccaacacttcaataaatatggatgttctcctgatcctgcttctgttgtccaaattatcaaggataaagctgcttctaaagtttataagcgagaaactttagcggcaattgtggaagcaaggaagaaattaattggcatctatgtcactgacaaggctttcgttgaagaaaaggttgttgagttcgcgcgaaaacaggcggtatccaatgcgattgttaattctgttcctgatcttgaggcagggaattacgccaagattgaagcgcgtatcaaggaagctattgcggtcggattgaatgaagagggtgttggttatgacttcttcgctcaggcgttgaatcgtaagctggcacgtatcgagaagctgacaggcaaagtacctccgacaggcattactactggctgtaaagaacttgatgatctgctgtatcacagaggttggggacgcaaggagctgtctctattaatgggcggtgcaaaagcaggtaagacgcaagcgcttattcactttggccgtatcgcaagctttgctaaatacaacgttctatatgtaacgctagaagttggtaaagacattattgcagaccgtttagatgcctctatttcaaaagtgatcatgaaagaattggcgtcgaaggctgcaagtgttgcaactgcggtcgagacggtagccaagacggcgggcaaatttattattcatgaatttggttccggtacattttctccgtcacagctaagagcattaattgataggtataagaatcctgggcggaaccctgatggaacgataagaccgccaatcaagttcgatatgatcattgtggactatgcagatttgatgcgtccagatattcgtacaaatgacccaaaagagaactcaagagttgtctatgttgatttacgcgcgattgcttttgaagagaatgtggcgttactgacagctactcagaccaaccgtgagggctttaagtcaacggtagccaaggcagagcacgtagctgaggactttaacaaaatcaggaccgctgacgttgcaatctccatcaacattacagaggaagagagagcgaaaggtcaggctcgattgtactttgcagcttctcgaaaccaagagatgggggttactgtggtgattaagcagaatgtgtccatgatgaggttcttggaagaagtgattagcgtcgaataa

SEQ ID NO: 45536 - DNA, 1095 bp, Acinetobacter baumannii
atgagcgatcaagaaagtttagcggagatattagaccgcattgatatggagtattggcttaaccgcgaagggtttgaatacaaagtaactcgcggaaaaaacggaatccagttgaatgttaaggaatgtccggtatgtggtaactcaagctggaaagtctatctgaatcaggatacgggtttgggtaactgctttcatggtgattgcgaaaccaaattctcgaaatggaagtttattaaggctggtataggcggtaatagcctaagcaataaagagatagtcgagcatgttaaagcaattgctcaggagcagggctggcagccaaagcgcaaaagtgaacccacacaaaccaaaattggcgatctaaagcttccaaaagcctatgacttgccgatcatgggtcagaacctaaagtaccttaaagagcgaaatataacgctcgatacgtgtcgtgaatttggactgaaattctgtcaaaagggttggtttgcatacataggcccaacgggtgaaaagcaataccaaaactacagcatgagaatcatcattcctgtcagggaccttgaaggcaagcttgtgtcttttcagggtcgggacattacaggaaaggctgaaaagaagtatctatttcctcctggtttcgcgtctacgggcacttacctatataacggccataatgccctaggttacgttgaaatcgtcatgggagagggtgcttttgacgctatggcgatatatcaagccttcaaggaagacgagttcctttgcaatgttggagttgtcgcgtcatttggtaagcatctttcggtaggtggtgatgaatctcaaatggctgaactactaaagcttaaagatgagggattggagtgcgtgacgattatgtgggatggagagcctgccgcaattctgtctgcgatcgacgcatgtttaaagataaatagctttggcataaaagcaaggttggccacgttgcctgctggatgtgaccccaatgaagtcgaccctgaaatcgttcgcacagcgtatcgaaaagcgataccaattacgccaattagcgcagtaagtttacgcattaagtatatgggtaaagtctga

SEQ ID NO: 45537 - DNA, 555 bp, Acinetobacter baumannii
atgagtttaaaaattgtggtcagaagtgcctactcattgcatacgagtgggacaaaatattattcgatgttcttgttatcggtacaggacggagctaaacgcaacacgcaattattcaaaatttatggctcagcggtaaatcaaaccgctcaagtcaaacaccatcaagaaggtaatggtgcaactcttgataccgaatttaataaaacactaaaagtaaaaggtaaagcaggtgaatatagcgatttacgtgaaagcgaaatcttgcacgaatttgataatttccatgattttattacttacttgactctcgactctcagattaatgccattagagcgcctttcgcatcagcgattaccgaaaagggttttgaaaaatacttggaaaccttgtctcaaacgttcgggattccagttgatgacatgtacaaatttacattcaactatgaatcagaggaagaacggcaacgaaaacaagaagaggaagagcgtaaggcagctcagctcatggcacaacgacaagaattttatggtgaagttttggggtcttggtaa

SEQ ID NO: 45538 - DNA, 492 bp, Acinetobacter baumannii
atgaacagagtaattattggggttccacactgtcggtttatggtgacaaaaaccacaacgaatgaaaaggttttggagctcacagaatattttgctgtccacaagcatactcaagatgaagtattaggcttggcgatcaaggctgttgattaccatgataacaagggcgggtatcaccgaacggtcgaaattcttgaaaaatacgaaggactttcttactcaacagtagcagaaagggtaaagaatttaagtaaggctgctgtacgtaatctagttgatgaattgtctaccaattcggattcgattaatccaattgaatatgctcaatcaattttcggtcgcgaagcatccaatatttttgacaaagggcgagaagctgagatcaagtcaatttttcaaaattattttggacctatcagaagcgaactgagcgaattaattcttgatacagatgagtatgctgcctataaaggagttcaaggatcatggtaa

SEQ ID NO: 45539 - DNA, 609 bp, Acinetobacter baumannii
atggtaactaaaactcttcctgtactcgatttggaattatccagaagcggaacaaatgcctattactgcgatttttgccctcatactggcaaccgtcctaattatgctgcatgcctaaagcgtatccataatgttcaggagggaaatgagcgcgaggtggatgcagtttgcgtagtcgctatccacagacatcactgtgaagctgccgaaatgcgtgaacgtgaaattgaggcaggtaaggctctctattacattgatcgttcagaaatgcgaaaacaagttgggaagcggctggctaaacaaggaatttctatttcttctaaatttgattataagttagaacttactaatattaatggtgaaaaactagataaagaaattccagttaattcaaagggtaattattcattaagtgatgcaatcaatactaaactaaagaaaaatagtttgaataccaaagatgatcatgtagaatcgcaacaagaaaataaagtaagcgctaacttatatatcgagagtgagagcttaactgtaccaagtatcgagagcggattatcgcttttagaaattgctaaccgtttcaaagcaaacacacaggaaaaattatga

SEQ ID NO: 45540 - DNA, 510 bp, Acinetobacter baumannii
atgagcaacgcagaagatttattagaagctttaatcaaggcattaaaagagtcaaatgtagatgctgaggaattacgcttcatgactttgcttcctgatcacatgcgcaagattcaggatttaaccgaagagtttgtaaaagctcacgttaatggtccacaacagcttgaagtttacatgagagccattatgggggtggttgcacaggttcaagcagcattagtcgtgaataccggcacagaatcaattcaggaatatgcacaattattggctcaaaaatcagaagatgaatatttgcttgatctaggtcacatgcttcgtgattttaccaatcattggctagcggtctttctgcaagctgcaaaagagcatttcggcgaagaagtatttaaagctcatcaagcccatgttagagaagtgattaaaaacgctaaaagcgaaatgctgaaatccaaagaaggcgattccccatttaaagattcatttattccttcatttgcaaagcagtaa

SEQ ID NO: 45541 - DNA, 1704 bp, Acinetobacter baumannii
atgaatagcgatcagttactagaggctttaaaccaaattgcatctgaaagctcaaaaaatgaaaaactagctttactcatggattttgaagcagaaaaggggttgttcagagaagttctgcgtttggcatatgacccgtttattgtctttggaattttgccaaaagcagaagatgcaggaacaggggagttaatgtttgatgaggttgatacccttgagttcctatctaagcttaataaccgtgaactaacaggcaatgcagcgcgcgaagcgctgcgtagccaactggctcaattatcagagaagtcaggcgagcttttaattcgaattttaagaaaagatttacgtgcaggttttagtgatgcaacgatcaacaaagtcgtgcctgatttgattcctgtatttccataccaacgctgttcattgcctagtgaagtaaagctgaaggcatggccgtggaaagatggcatttatttgcaagaaaaagctgatggcatgtttgccaacgggaccaatttagaagagaagttcttcttgtcctcacgccagggcacgccgttacctatggagcatttttccgaccttactgcggaaatgaatatgctgatcaaagatgtccaatatcatggcgaactacttgtcgagcgtgatggtgtagttctgccgcgcaaggtaggaaatggcatcttgaattcggtcacaaagggtggctcatttgctgaaaatgaaaaaccgatctatatgatttgggacttcattccgcttagctctgttaagtcaaagggaaaatttgaagcagcatataaacgccgtattgcactgattaaatcgatgctggccaagtttaagcctaagtatgtgcggctgattgatacgcatgttgtccactcattgagcgagacttacgatcacttctttaatgtacttatgcagggcaaagaggggctggtaatcaagcatccagaaggtcactggagagacggtacaagtaaacaccaagttaaattaaaacttgatgcggattgtgagctggaggtcgtgagcattaatccgggtaaggtgggttcaaagaaccaagggagagctggagctttgcattgtaaatctgcatgtggtcaagtcattgtggatgtcgccatcaagaatgaaaaaatgcgcgacgaggtggatgcaaaccctagtgactggattggtcgaataatcactgtgcgttcaaatgccattatgcgtccatccaacagtaaccagaattactcgttgtatttgccgcgtatggttgaggactgctatcgaatcgataaaacggaagctgatgatttaaaacgtattgaagagcaattcaaaaacgctatcgaagctgccaagaagctggcagaaagtgaagcggtggtggtagcgagagcagcgtctgtatcctcagctcgtccttcgacatcttttgcgcggtcttacagcagctcgtccacacgcgctccgaccactacaagttttcgttctagtccagttaagaccgtgacaaaacctagtacgattcgttctgtgaagcctgttacaacgcctgctaaaccgatgcctgtttcttcttcatctacacagaagaaatcgcgtaagattggtttccaatatgattactatgcatttacagattgcatcccttattcaagcggaagtttccaaggttggaagtgtattgatcgggattaa

SEQ ID NO: 45542 - DNA, 573 bp, Acinetobacter baumannii
atgtttgtattgttatctggaacaacgtgcagcggcaaaacagccattgctgacgcgctgaccgagaaatatgggtttaatcgtattgttaccacaacatcacggccgaaacgggaaggtgaggttgatggtttgcactaccactttattactcaaacagagtttgatgcactaaaaaaggctgatcagttccttgagacaaataaacatggtaattatgaatatggcgtaacgattgataatttcaaaaccttgccagatgatcgaaatgccataattattgtcgacccaaatggatataagaagattaagcgttatctgaaagcaaatgaaattaaatatcttggggtttttgtcgacgctgatattaaaagccgtctacaacgtttaattgttcgagcagatcagaaacttgcggaacgtttagaggtcatgattcaggtcgaatctcattggataaacgaaatcaaccagtacgatatgttgattcagaatgatgaaacaattgaagatgccttagagccgattttagatcatgtgcgccgtgcaggacatttagataaaatagcctaa

SEQ ID NO: 45543 - DNA, 621 bp, Acinetobacter baumannii
atgctactaaaatctgttcctggtgttttgcctgcacttaaaaatagcgatttggcaactacgaaattatggaccactcacattgaaagaattacaaattatcaattaaacgccgtaattgctaaattcaagtttaaaaatgaagaaagtcaaattgataaggaaattgaatacgcggttagtcagattaatgacgctatttataaccgccaaatcaactcggtaaaaattgcccgatttaaatcaaaaaaagatcattccattacggtgagcaacctaattgctggtttattgaagctgaaggaagttgaaagaaaggctgtgttgttctcattagaatcaggattaagccttgatgaagtgacaaacttagaagttagacaagccaatgtggcggctagaaactcaaaactagcgagagaaattattaaaaattgccctgtgagtatcaaaacaaactatttattttgggaatcaaatgaggaaaaggagcatgaaaagctcaaaaatttagagcaagctgtgtttgaagcctttggttttgacttcaaactgcttgccctaaaatacgagaatattatttacgacgaatggtttgaatttcttggtcagacgtcgtaa

SEQ ID NO: 45544 - DNA, 429 bp, Acinetobacter baumannii
atgagtggacgtggtggattatcattaggcaaagctgcaaaagtacaagctgaaaattcaaatgcttctgattttaccaagagtgctccagtacaaactgcaacagcaacgccagaagctaatgaaaaacctgtagattttgaaaagcttgatgagctatcaggattaagcaaacctaaagagaaaaaggaccgtgaagcgccttggcgtcagggcattaatattgctcctgaagacttgaaattaattcaacgtccttttaacaacaatattagccaagaaatgtaccttcgtttgaactggcttaaatctatcagctccattggcatgggttctaacaagaccacttttacaaccatgctcaatgaagctttagaagaatatacggctcgtcgaatcaaaaaactcggcgacaattacgacgtctga

SEQ ID NO: 45545 - DNA, 678 bp, Acinetobacter baumannii
atgaaattattgatcgccaattcaaaaggtggcgtcggcaaaacaactacggctaccaatttggctgcatggattgccaataatgaaaaacaagatgtagctcttgtcgaccttgacgccaataaaaattcggttaaatgggggatttatcgtcaagcccaaactttcttagaaaagaccggctcaatcaaaacttatcatttgtttggtcaacctgaaattgacaaagtcattccaaaaattgaaagtgaaacacccaacgtaattctcgattgcggtggttatgactcttctggcttccgtgaagcgctgctttgctccgatgccattcttattccaactcgccctaaccaagctgacgtagaatcaactggggaaattttggaattaattgaagaagcaaataatatccgtgtaaatgaaagggacctcgatccacttcatgtctacatctatatcactcaagtcccgacaaatgcacgtatcacagctttagacgatgcgcgtaatgcgtttaaagaagttgaagattttgcaaaagttctcgattcagtaaattacgaccgtattgcatattcaagagcttatggcatgggtcttggtgttattgagttaaatattggtgcctctaaggcagcagaagaagtaaatgcattggctgaggagttgttcaaatga

SEQ ID NO: 45546 - DNA, 408 bp, Acinetobacter baumannii
atgcagaatcaaatcagacaattagaagatggaacttttgaaataggtacttggattcagaatgcaaatggtgaagttgtgttctttgatgctacgagtgcgaaaactttagaagaagcaaacaagattgctgatgagttggatgatcaggaatttaaattagccaagagcgaaattgatatgcttggcggcattcaaggtgcaaataaggttctggagctcatgaatgaaaacgaagccgttgccgttgaatttgataaaaaccgctttgatattaatgaattaaaattctacaaccaaaaagattttgagcagcgaatggatgattacctagataatggtgagactgcaactatctatatgcagactttgaaatccaaagcctgctgcacaaaactagatttttga

SEQ ID NO: 45547 - DNA, 585 bp, Acinetobacter baumannii
atggcaagaacaacaactggaaaagccccatatgtgtcagaagatgatcttgagattactttggccactcaaacgggcgtaaatgcattacggaacaaatgtgttttgtatttctcacacttccttgggcttcgcgctaaagaattatcaatgttaaaggtcggcgatgtttacgaggtgaagaagggtaagctgaaggatattattcgattgctcggtaatattactaaaggcaaccgctaccgagaggtattcctggtcaatccaatcgctagatcactggtagaagaatacataacaaaagaaagaccaaaggatccagacgcacctttatttttatcgcagaagggcggtccattctcaccaaatagcatggtgaccatgattaataactgttataagaaggctggtattcaagcaaccagccattccggtcgacgttcctttgccacaaggctaataagaaagggcggtgatatttattcaattcaacaattgatggggcatagctcaatcctgaccacgcaaaaatattttgcatcggatccggaattgctccgccaagttgctgaaaagttaaattaa

SEQ ID NO: 45548 - DNA, 420 bp, Acinetobacter baumannii
atgaaatcagcagctactaacaccaaacgcaaactaactgtcgcccaatatctcgacgctcaactaaatgcatcggatctgaatcagtcgcaattggcagagatcatgggtatcaatcaaaacatggttagcttcattgttcgcggtaaaagcaaattacctcttgaacgtgtgcgcgctatggccgatgctttaaaaatcgatgctaaagacctcttcatgcgctgcctagaggaatacatgcctcatctgcttgaagaaatggaagccatgattgagcaacctcttattactgatgcagaatcgaatttaattaaacaaattcgcgaagcaaacgctggccataattttgagtttttcaataacccaagacagaaagaagcctttgatgctttcctagaaacacttaaagccagctaa

SEQ ID NO: 45549 - DNA, 195 bp, Acinetobacter baumannii
atgtcgaaaagtgttgaagttattacacctgaaaccgtagcagatttcttggcagagcagggttctgaactgatctttgagggcaatcaaattaatgtaattaaaggaaaaaatgaggaatgcggtgattttcttgtgattaacaatgcacttggcgaaaatttgtttattaaacttagctatatagtcttatga

SEQ ID NO: 45550 - DNA, 1923 bp, Acinetobacter baumannii
atgaatgagcgcatacatattttaagacaagcaattgtcgtcgttacccaagcactgactaactctgatattgcagtaacgcaagaaggtattgaggcaggtgtgcataaggatccaaagacaggcaaacctgtgcgaattaaccttccatatcttccggacaattcaccagattcgctgattgatgcggttcaaggttttcttgatcaagaggtagcgaagtatctttttaccgatttttctctcaagctaaaaggatctgaagaggtaaagactttaacttcattgttagaagaagcgcgtgtagaacgttgcatggctgaaaaatatcgcggttcaaatatcaatatgaaaaatgcgagccaatttttcattgatgaattgattgacgataaataccaaaaacttgtaaaggaaaaagcttctgatgaagaaattacgcaacatttaatgttgccaatgttacgtgcgttaagtggtcaggaagtctttgaacattacttaaaagacaaaatgaagcatattaaacctgtgtgggacatgcttactccttttaagccagagattgaaaaattaaagtccacaaaagacacaatggatttggctcagcgtatctataaggtactgaaagatgagcctgaattgccagaactccctgacagcgagcatgatgaagatagcgacagcttaccagagccaaaatcgccaggtaaaagcgctggtgtaggcaatagcgaagatgagaatgaagaagatgatgatgaaggtggttctctaggtggagctgttggtgccgatgagggcgaagatgaagaaggcgaaggcggtagtggtggaaaagctaaacaacggcctaatgcagttaagcattcactagaaagtgacgataagaagagtgcccctcctcgtagtgaatttgtggccgcaattctggactcgttaaaagacaccgaaaacaactacagtgagcaactaagcaagaagattgcacaacgcacagcagcggacgttaaaaaatctaaatacgcagtatttaccaatgaaggtgatgtcattgaaccgcttgaagttcctaaacttcattacgatgacaagatgtttaaacgtcttgaagacaaggtagcttcaatggttggtcctatgcagaaagatatggagcgggcaattcaggcacgaagtaaatctgtatgggaaaatggattaaaacaaggaaaattaaacagttcatctttagcacgactggcttcaactggtgattgtcgaatttttcgtaagcgcgttgaatcaaaaaccaaagacgttgctgtgagcttggtcgtcgatatgtcaggttcaatgtgcggttctaaaatccatactgccgctgctgcgagttacgcactatcaaacgttctggatcgtctcaagattcctcatgaagtgatctgctttactactcatacagactcagccacttaccacaagcgtttaaagcaaattcgtgaagcagaaaaaaaatatggcgttagttattcacgctatgaaaacctttatatgcctgtcattaaaggctacaacgagcgcattaatactgaaacaaaacgtcgatttggatggcttcctcactcaggtttaatggcgagtaacattgatggcgaatgtgtagaaattgctgcacgtcgtctaatgggtcgtaaggaagcaggtaaaattatgatggtgctatctgatggctcacctgcgggtggaggtaacagtcgagatctggaatatcatttaaaagaagtggtgaagaaaatcgagaagagcaaggtagacgtcattggtattggaattgaagatgattctgttcgtagattctatgacaaacatgtggtgattcatgacgttgagcaattacctagccttgtaatctcgcgtttacgcagtatgttgttagcttag

SEQ ID NO: 45551 - DNA, 1245 bp, Acinetobacter baumannii
atgtctaacgatcctattatctgtgaaatctgtggtggaaaaactcacgtaattgctaagcatttaaaagaaaaacatcctgaaactacgtatgaagagtacaagaaacagtatccagatagccctttattgtcgcctttagcgcagaaaaagatgcaagaacaggctgaactgaaaagagctaaagaagcagagttagcaaaggcgcaacaagaaaaagcaacagatacttcaacatctaaggaagaaacaacagtgtctactaataaccacaatgtaaagttagcgcttactaatattgaggcaaaaccaaacgatattgtggtgtctaaaccatttcatgaaatctttgatctgaaaggtaaaagcgcgcttagtggttcaggtaaaccgattccaatctcatgcattgagaactctgccttcccggaaatgattccagaaattaatgatacgtatgtatggaacgtgaacgagctgaaggatgtcatgattgcattggagctaaacatcaacccttacgtgtggggacacaaaggtgctggtaaatcagaaatgtttgaccagatcgcagctcgaactggccgtcctcttgttcgtattcagcacacttcaaatacagaagaatctcacattgtaggtatgtggacggttaaaaatggtgaaaccatctttgagcttgggccattagctttagcgatgaagcatggctggatgtatttggctgacgaatatgatttcgcgcaaccaaacgttttatctgtatatcaagctgtactagaaggtaaacctttatatatcaaagaagcagatgcagctaaccgtgtcatcaaaccacatccaaacttccgttttgctgcaacaggtaacacgaacggttcaggtgatgaaactggtctttatcagggtactaacttacagaactcagcgaactacgaccgttttggctcagtgatctataagagctacatgaagaaagaagatgagtccttgattatccagaaacgtgtaggtttatgcgcagaggatgctgacaagttagtggattatgcaaacttggtacgcgagcaatatgcaaactctaagatcagcgacaccatctcaccacgttcattaatcaacgcagcaatgattggcttgcgtcgtaacgattacaagcacggtctcaaattggcgtttactaacaagctcactcaagtcgatcagcaagttgcggaagacttggctcaacgagtgttcggttaa

SEQ ID NO: 45552 - DNA, 666 bp, Acinetobacter baumannii
atggtaagaaatcaagatcagcttttcagagatcatgacaagcttcttcgtcatttggcacaccggaatattagccgacttacctcagtcggctattgcattgacgttgaagagctgtatgccattttctgtgaagttttcgtggtatcgattcagacttgggatgaaagcaaaggcaaattaacgacttatttaactactgcttgcctcaacatggtatcgagattactgaaaaaataccatttgggcgataacagaacggaatacgagtccgacattttgcatcgtatgggtgatggtgaagatgactgtgattatgacgtttttgttgatcaccagagccaaaatattttaggcccatatgagttgatgcagactcttacagaagaaatgcagcagctttcaccgttcgcaaaaattttactcaaattcaccttaaatccgcctgatttcattgaaagagagttgttggcacaagaagccaaatatcagctttccctcaatacgcctgagaaaaatgaatcgcggggaccaagacgtcgcaaattgaatctaagttttgtggctaattgcatcatgaaaacagccgaaacaaacaaagaaaaacgattcattcgtgacgctgtgaaagaagttgaagaagccgttacgcgagttgctatctaa

SEQ ID NO: 45553 - DNA, 681 bp, Acinetobacter baumannii
atgaaatcaaacgaaaacgaaagaatagattttattgaagcaaaggcttttggttgttttggttcaatctcatgtttttcgcgtgatagcgaatattgccaacgatgcccggcatttgaggcttgtgagcagaaatcatatgaaacgcttaacgcgatcaagcaggttgttaatgtaaacgatttactcaaacagcatgaaaaagctcggatggcgcaagaagctaaacgcagagccttacgtgaagaaatgaatgcagccaaaagtctttcttcgggtgggatccaaccaaagaaaccgactctcgttgaacgagcaaccaaggtagagaaagtcttttttgagcctacaccggaacagcaggaattaatcgtgaagctgcctgtaaaagctcaatcgtttgcattgaccttagttaagagcggtttagtgaccgagattaaggatggattggccaaaaacgaaaatgccatgaaaggaaaaactccagtttggctcagtcttgccgtcgaaaagcttcttttgggtggatatacgcgcagtgaactaaaaaaagcgtttatggaagaactcaactggaaagaaaacactgcacaaagccatgtgtcgttagcttttgttcttttgacctgttttgggattgcgaaagaagagtcttccaaattgttaatttccaaatga

SEQ ID NO: 45554 - DNA, 2358 bp, Acinetobacter baumannii
atgttaaaccacgcaatgtcagtgcaatctgacttttcgataggaaaatcattattaacggtagacaaaattgtcgaagctgcaaaaggcttaggctattcatcggtcgcaatcgttgatgacatgtccttacatgcattggtagatttttcgaacaaagccaccaaagccaatatcaagccggtgtttggttgtcgtttgcgtgtatatgacgattctaaatatcgtaagccccctgcctcatctggtattgctgaaaaacgcaacttgatgttctgccctaaagtctacgtaaaaagcgaaaaaggcattaaaggcttattcaaacttcttacagacgcaaactctaaagagcaatattactaccacagccgtactgatctggatgctctatgcaaattggaagatgtggtcgtaacgactggtgatatgtacggtctgtttagtcaccctgatcacgaaagaatcttaaaagtattaaaagcgagatttggtgatgatttatatattgaatttagtccgatcaatacgccattgttcgaccgcttaaactacttaggctatttggcgtatgaacgcgaaaaaattaaaaccgttgtcacttatccttttaactatcttgagaatgaagatgcggacactttggatgtattgagcgctatcgcaaccaatacccaacttgatttgcactatcgtcctattcaatacgtaaaagattttggttttaaagagccaaaattcattttagaccatacaaaagctgctattcagcgtatggctaaatatgagcgcgtcaattcagcggaagcttggaaagaaggtctaaagaatatttctgagctggtggacaaatgccaatatatttttgagaagcagccagtttccctacctaagctaagcactgacgaatttaaaacactatgcgcgaaatgcttggaaggctggaagaaacgcttttctaaagagattcttggatataagccaacgaaagctgaattagatacagtatataaatctcgcttaggctatgagctttcaatattaaaaaagatgggctttgagtcctacttcctgctcgttgaagacttggtgatgtggtctaaaaacaacggcgtgattgtaggccctgggcgaggttctgttggaggttcattagtcgcttatctgcttgggatcacggacgttgatcctatacgttttggattgatcttcgaacgtttcatcaatcctgaacgtcttgacttgcctgatgccgatctggacttcgcttcaagcggtcgctacaaggtgattgattaccttgttgaaaaatatggtgaagattatgtcgctggtatctcgaactattcaacactagcttcagcctcagccctacgtgatacaggtcgtatcagcggtttgaacaacatgcaattaagtgcgaccaagcttgtgcttaaagaacatggaacgtcacttgacctgaatacttctgcggacgctgtgcctgagctagacaagttccgcaatgaacatcctgttatctggaagcatgcaactaagcttgcaggcacaatgaaatcgtttggccaacatgcggcaggtattgttgttgcaggcgaacctatcgttaatcgagccgtgctcgagactagaggaaagtcaccagtcgtcaattgggacaagcgtgtagttgaggattggggcttgatcaagatggacttgctcggtcttgccaccttagatgtattaaacattgcatgtgactatgtaaaagagcgacatggtattgaattggatctattaaagattccacttgatgatgaaaaaaccatgcaagctttgggtcgcggtgaaactgtaggtgtgtttcagctagaaagtagcggcatgcaacaactattgaagaatatctcaaacggtggcgctgtaacctttgatgacatttgtgctgttaccgctttgtatagaccgggccctatggattcaggcatgttggatgactatgtggacttacgaaaaggattaaaagaagtcacctacgcacatgaagtccttgaacctgttctgtctgacacttatggcgttgttgtgtatcaagagcaaacgatggcgcttgctcgtaagttggcagggttctcaatggctgaatcagatcacctcagaaaagcgattggtaaaaaagaccttaagaaaatggctgaattgaaaccgaagtttattgatggtgctaaagcggggtttgtagaggttgaacttgaagatggcacaaagttaaaagtgcatcgaatggagaagttcaaatgcactgatggcgtgatgagaacggtagaagaagcattcgctgaaagcgctgaaattcaatacttttattcataa

SEQ ID NO: 45555 - DNA, 576 bp, Acinetobacter baumannii
atggaaaactggaaagcaattaagaactacgaaggcttgtatgaagtttcagacttagggcgtgtgcggtcgcttgaccgcatggtcgctgttcctcatggtggtcaacgtctagcaaaagggcaagtgttaaaacctaaacaacatcgtgatggctacctgtgtgtatttttaagtaagaaacagaagcaaatttgtccaatgattcacaagttggtgcttgaagcatttgtcggagaaagaccaagtggaatgcaagcgtgtcacggtaatggagataagacagacaacagattggttaatttacgatgggataccgttaaggcaaatcatagagacaagaaaaaacatggaactacagctcgcggaaccaaagtaaacacaaacaaacttaaacctgagcaggtagtggcaattcgcgagaagcggaacaatggtgtgacattacaagcgctcgcggaagaatatggcatttctaacaatgccgtcagtcacattgttttgggtaagaactggcaatgggttggtggaccaatccaagaaagaattttcaaagatcgaggcgctaaccaatga

SEQ ID NO: 45556 - DNA, 1266 bp, Acinetobacter baumannii
atgaaaattaaatcattaaatattttgaatgatggtttagaagaatcagttgccgagcgtatttgggaacaaacagaagcaaacgccaactaccaatttaacaagtcgcattctgtggagtattcaatcatttcggtttggtgcgcatatattcgcgttcattaccctgctgaatactttgccgcaagtcttagcgtggttgatacagaagataagctcactggacttgtgaaagatgcgcgtgaatgcggcattgagattcttcctcctgatattaattattcagccgatcgttataagattaaatccaatactgaaatcttggcgcctttcaatgcagtcaaaggtatttcagaaacgattgccaaagcgattgtgaaattgagagagaagaatcgggcttggaaagtcgttcgctacaagaagtcgagaaagacaggtgaaaccacaccggtctatggtcctgatggttcagttccaccaaaaaaacgttttgatagctttgacgagttcgagaaagcagcatctcaaccaaactcgaaagtgaataaaacaatcgttgaaaatctcagagcaattggggcgtttgcaagcattgaacctagtgagccttcagcgaaagacctctcacgacgaaaggaccaaatgaggctattaccaggattaattattgattctgtaaaagcagatagatacacagatacctcagagccattcctgcgagcttcgttggtcgagcatatgcgcgattgcaagcaatgtaacggttgcgaccttgctggacaggttcatcctgatattcgtttgggtaaaaagatacgatttatggttgtttcggactgtccaacttgggaggaagaaaagaaaggaaaactactcgaaggcgaatctgctcaatatgtcaaagctgcaattaaagaaaatgaattagctgttgcggacggttattacacaacgctcgtcaaagccaaaaaacaagacaagttcttaacgacaggtcaaatcaatggatgtagtcctcatttggccaaagaaatcgagcttcttaaaccgccagtcattgttgcccttggaagtcagtcaattcgctacttattacctgacgttaaggtatcccctagcgatctcgtaggcatgactttctacaaccctaaattagacgcaaccattgtttgcggacttaacccacagcaatgccattttgaccctacaaagctggaaggacttgtaaaagcattcaaggaggttgctgacattatttcttaa

SEQ ID NO: 45557 - DNA, 1089 bp, Acinetobacter baumannii
atgtcaaaaattgaaactgttgataacttcgacgacgaaacgctaaacgagttgtttgcagaactggacgaacaaaaccttttgattgaagaggaagagcaaaagaaaaaggctaagactgaaactgtaagcgcggacgatattcaattggatgaagagctgctggaagacgaagaattgcttgccgctgaacttgaagcatccattgagggagccgcgcaggtaacacccgaagagattcaggagcagatcaatcaacagcagcgagaggcacagcttgatgcagaacaggaactagatctgcaagaagcgtttgagcctaaagtgccagaagccacaccgcacgaaatcgttaatgattcagtatcagttgaggacatgctgaaggaagtggaagcagagcaaaccccaatgccacaaccggaagaacgccctatcctcccgccggtcgaagaatcggtggacacagtatgcgaagagctgccaaatgatgtggaacttcaatcgaaggacattccgaactttgagcctaaacagtctgataaacaggttaaatctgaaaaagaaattgagcgcttcgtctcattgaaatatgcccctgatgtagaagcattcaacagggacattcaatttacagacgccacgcttgatgtagcaatgagaactcaagcatcgcttgcggcgtatcagaatgagcgtgcagcgcgtgctgtagcgcaggcagcaaaggtcaagttgaagtttgaaagtcttgaagccctgctctatgaggcttatcgcaaacacttcttggctaacggtgagaaggtcaccgaaaaggcggtagaaaacgccgtccgtaaagattcccgctggattaaagccaaggagctgtatatcgaagcggaaatgtatgccgatattcataaaggattcgtctatgcgttacgcgaccgtaacgacatgctgattcaacggggtgcctatagccgtcaggaacgtcagggccagctccgcatgaatgaatatcaggaacagcatatccagacctttagccaaggtagagaagccgctcaacatgccatgaaaaaaaatcgaaatctttcttaa

SEQ ID NO: 45558 - DNA, 861 bp, Acinetobacter baumannii
atgaacgtagcaaaacttttagcaaacgcaaagaagaacaaagacgccctcaaaagccgtgaatctaccatcaaaccaaagccgggtaaaaacaattacgttttactgggagactggaaccaagaacgtaacgaagagttctacaaacccttctcacagcacttcattaaggattattcaaaagtcacggacggaaagccagaaacgaccgttcatgtatgtatgtctaaaacttttgatgaagactgtcctatctgcgatgccattgcagaagcaggtcgtttaattggtgccaatgcaactgacgaacagatcaaaacattggaagacgcgaaagcatcaactgtgtatttgctcaatgttcttgaagttgatgattcaggcaagcatgacggtcagcctaaagctcttcaagtcggcaaattaacacttagctcaattctggacatgatggacgattggggtgaagcaatttttgtggatcatcaagttgttaccatcaaccgtgaaggtacaggtcttaatacgaaatacaacgtattaccgggttccaaaaaggttcacgttgatccagaagttttcaaacgtatgattgaccttgacgattatgtcaaacaagcaaacgaagagagaaaacgccttgcgttgggtgcaattagacgcgctgctggactttatgcccctgcagagccgacacacgtccctgctgaacgaaccattggcacatcatcagccttggctagtgatgtgacagatgtttcatacaaagatgtcaccacctcatctttggatgtaactgaaattgatttgggtgatgaattggaagcgctcttagatgatgcgcaccaagaagcaagctaa

SEQ ID NO: 45559 - DNA, 1038 bp, Acinetobacter baumannii
gtggaaaatctaattattctcgttgacgccaattcaatcggttacgcagcgcagcacgctatcaagctctattcaggctcaatgcagactcaggcggtgtttagctttatcaagacaatgcgcgagttaagacaacgctatccgcatgcaggcatggttgttttatgggacggtcgtgctgaatggcgttttgagcgtgaaccttcatacaagagcaatcgcaaatctgatccaagaatgcaacaagagcatgacgcttacaaagcgcagtgcccttttattaaacgtgctttaaaagcgttgggcattaagcaaatgactagcgcgatacatgaagcagatgatcttgctggcattcttgtacaacgtttcgcaagcgatcccaacaatcgtattttattgattaccggtgaccgtgactggttacagctagttaagccaaacgtttcgtggcgtgaccctcgtgatgaaagccgtttcattcattgggctaatttttatgagaaaacaggcttcaaatcacctgtggcatttcttcaaggcaaagcattacaaggcgattcttcggactgcatcagcggtgttgggggaattggtgaagcgaccgcaatcaagattcttgctgaatacggttcagtaaatgagttctggaaactatgcgacgctggattaaagccaccttcaaaagctttgcgatcactttatgcaggcaattccccatacacaaaagaggaatgggaaagccaattcatctatgtggaagacagctcactaacggatgagcaaaacgaaaaggcgcgaaataaagcgctgaaagcacacatggatgcatatgtaggtcaagggcgcagactgttcttgagaaacctagaacttatgcaattgctacgtcctgcccctcttcaaaaagaacacctcgaaatcatccaaggcgaaatcaatccggatgactttaccgagttatgcggcgagttagcttttggctcgattctcaaaaacgtaccgaatttcatgaaacctttttataacggacaatga

SEQ ID NO: 45560 - DNA, 2199 bp, Acinetobacter baumannii
atggaaccaaatttatctgcattagctgacgacttagaaaaattaattggcgacaacgaagaaacgcaaacagtgactaactggcttgatactggcgatccagagttaaactttgcgatttctggacgctatgacggcggtattccttatggtcgcattgttgaaatgtatggtccaccgtcatcaggtaaaaccgcagaggcgactgacttaatgattcgcgcccaagaagctggcggtattgccatgttctttgactgggaacgttcctttgatattaaccttgcgaagaatctaggcttaaagacggagcgtccattctggatttataaaaagcctgaaacttgggaagaaggcaatgttttagcaatgcgtgcagttgagttgatccgcaattcagcaacaattccagacgatgcgccaatcatttgcgtgtttgactcggttgcatcggcaattcctcaatctgtttactatgacaataagggcaaaaagcgtgaaatcgacacattcaatatgagcgataacaccgctctggctcgtgcttccagtacgtcattgaaagtaattgctcagacggctgaaaagtacaatgcaacgttcttatatttgaaccaacagcgtacgaaaattggagtgatgttcggtgatccaacctgtctgagagcggaagttcaggtgccattcgtcgatggtacgtccgcaaccatgaagcaaattgttgatggcaaaatcagcaaggaagtatggtcttggaatgaagtatcgggtcagcttgagccaaaacgcatcatcggttggcacaacaatggctcaatcaaaggaactgacaaagagtggtatcacatccgcgctgtatgtcctgaaacgcgcaatggcatggttgcggtatcgggcacaaatgatcacaaagtccaagtgaaagacaaaggttggattaattttagcgacgttcgtgtaggcgactatgtgattactcgcaccaaacgcacctttgcaggaacagcgcttgagttcttaaaggggttgatcggttttgacagtcacatggcgcgcgtgtcgtcgcaacgtcagacagccgcactgatcattcaggacaatgaaaaccctgaatacgcacagtggaaggttgatctgctgtcacgccacctaaacttcgtcaagcgcgaaatcactattagcaagggcaataaagggcatcgctacgagtcctgttacacccatgagttgatgaagttttacgacttgtgccgctgtcctcacacactgttcaaagatggctggacacctatgcaattagccattgcagtgatggacgatggtaattacaaggagagcagcaagacactgaacctgtcctttaagcgactgcgtggctgtgaggatgaattagacgcaatcggtcaatcgctgtatcaatcatttggcttaacttatgatattcgttacggtcagggtcgtattgactttgatgtaaaaggtactgccaagatcgctgaattgatcgctcagtacgtgccagactgtatgcagtacaagttaccgattgagtatcgcggacgctatgtagcgctcgaattagacgctcctgttgatgaatcagttgtgcattatgcagaagtgacagaaatgcgcttgggaagtaaaaataaaggctcggtaatgtatgacattaccgttgaggataatcacaacttcttggcaggcaatacgcacaacggtttcttggtgcataactgcacaccaggcggttcttcttttgaatattacgcatcagtacgaattgctcttggccgtaccaagttaatggaaacggtcaacggtaaaaagcagtttgtggggcaggatattgcaactaaaattgtgaaaaccaaactcacaaaaccgttccaagaaaccactatgcgtatgtggtttgacaagaatggcgtagcgttctttgaccgccactacaacttagttgagttcttaaaagctaaaggcattttgaaacagtcgggcgcttacattgaatggactgacggtaagaaatatcacctgaaatcgctttgcgacaaactgaaagcagatccaaccggattgcagcagctccgcgcattaatccctaagatttcaccaagcgctgatgacattgaggtcacaccgttgatgagcaatgaagatgaaatggaagctttgtacagtgacgatgcgtgttag

SEQ ID NO: 45561 - DNA, 360 bp, Acinetobacter baumannii
atgaaacatgaatatgcattagatttcgcaccaccttttgtgggattagataacgaactttataacaccttcagattgggtacttcatggtccaaacggttggccaaaggcgatgaagtttatatccaatcatcaaaagataaactgatattcagcaaagcatgtgtagaggatgtgattgtcggtcaaattggagagctgatgctactccacgcacacaacaatcataacgagttagggcaagacgacggacgcagcgcagagcgtttatacaagaccatgcaaaagatgtatggaccgcaagtcctcaactcaccacgtaaaaaagcgactgttatttatttgaggaaaattgaatga

SEQ ID NO: 45562 - DNA, 462 bp, Acinetobacter baumannii
atgagttccaaaaatatatttaaactaaattcactccttccgggtaaataccaagagaaccctctttttaaagataaaaccattgagcaaattctggaggaaaaccaccctaccgctatcattgaattaatacgttttcgagataatacaatcaagaatagaattaaatgtggtttagctacagatcaagctgtaaatgcatttcataaagaagtgcatatgtgtcttgatctgtacatctatacaaattacgactccttaaagagatattacattcgattcaaaaaagaccgcttaaaactcgaattacatgaatataacgctaaaaagaaacaagaagatcgtgaaaagaaaatggctgtagagattgaacgtagattggctcaagaaaaggaactgcaagaacagcttcgtattcaggaacgacaaaaattctatggggatgtgctggggtcttggtaa

SEQ ID NO: 45563 - DNA, 381 bp, Acinetobacter baumannii
atggtcattgaacgtcaaccgcatacagtgaatggcaaaagaattggtacgttttacagcgtcgatggcaaatacgtgatgtatttgcttttggcgcgtggtgagaagacgaaactgctggatataaaaaacagttcttggcgaatgccctctatggctctaatggaagcaaagcgcagaggctgtaaatatattggcgttacacatcggatgggcaagaagtttttatattacatagccagatccgcagactggtacggtgaacattccgctccttctagctttagaggggaatttcaacggacgcttcgcactgaagccttccttttcaattcaacccacactacaaaatatattgcaaaatcaatcaaaattcgctaa

SEQ ID NO: 45564 - DNA, 222 bp, Acinetobacter baumannii
atgcgtcaattgtctaaaaacaaggttattaataaattagcgaacgaactcatagatcaatacggctggacattaagaccaaagcgtaatagtccccataacgtaatagtagatccgaatacacattactcatacccaataccacactccccttcatgctggagagcggagaaaaactgggtggctggcattcgtaaaatcatgcgtggggttcgtccgtaa

SEQ ID NO: 45565 - DNA, 1116 bp, Acinetobacter baumannii
atgagcaattttccatacgctgtcatatccgacacacataaccacaactggtccgcatttagcgaaacaacaccagaaaatgtaaacagtcgccttcaaatcattctgaatgaaacgatgcgagcggcagaagaagtcaaggcaatgggtggaacgcacctgtatcacactggagatttattccatgtgcgcggttcaattagtccttcagtattaaatcccactattgccacttacaaggtaattcaacaactgctgggaatcaaagttcgcattcttgcaggcaaccacgatttagagtttcgcgaagccaaccgtaatggttcggctgttacagctttagaaggcattggctgcgaaattatcaacgagacgtctttgtttttagatgaacgcgttgccatgattccgtggttccaagatgtcaacgaactaaaaagtgaaattgaaagagtaaaacttcaaatcaactctatgccttctcgttcaccattacgaacaattgaaaccgtaagcgattggaccttaatgattcacgcacctgtagatggtgtaattgctggcattccgtcgcatggtttaagtgccacatggttaggttcacaaggctttaaacgagtatttgcaggtcactaccatcatcacaaagattttggcaacggcgtttactcagttggggcgcttacgcacaacagttggtcggatgttaattccgatgccggttttctactggtgaacgattcaaaggttacttggcgatgctctcatgctccgcaatttgtcgagattgatggaagcatgagcgaagtcgatatggcactcaaggcttctggtaactacgttcgctgtacggtcaattcaagcgcaaagcaatctgacattgaaacaatccgtcaatttctcatggataacaatgcaaaaggcgttgtgattctgtcccaaaagaaaatcgtagaagttgaacgcgaggaagtgagttcgatcaaggcaggtgcttctctcgaagtgtccatcaatgatttcgtgaacaaaatgggtattgggagcaaggcagacgacctttccaaattatgtctctcaatcttagaaaaggcacgcatggaggtcgttgaataa

SEQ ID NO: 45566 - DNA, 1941 bp, Acinetobacter baumannii
atgaaaattctaaaagccactttccagaatttcttaaccctttcagaagcttgtttggagcttgatgatcgcggtttattgttaattacaggcaagaatgatgacgatacatcagcaaattcaaatggcgctggtaaatcatcactggtcgacggtatctgctgggcgttatacggtacgacggcgcgtgatgttacaggggatgacgttgtaaatgaaacagccaaaaaagactgctgtgtatctttacagatcgaagatgatggcaagctttacaacattactcgttatcgcaaaagcaaaaaattcaagaatgcattaattgtctcaagcgttgataaagctggcgttgaaaccaacctgaccaaagggaccgacaaggaaactcagcttctcgtgaatgccattgtcggatgctcagcagacgtattcacatcagccgtctatgcagggcaagaacgaatgcctgaccttccatcgatgacagataagaccttaaaaatgttaatcgaggaagctgctgggattgaagtgctagaagcagctcatgccattgctcgaaaaaacttgaacgaagccaagcttgagcatagcgaagcgctgcataaggttagtttgattgacgctcacattgccaatgttgaggcatctctgcttacggtcgagaaacagtctttagattttgaaattaccaaaaaagaccgagccaaagagcatcttaaactttgcttaccgcatcttgcgaccattcgtgaatgtgaggctcagctcgacctagaatcccctgccaaagaaattgaacaaatcaacgagcaaattgaacagttaaaggaaatccagaaacagcacacagccaaaagccttgagcttcgcaaaatttacgtggacttcaatgcacgcgtccatttggccaaagtcgaaaaacagaacatcgaaaagttaaaagctgaaattgctaactctcaatcactagtgggaacgccgtgcaatgaatgtggcaagcaatattgtgcagaagatttgcatgacgccattcaggcccgcgaaacactggttaaaagcaaaattaaacaaaacaatgaaatcatcctgaaagctagggagattgatgaacaaaggaaaaatcttgaggctgagatttcagagcttgaggatcagttaaagcagttaccgactcttcaagcgaaactggaaaaactaaaacaggatgcacaagcccagtcattagcggaagaacgcaagaaaatcgcagaagaggctgtggcgcgcatcaaggcggaatctcgcgagaagcttaatgaagtcagtccatttgtcgctcagttaaaagacttgaatgacaaaaaggttaaataccttaaagccagagaagacaagcagaaagccgcagattcagcacttgagaaagttgagcttgcaaatatggcggtgaatattttcggtcctgctggtgtacgcgctcacattctcgataccgtcactccattcctgaatagccgcacatccgaatacttgggcgcattgtctgacggcaacattcatgcaacttggtcaacgctatctgctacggccaaaggtgagctgaaggagaaattcagcatcacggttgcaaatgattcaggcggttcttcattcaagaaattatcaggcggagaaaaacgtaaggttcgtctggctacagctcttgcccttcaagatttagtgatgagccgtgcaaccaagccaatcaatctatggattgccgatgaaattgattatgcgctcgatgaaagtggattagaacgacttatggtcgtgctggacagaaaggctcgtgagcgcggaacagtgctgatcatttctcatcagagcgggttaaaggactgggtagatttggtcatcgaagtgaccaagaaagaaggtacttcaacggtttcaggagacaacctcaaggcagcataa

SEQ ID NO: 45567 - DNA, 837 bp, Acinetobacter baumannii
atgacgcaaaaagatgagcaattagatgcattcgagcaaatgcttgagagtgaattttcagatgaagatttgcaaatgctggaagattccatcgaagaagaaatcagacaagacgctttgctgaaggaggaaatggaaggcgagatttttgtcgtcctcaacgagtttgctgaacaagccgaacattacatcaaagagatttatgacaaggtaaaaattacacgcgaaatcgactctacgggcaacagacacagtaatttcatgcattacatttctgatgccctatcagcagagacggatccatataacctgattttttcagttcctcgaccgatgatctttgacggtgagcgcgtccttaattcgcacagcgcttatttcaaagatcatgtgcccatgacggcaataggcggggaaaatatgctgttgtgggatttacgggtcaatgccgacaacaatgcgttaatcatcagatttttagctgaaccaaatgtatatgcgccaacagctaccgtgcaactcgatttaacggataggaacattacccatcattttttagacccgctaccgcaaacacaatcaaataattcagccaacgttcagcgtgcagtcttggaattcctagtccggttcttttcctatcgagaaaccgaagatgattacatcctagattcggaagattaccaggaactaattctgcggaagattgatacggactccaatgatctcgtcaatgccatcgtgtcaattaacctgatcatggacaaatacgccgagataaaacgcagagaggaatttaaaagagcgtatgcaaaccgtggtattgaatcatggtaa

SEQ ID NO: 45568 - DNA, 603 bp, Acinetobacter baumannii
atgaaaattaaagccatcggaatcgatccatctttaagaaacttcggattagtcgttgctgaaatcgacatttcaaacgatgactatcctttcgaaattaaggacatgatgttggcccaaaccgaaagcagcaaggaaaccaaaaagactgtacgtaagaactcggatgatctaagacgtgccaaaatcctgcatgacggcatgatgcatatgatcaacaaacataaggtgacatttgctttcgtagagataccaactggatcacaaaccgcaagagccatgtcttcttatggaatttgcatcggtattttgtcagcttgtccagtgccgatgattcaattaaccccgtttgaagtaaaactcgccggtacgggcattaaaacagccaccaagcacgaaatgattgaagctgcctttacagaacatccagaagccaagtggctaatgcacaagcgaaatggggaaatggtattgaaagaaagtaatgagcatttggctgacgcgacatttgcgatcaaggctggcattaataccgatgaatttagattttctgctggcatgatgcggaatgcatttttagctactcgtgcagaaaaaatttaa

SEQ ID NO: 45569 - DNA, 381 bp, Acinetobacter baumannii
atgagcaaagatttttctagtttagaggggatggcgagagctacgaaggaagcaatgcagggcataaactggaacaaggttgctgaacatgctcgccgaattaataccgaaatacagcgtgaacaattcaaagactcatcgcgcgaagatattttgctaactatcagaaaagccgcagagaaagcgaggatagaagcagagatcaacaaggtggctgacgcaatgaagaagcgtgtaatcaataagttttatgcaaatgaatacactgatcactcagacattgcgaaaaaaccacaagcaaagcaagacacgaatttagaaccaaaagaagagaaatcttctaaaccaaaaaccccactaaacggcatcgttgagtggtaa

SEQ ID NO: 45570 - DNA, 2373 bp, Acinetobacter baumannii
atgaacgtaaccaagcgaaatggcgcgacagaacctttttcaccatcaaaaattgaaaaagcagtcaactgggctgtagatggaacgtcggtcgaatcgcaagaagtgattgataaggcaattttactaatttatgacggtatcaaaaccagtgacattcaacaggcattaattaaaggcgctgctaagttagtgtctgcaaccaaagctgatgcatctttggtgtctgcgcgtttattgctgttagatttatataaaaccgtatgcggtgtaaacggcaaagtcagcggtggtggctttcagtatcctcatatcaaagattatttagaaaaaggcgtttctttaaaactgctggaccctgaacttttaaactatgaccttgagcgcattaatgccgctatcaagcctgagcgggacttatcattccactacttagggcttgatacattagccgaccgttactttattcgtgccaatcgcgatattcgcctagagaaagaaacaggcaatatgtcgggtaatattatcgaattgccacagcatttctggatgcgtgtagcaatgggtgttgccttaaaagaaaaacctgaaatccgtacttctgtagcgctggcttattatgagctttattcgaaattagaatacgtctcctctaccccaaccctatttaatgctggtacgttacatcctcagttatcaagctgttacctgaaccaagtctcagacaccattgctgctgatgaaggtgataaccgctttgcttctatttttggagcaattgaagaaacggcgttactttctaagtttgcgggcggtattggtacagactggacgccagtacgcggtgaaaatgaattaatttttggaaccaatggtatttcaagtggtgtagttccatatatcaaggtccagaacaataccgcagttgccgtaaaccaaggcggtaaacgtaagggttcggttgccccatacttagaagcttggcatccagactttatggcgttttgtgagcttaaaagagaatctggtgacgaccgccgccgtgctcatgacgtattccctgccgcttgggttcctgatctcttgatcgaacgcaaagaagatccaaatgccatgtggtctttcttctcgcctaaacgcttccctgaattgcatgaactttacggcgaagatttcgttaaacgctatgaagaactagaagccgctggtgaatatgatttccaacttccggctattcaggtatggcgccatttgttgaccaatttatttgaaacaggtcatccttggatcacttacaaagatgaatgtaaccgccgtaatcctcaacaacatgcaggcgttattcatcacagtaacttgtgtactgaaattacgttaaatacatctaaagacgaaacagcggtatgcaatttaggttctattaacctttcacaagtaatgtcagctccaaatcctttagaaagattacgtgaagttatccgcttggctattcgtaatttggattctgtaattgacgtgaattactaccctagcgaccgcgcatccaactctaacttcaaacaccgccctatcggcttgggtgtgatgggttattacgaatggctggtaaaacaaggtgtggatttcgaaagcgaagaacacttaaagcaagctgacgcattgtttgaggcaatttcttactttgctatcgaggcttcagcagacttggctcaagaacgcggttcatatccatcatttgaaggttctaactggtctaaaggtatcttgccaatcgataacgccaaattgatggaagacggcaaaccattctttgatcaacctcgtcgattcgactgggaggctttacgtgaaaaagtcaaaaaagggatgcgtaactcgaacgttatggcgattgcgccgactgcaacgatttcgaatattgcaggaacaactcaatgcacagaaccgccgttcttgcttgaatacttcaagtctaacctaggtggtacttaccaagtcgtcgatcctgcaattgctcatgtcggtgacaaatatcacttgctcaaagaatcgtattatgtcgaccaactctacatcattaaggcagccgcagttcgtcaaaagtggattgaccagtctcaatcaactaacctctttgcaaaacaaggtacaactggtcgtgatttagatttgtggtatacaacagctaaaaaacttggcttgaaaaccacttactacttacgcaatcaatctgatgcagagaagagcgcttcaatgcgaaccaaagttattgcggaattagctaacgcagctttaggcaaactttcagaaccaactgaaagcgcaccaaagatgtgttcaattctcgatccagattgtgaaagctgccagtaa

SEQ ID NO: 45571 - DNA, 930 bp, Acinetobacter baumannii
atggcaattagcccgatgaagcatacatgggcaaaaggcattctcgaccgcatggaaaataatacgtggtttccgcatgtcgtaaatatggcagatgatgttgccagttataaccgcttaaatgccgcagatcgtttcatgtttgataaagcattagctttcttgtcaaacctagacggcattcaattcaacaacatcaaccagaatattgcaaaacacgtaacctctccggaagtttccatgtgtttgtcacgtcaagcatgggaagaagcgctacacgtcaaatcatacgccacgatcattgagacagtcagtcttgatccaatgagcgtttacatgacatttgaacgtgatgggttattggctcaaaaaaaccagttcattctcaaacagtcgcgattactcggtgaaaaattctcggctgaaggttttgccctttcatgtgtatcaaacgtcttgcttgaaggtgtttatttcttctcaggtttcctttcgttctatctgcttgccgataagggtgaaatgttaggttcagccgacatgattcgctatatccaacgtgatgaagaaggaacgcacctagatttgttcgcacatatgctagacacccttcgtcacgaaaataaagacgtctttacccaatccttctggaataaagctcttgaagtgttcctgacttcatcagaaatggaaatcagttgggggaaatacattactaaaggcgtaacgaatcctaaagctattgaggattacatcaagcatcttgcaaacctccgtgctgaacaaattcaagcgccgtttgtgccatatccaggcgtaaaaaatccattcccttgggttgagcagttctctaaacctaatacgtcagaaaagaacttcttcgaaacccgcgtcactgactacaaagttggcggtgctttggtttggtaa

SEQ ID NO: 45572 - DNA, 912 bp, Acinetobacter baumannii
ttgcaaattactaatttcgacctcgtacacctcattgataaagcaattgaggaaggtcaaatcaaagtaaaaatcttggcagacagcatcaatgaatacggcgatcgccttgtcacctttgagcttatgtattggttaccaatacatgccgaaatgatgactcatcgtgtattcagccgtaatgccgcatctaaccgcgccattcctatttcaaagatcattcagcaagtctggaacaatccggcatatccaatcttttggggcaaaaacaaggctggcatgcaagcgaatgaacagttttcaaaacgcaagattcgcttgtgccgatttgcatggaaatggtcaggtcgcctgatgtgcggtgttgtatggtccttaatgaaattaggactgcacaagcaaacggccaaccgcttattgatgccttggcaatttatgcatgtggttcttagctctacggaaatggataactttttcgatctccgtatccatgaggacgcacagttcgaaatcttcgctgttgcttatctcattgaaaaagcaatgcgtacttcaacacctaaaaagctcaaatttggtgaatggcacttgccatatatcacagacgaggaacggaagcagcacaaaatcgaggtattaaaaaaggtatctggtgcccgttgttgccgcgtctctttcatgaaccattacggcaataaatcaaatgttggtgaagatttaaaactttgcgaacgcttggtcggagctgaacctttgcatgcttcaccttttgagcaccaagcaacacctgacagctttgatcaccgcacggaaaagtatgccaacccaacaatgcacggaaatctaaaaggctggttacaacatcgcaaattcattgaagcagaaatcttcttatcgaaaaacaaggagtaa

SEQ ID NO: 45573 - DNA, 285 bp, Acinetobacter baumannii
atgaatatttttggaatcggacaaagtaaagctaccgaacatcttgaagaaaaagttggcatgggccaagtcaagcctaaaacagttcgccatatcacggctgatcttgagcaaaagctgagtgagcttttcgatttagaagagcgcctgttagaggacaacgatgttcaaaatgaattaattcgatccgctacaactcgcattgaagataacaatgtcgaaattgcgcgcgctatcaaaacacgaaaagcattaacggaagtctttcaggagatgaacgggtaa

SEQ ID NO: 45574 - DNA, 228 bp, Acinetobacter baumannii
atgagtaaaacgaaggtaaatcctaagtggttcagacatgaggcattacatacatcttatgtccttttaagcatggtgaatgaccacctgactaggcatcagtattacctagagcgcatcaatcctgaatttaatcgccacattgatgccgcaattgagcatttgaccgcagcttatcaagccgcaggtaatgaaggccttgaggtcaaaaagaaaataaaagtctaa

SEQ ID NO: 45575 - DNA, 258 bp, Acinetobacter baumannii
atgactatgactaacgaacagatcgaaatggaaattaacaaccttaagagccaattgactcaaaaggctgatgttgcttccgttaatactcttgctaatcgcgttacaaatgttgaaaacactaacgctagtcaaagcacctcaatttcaactttgacaagccgcatgaataatgcagaaggagtgaatgtcactcaaggcaattcaatcaatagcttgaattcgcgtgtaactaacttggagaacaaagttggctga

SEQ ID NO: 45576 - DNA, 366 bp, Acinetobacter baumannii
ttggctgatcaaatcatttttagcgaaatggtcacggctttggtgaaaaaaggtcaggacatcctgaatgatatgacaccagagcaagccgatttacttcacatgggtgtcggtgtttcaggtgaatctggtgaacttcttgacgcaatcaagaaacatgcaatttacggcaaaccgctagatcgtgaaaacgtgattgaagaacttggtgatttagagttctacatggaacgtattcgccaaatcatcggggtaagccgtgaggaaacgattgcggcgaatatggcaaaattgggtaagcgctatagcaaaggcacttattcaaatgagcaagcccaagctcgtgcggataaggtggaagcatga

SEQ ID NO: 45577 - DNA, 672 bp, Acinetobacter baumannii
atgatttttgcattatgtggcagtcatagaaccggcaagactactttggctcaagaatttgccagagtttcaggggcaaaatttatccctatgtcgattactagattgcaaaaggaaattggctttaattcagctaatcagagctatagctttgatgagcgaatgaaagttcaggaacacctcattgagcgcctgaatgacatttatgaagccaattaccacatcgatgcagtagcggatcgctcccctattgatcttatggcatatgcgttgatacatgctggacctgatattactgaggaacagtctaagcgtcttatgcgctatatcgaccgctgtgcgcaggtagcacgagatcactgtatcggcatcttgctggttcagccgggcatcgaacttaaagaggatgaaaaatctgcacccgccgctttagggtttattgaacatctaaattcgcttattttgggtctgattaatgatgaacgagtaaacgaagtaccgatgttttatatcccaagaaatgtgaccaatttaaaacgtcgagttgccgtatgttcagacgcattggcccgttcaatgttacgaaatatggataatgatcgtgtctttaactggaacagttcggaaagtggttttaatgcatacttcaccccttcaagtctcccgcaataa

SEQ ID NO: 45578 - DNA, 147 bp, Acinetobacter baumannii
atgatgaaagcttttggttctgcaatgatttctagtgaagaaggcggaattattgagcaagctatcaaatggttcaaagaatcagttgatgatttagaaaatattattggaacgaaagattttgtattaacagctaaagagggataa

SEQ ID NO: 45579 - DNA, 162 bp, Acinetobacter baumannii
atgaatagttgttttatttttccattaaaaattcattggctaatgctattcgataaattcctgacaggagcaatgttaggacttggttttatcgttgcaatttggacagtaattaaactcactcaaaaaccaaagaaagagcgaaaaccgcatcgtatttag

SEQ ID NO: 45580 - DNA, 540 bp, Acinetobacter baumannii
atgattccatatattcttggagtcgatactgaaacgacagggctagaagtagataatggcgacaagattattgaaatcgctctcattaaatatgacttggacggcgcaaagctagaggaattcgtacagcgaattgatcctgaacgaaacattgatccaaaagctcaagcggtgcatggcatttcctattcagaccttatcggttgtccaaaatttgtagatatagcagaagaagttgcctcaatcgtaaatcacgcctctttgttagtggctcataactttgcatttgatggcccttttatcgcaactgaactgaaacgtgcaggcatgacgcctaagaaagtttcttctttctgcacgatggaatatggccgttgggcaacgtttgatggcaaatacccaaagttagcagatttgtgtttttcgttaggcgttgaatatgacgcattagcagcacacgctgcatcgtatgacgtagacgtgatgatgcagtgcttctttaaggcaagagagcgaggtttctttcaggtggaagtatga

SEQ ID NO: 45581 - DNA, 321 bp, Acinetobacter baumannii
atgaatcgaaagcaacgtaaacgtaaattacagcgagcaaaggctcatcaggcacagtcaaaaggacaccttgaaaaggctccattaagtctaaaagattgccaacaaatcattaaagaaatgaataccaaatatggctctaattctcaaacccttcctaaagagtttggaaatgaacgcattgctaaggctgctaattcagcaggtcacttaggaaatcgcctccctctcactaggagacttacttggtattacgcagcttatttaagacttttaactttctggagacttatttgtggccgttctacatcagttaaataa

SEQ ID NO: 45582 - DNA, 480 bp, Acinetobacter baumannii
gtggccgttctacatcagttaaataatcatctttgctcattgcgaagatggcaggatattttaaaagggcttctgctacttggattagcagcagcagctttagcttctgcatattcattctacaaagccttcttcgagttaaaagattacctcctctctatactctatttttttatagggtttgccaatttttgctatttcctgaaatacaggaaatataaagtgaagattacatatcgttttaatgtttattgcgaagacatggaagaatattttgaatgttcttttattggcgaaaacttcgaaaagtcactgataatggcttatgaaaaggaattggagggagtgaagtattcctcctttgacaatgtggtcttaaacattctcgttcaaaaaaatgaaattccctataaaggtggagctgatgcagtttttgtaaggcgcaagctgaatggtctaaaactgtttaagatggattaa

SEQ ID NO: 45583 - DNA, 777 bp, Acinetobacter baumannii
atgaaaattttattgatgaatgactcaagtgtgacaaccgttagaaaaacacatgaggctttaaaaggtagaaaactcattgcaagtggcatgttttcaggtgtctttgaaagcggaaatcccaataccgttcttaaattgactgtctgtccagccacttattacatgcttaacgacgaagcaattaagattgatgacattcactcacctaaattaatcaaaaactatggccaagttggtgaatacctggttggcaagaatgtgaaagaaacaaacctcacaaaaccaaataaaaaattagttccattatttctgtttgaagtagagcgccttgagaagatttcaaaaggtcctaatcgcagccttgccttaaaccttacatatgaattgcgccgccgtcttgcagggttagagcacggtataagtgttcgaggtgccacagctaaaattctcattgaaatggcaaatcagcttcctcaactgaaggacgttcctacccttctaccttacttcgaaaaactaaataatttcgtaggcagttacggtgatgcgttttatgacatccatgcggcaaatctaatgcaacgtagtgatggaaccattgttttttcagatccagttggctcaattgatatttacacttccgggcatggcgaatttaaaccgatcgttagcctttcggacgtgaagtggaccgacgtcaaagaccgacaccgtaaagagttccaagcgcttattaataaaatcaaacccaatcagaaagcattgaatgcctaa

SEQ ID NO: 45584 - DNA, 444 bp, Acinetobacter baumannii
atgattattgctgaaagtatttttagccgtattggcaatctgcgcaaagttatgtcagaccatcaaatcgcctgccttctatcaggaaccaaaggtgttgagagtgagcattacaaagacttgattatcaaagtcgatgacatcgtagccaaatgccctcttacctatcaaacagacggccaaggcgacaacgcaatatgccaaatgcattacttcaagggagatagcgacgtttacatcgttgaattagacgttgctggtccacctcatactcaagcatatggagtaatcagacttaatggcggttatccggagcttggatatatcgatttagatgaattgatcaaatatgggtttgagcttgatttgtattacgcccaacagacagttggcgaagttatgagaaaacttacctatgagcaaacacgacgataccgtaaatga

SEQ ID NO: 45585 - DNA, 513 bp, Acinetobacter baumannii
atggcgcgttactttgacatgtttagcaaagagatttctaaggaagaatatgaaaagttacgtgcccattttgaggaagtttttagaaagcatgccgaaaacgaaccagacactttgccgctaaacatgttttcggtgcgcgaatttcaaaatgaaaacctatgtgtgcaattaatatggctcggcgaaatcagcgacaagatagtttccagccactacaagtcacaatatcctatctttaaaattgcgatcttaaataaacggaatgatgaccgatggtatgaagaacctttatccaagacgcacaaccggcggtcatcagccgatgcggaatacgaagacatcctcttgaaatactccaaatgttattacgatgaagaaggtaactttacctatagtgaggacaatctttccaagtgcattcatgaacaaattacggtcgagggactaatagaagaaaatctcccgtcaattaccttcaaaccgaagaccaatttcgattcagtgtggtaa

SEQ ID NO: 45586 - DNA, 864 bp, Acinetobacter baumannii
atgaacgcaaaagctactaatcaagtaaaagatgatgaattacttatatctaatctttttgatcaacttgatattgatgaatcagaactcgacatggctttagagccaacagccgaatctgctgctgttcaagatgaaaagctaatcgatgaagagttgcatgatgttgagttattagacgacttaaataacactgaacttgaaacactcattaatgatgaagaattagatttaagccttgaagcagaagaagttgaaaattctgttgtttcagataagaaagttacagagcctgagaagttaaaaactgagaatgtaactgaaaaacaagtacctaaatctacacagcaacgtgtaacgcactacaactctaagaagtcggaagttttactagaccgtctaggcggtagtgcagacatgattcttcttgaagcgagtgatattgatttaccaaatgacaagcttaaagaaaaacaagaaaacctgttacgtatcctgaacaaccaaccgacggtaattggtacacgaggtaatgttgagacagttcaaaagaaagtagctgagaaggtcattatcttgttcacctatttcaagaacggtggaaacttaaataaggtcatgagaatcgcatttgagacgattattacagatggttatattacaactggtaaaggtggcaatctatataacaacctgttgaatgcacattactcagaaggtacagcgcgagcgcaggcgggacagatgctccaaatgttccccctattgaaaattgcaacaaaagaaggaaataagctaattccaaatgagcagtcgctaattttagccaagatgaaagctgatctctttccaagtgaaaagtaa

SEQ ID NO: 45587 - DNA, 933 bp, Acinetobacter baumannii
atgaataaacctactcctaaaacttatcgtacaaccaactggtcttcctataatcgcgctctcattaatcggggtaacatttccatttggtttgatccaaacactcagtggtatgcacaaccacaagacaagcaaggtcgaaatcaaacttactccgataaggctattcaatgctgtttaatgatcaaatctttatttagactctctttacgcatggtcacaggttttgttcaaagtctgattaaactttgtggattaaattggaccgcaccagattacagtacgctttgtcgaagacaaaaacatattaatattgcgattagctatcaaaaaagtagtgatgggctacatctactcgtcgactcaactggcttaaagtttctaggtgaaggcgagtggaaacgtaagaaacatgaacctgaatatcgttgccaatggcgtaagcttcatattggcatcgatgctgaaaccttgcaaatacgtgcagtacagcttactataaataatgtgagcgattcgcaagtactcggtgatttacttgatcaaatcccgttgaatgagcagattgattcggtctataccgatggtgcttatgacacgaagcactgcagacaagtcattctagatcgagatgcacatgcggtcattccgccaagaaaaaatgcaaaaccatggaaagatcagaaattgagatctttagagcggaatgagttactgaaaacagttaaacgtttaggaagaacgctttggaaaaaatgggcaggctatcatcgtcgaagtttagttgaaaccaagatgcattgcatcaaactattgggggataaactcagtgcgagaaactttcagagccaagtgaatgagattcatgctcgtgtggcagtattaaataaatttacagaattaggtcgtcctcatacccaagttgtcacttga

SEQ ID NO: 45588 - DNA, 678 bp, Acinetobacter baumannii
atgaaaattttagtcgttttaacctcacatgttcaacttggcaatactggtaagaaaacaggtttctggctagaagaacttgctgcaccgtattacatctttattgactctggtgctgaagttacgctggcgtcgcctcaaggtgggcagccaccactagatcctaaaagtaatttagccgatgcgcaaactgaagccactcatcgttttgaagctgatccaactgcaatgcaagcattggcacagacgcataaacttagcgaaatttctgtagctgattatgatgcggtgttttatccaggcgggcatggtccattgtgggatttagcagaagatccgatttcaatttctctgattgaacaggcgattcagtctggcaaacctgttgcagcagtgtgtcatgccccaggtgttcttcgtcatgtgaaagcgagtaatggagcgcctttagtcagcggtaaattagtcactggttttagcaatactgaggaggctgctgtaggcttgactgaaattgtaccatttttagtcgaagacatgcttaaagaaaatggtggtcattattctaaagtagatgattggcaagtacatgttcaagtagatggcttgctggttactggacaaaatccagcctcttctgctgcaactgctacagcattacttcaattgttgaaataa

SEQ ID NO: 45589 - DNA, 840 bp, Acinetobacter baumannii
atggaaataattgagaaacatgcttcttttggtggatcgcaagaagtgtattgccatcagtcaacagcattaaactgttcaatgaaattctcaatatatctgccacctcatgacaaagatgagcggttgccagttttatattggttatcagggctgacttgcaacgaacagaactttattactaaagccggagcacaaaagtatgcggctgaacataaagtcattattgttgcaccagataccagcccacgtggagaagatgtaccagatcatgcagattatgatttaggccaaggtgcaggattctatgtgaatgcaacacaagcaccctggtcacagcatttcaaaatgtatgattatattgtggaagagctcagaaatctgattgacctgaattttccgaccaaccaagtccaaagcattatggggcatagcatgggtggtcatggtgcattagtcattgggttaaaaaaccctgagctgtataaaagtatttctgcttttgcaccaattgttgcacctagccaagtaccttgggggaaaaaggctttcacacactacctaggtgaaaacgaaactttatggaaaagctatgatgcgattgaattaatcaaaaacgcggaagttcatttacctattttagtcgatcagggaacagctgatgattttcttgaagaacagttaagacctaagctgcttagtgatatttgtttggaacaagaatatcctcttacacttaacctaagagaagggtatgaccatagctattacttcattgcgagctttatagagaaacatatagagtttcacagcaaattcctagcaaaaaaactttcatag

SEQ ID NO: 45590 - DNA, 855 bp, Acinetobacter baumannii
atgaaagagtacaaaaacacctacccaacaacgatgatggctagactgcttaaagtttcaatatcaaggttttatgattgggtaaagcaaggcttaagtaaacgagctattcaaagaaaccaacagacaatctttgtcaaaatagcccatcaagaaactaaagaaagttatggtcatattcgcttaacgaagtacttacagtcacaaggcactcaaattagcgcgtatgcagtccgttgtataaaaaggctaaatcaactgtattgtaaacgtcataaacgttttaaaaggacaacaaatagcgatcacagtcgttctgtttacaacaatttgttagagcaaaactttacagcgactactcccaacattgcgtgggtaagtgacattacatacatatggacagctgaaggatggctgtatctagcggctttaaaagacctttgtaccaaacaagtggttggttatagcttaagtgaacgtatgacagcccaacttgtctgcaatgcactgaatatggcaattaggaatcgcaaaccaccacaaggattaattgttcactcagacagaggcagtcaatattgcagtcatgaatatcgtaacatgattgaaaaatatggatttcatggttcgatgagtaagaaaggagactgttatgataatgctccaattgaaagtttctggggaatattaaagaacgaattggtgcatcatcgcaattataaaacgagggaagaagccaaagcagatattacaaaatacatagagctattttataatcagcagagaattcagaaaggactggattttaagacaccaaatcaaatggcagaggacttttataagttggttgcctag

SEQ ID NO: 45591 - DNA, 354 bp, Acinetobacter baumannii
atgagcaaaaaacaaaagatttatacggcagaatttaaagctgaagcaatcaaggctattgagttaaatcaaggaaatgtctcggaaacagcacgacaacttggtgtttccatgcaaacgctgtcgaattggtataataaagcaaaagcaggaacattagagggaacacaacaatattcacctgacctcgttgctctgctcgaagaaaataaaaagctcaaacaacaactcaaaactgccgaaatggagaaagagtttctaaaaaagcagcagcgtactttgccaaggaaaatcagtgaggtacgcttacatgaaagagtacaaaaacacctacccaacaacgatgatggctag

SEQ ID NO: 45592 - DNA, 462 bp, Acinetobacter baumannii
atggatttctccatacatactgatcatacagtcacgcttgaattattaaaaacctaccttcgaatgttcatcaaaaaacttcatgcaccgaatgataaagttccacccattgtcggttttgtttggaaattagaatactcagtattaaaaagttaccactatcatttcctatttttcatggatgcgaatacttttacagaagataaaaactttgcctataaacttggtgaattatggcaaaaaataaccttaaaaaaaggaatctatcaaagcttcaatcatgaagagcaagtacgtaaaaatcttgctattggtatactcactcatgatgatcaagaaaaaattgactctctaaataagatgatttatcacataaccaaaacagagcagttcattcttgaaagaagccaaattaatcaacgaacatttggctacagcacccgcaagtatgcaacaaggtaa

SEQ ID NO: 45593 - DNA, 1164 bp, Acinetobacter baumannii
atgcgtgctcttacctatcatggtgctagggatgtacgagttgaatctgttccagatccagtgattcaggaaccagatgacgttattttaagggtgacagccaccgccatctgtggctcagatctgcatttataccggggaaaaatcccggccactgaagacggtgatattttcggccatgaatttatgggaattgtagaagaagtcggcccagaagtaaccgaagtcaaaaaaggtgatcgggtaattattccctttgtgattgcatgcggtcactgttttttctgtgaacatgaactcatggctgcctgtgaaaataccaataccggccgtggtgcaattctcaataaaaaacagatcccaccaggggcagctttatttggctttagccatttgtatggtggtataccgggtggtcaagctgaatatgtgcggatccccaagggcaatgtcggaccatttaaagtgccaggctccctgcctgatgaaaaagtattattcctgaccgatattctaccaaccgcctggcaagcagtaaacaatgcccaagttggtcgaggttccagtgtggcgatttatggtgctggcccagtcggtctgctggctgctgcctgtgcgcggatgctcggtgccgagcagatttttatggtcgatcaccatccttatcgtctgcgtttcgcacatcaaacctatggagtgattccggtcaattttgatgaagtcgatgccgctgaatttatcattcaaaataccacgggttatcgtggagtcgatgccgtcattgatgcggtcggttttgaagccaaaggcagcatgctggaaaccgtaatgactaacctgaaattagaaggttcgagtggttcagcgttaagacaatgtattgcagcggtccgccgcggcggtgtggtgagtgtacctggagtttatgccggtccaattcatggcttcctgtttggtgatgcctttgacaaaggtttaacctttaaaatgggacaaactcatgtgcataattacttgccgcagttgctagaacatattgaaaatggagatctgtctccagatctgatcattacccatcgcatgaaactggaagatgctgcggaaggttaccgtatttttgataaaaaagaagaagactgtcgtaaagtgattctgacgccataa

SEQ ID NO: 45594 - DNA, 195 bp, Acinetobacter baumannii
atgagtcgcagaaatattgccatttggtttgatcctgctacgcaatggtatgctccatcaaaaggcaaacaagggcgaaatcaaacatactccgacgcagccatcgaatgctgcttaatgattaaatccttattccgtctgactttacgtatggttactggctttttgcaaagtctgattaaactttgcggatga

SEQ ID NO: 45595 - DNA, 246 bp, Acinetobacter baumannii
atgtcatacgccgacagaacaccgatggcaaaattctttgatgcgctggcttatgaaaagaatgaagtaaaagttacgcacacaaaggataaaaagggcgtccatgagtcgattcatgtgaagttaagtagtggttttgcaaaatttgaaaagaacaatcaaaaatatgaatttgtctttaatcatcaacaccaagaaattaatgaagattgctttacttccgtaaaagaaaagttagttaaataa

SEQ ID NO: 45596 - DNA, 327 bp, Acinetobacter baumannii
atgttcacaagaacggttcaaacccttaaaaatagcacagatcttgttcaaagatttgctatgcctgaaattcatgaagattttgaattacgccgtctttctaataaagaccgctataaacactacattcttatcttcaagaatgtaatcaaccaaaagaaagattgggaagatgtaaaggtcgttgctgagattcaggaacgcaaccataatcttcgattcaatattaagatttctaaacagtatccagaacttgcagattatgaaaagcttttagaagctaaaattaatgctatcattaacaatagctcattagtaatttcataa

SEQ ID NO: 45597 - DNA, 723 bp, Acinetobacter baumannii
gtgtctcctagtcttttaactcaagataattatcaaaaacttcttgatccgctacccctagactttgactatgaaaaacctattgaaactaggtttttctttaatcaagtatctgattctatttttaagtttgtagaacttaaaggcaatcctggctgcgattatagtggctgcattgaggtgcattattgccattataatgaaatggcgaaaggtgccatgctagcgatagctgaagaccattgtgatccttatgaagttgcagccgaggtatttaaagccggcttggactacgattatgaaaaactaataggtcgatatacttataaggatttcacatttcaggatcatgaagagaccaaatttggcaaacagatcagaggggcatatattgaaaaagaatttcaacaatttaaaattgccactttcatttatcaatttctggcgaataaatattcacatttaataagcgacaaccaacaaacctatcagggacacaatttatgggttttaagtgttcttaaatgggggaaggtaaaagcttatgattgtattgagcaaaaatttatcagttccttccatcctatagacgagtcgaaaggtttcaagccgtggtcaattccttataactttcctgaggaaaatgaaaagtttttaatcatggatttttgcgtgcgaacagatgttcctcttgccaacgtagtgttaatcgctcatggttag

SEQ ID NO: 45598 - DNA, 249 bp, Acinetobacter baumannii
atggagattgatcaagatacgcctcgcatgacgccggaagaattaagacaggcgggtgaaatactctacggcacgcattggcaaagcgaattggctcgcgctattgatgtggatccacgcagagttagacaatggataacaagagagcgcccaattcctgcaggcataagaaatgagattattttgcttcttaaagagaaaagtagaaaatctgtggaatacgccgattacttggatcagcagttttag

SEQ ID NO: 45599 - DNA, 219 bp, Acinetobacter baumannii
atgttgatcttgattggtatggcacttgtagcgttatcggtctaccgtggtataagtttaggcagagatttagaaggctcgtcggtaacccaactatccaatagcatgtatattcaggaaatggtaatcgcgcagattaagcaggcttggtattgtattgtcggttttaccggagcaactatgattgcaatgggggtatggcatacctggctatcttaa

SEQ ID NO: 45600 - DNA, 336 bp, Acinetobacter baumannii
atgcttgctgtaattattgttttaggtgctttgctgattctttcactcatgtcaaaatttacggcgttgcagaatgaaagaaataaggctgctagattacgccagctttccgcgaaggcatctgaggcacgagcaaacttggatatgcaccaaacgagacttactacaatgtctccagaggacgcctttatttctatcttaaccgatgaagaacgagaaaaatatttaagccttaccactacgcttgagcgactagaatttaaagtaaatcgggctgatgaggatattaagaagatggcgaaaaatgttcaaaatctcgttagttccctttcataa

SEQ ID NO: 45601 - DNA, 207 bp, Acinetobacter baumannii
atgcctataaaacaaaacgagctaatgagcgagatggttaatgcaatcactacacgccttaacgacctctatattcagtattacaacgactttttaagcgttgaggcatttgcacgttatcacggtctatctatagaggatatgcaaaagctgattgatttgggcagacatgtgaatcacaacagtctttggaaagaggataagtaa

SEQ ID NO: 45602 - DNA, 294 bp, Acinetobacter baumannii
atgcctaggggtttacaatctagtgagcgcttactatacttctgccaaatgggttttgggttgagattttctccccgacgcgatttgcttgatgggggtcgtggcttataccgtgtcagtggtttgcactgtaaagaaaagttccttttcttgtggtggaaattggctaggttaggttacgtctccccaaactctctccaagattttctaggcaaaattctatgggggggtttgggggggcgttccttaacgttagtggtttccgctgtaagaaaagggcataccaaaatatag

SEQ ID NO: 45603 - DNA, 426 bp, Acinetobacter baumannii
atgctagttaagcggaaaatgctgaaaattcgtcgccttgcaagtaaaggtaaattagctcaatggggctttatatcagcgaaccaagcgcaaaagattgggctagacaacggttttgtcgtgattctttcattattgcagggcaaacaggtagaaccgaaatttacccgctataaactcagtgatgatatcggcagcgaatatgggattgaaacggatgccgacctttcatccatagatcaaagcatcattgatgccattggtgtagcggtcggtgatatttatgatgctgcggtaaattatgatgagaaaaccgcctatgaagatgagcgggaagatttcgagcgtaccaatctcatgtttatagatattgagactggtcatgcctatgactcaaatcttaatgaagcggtaggatgggcatag

SEQ ID NO: 45604 - DNA, 801 bp, Acinetobacter baumannii
atgaatgcacaagttaaaaacacagaaattctaaacatctttgcagacgttaatttttcagctcatgaagcacgtaatgcaatagttatagatcaagagacaataaaagcgtatgcaagacagcagaaagtaacgagcaaagcagtagcagtacagcttgatatagcaaacgcgatcataaaccgtatgaataacaagcttgagacagaacaaaaaatatcaagcacgttattcagtgacttaaaagaagcatgttcacgctctatgcttaataaaatagacacgcttcaaaaagctaagtttgatttatcagatctagcaacaatcatcgctcacactgataaatcacacattgactttgtacaagtgaaagtcattagaaaaatctttcaagcgattacagctatcgctgaaaacgacagacgcaagctagacggttacacaatgtcaatcttgctaaacttattacagtacggttcacttacggttaatgaatgtcgtttatgctgcactactgaaatacgcgcacagtcgcatgaaaagaaagtaagacagtattacttatcagcgcacagcacagcatcatcacaagcgtctagctcacgtatgacactgagagcgcttaatatctgtaacgttgtgaagtctgtaaaagacagtgaaataacgtttaatgaaaattctcagtttattgaagcagtattgtcattcttacaaatgaaagagaatacacaacaagaattagagcgcgtacagcatgacattaagaaagagttaagcgaaaaacaagcaagcgcataa

SEQ ID NO: 45605 - DNA, 570 bp, Acinetobacter baumannii
atgaaaagattttttttggctactttgattttagtttgttcaaatgcaatggcagaaggggagggcccgttcgccgagtacaccgtgaaaccgagcgaatcattaaatgatatagccaagcgtaacgggaccacgtgggcaaagctggcagaagacaatgatctccctgatccaccaactgtttatgttgggcaaaagctggcaatcatgaaaaagatgaataaggacgaatatctggctgcgattgcaaagacccgaccaacgtgctcaagcaaagaagaatgtgacaagaaaatggaagctgctcatttgtgggtgagtaaatacgctgattacaagatcagaagttcaaataacgtattaatcgaaacatacgctccgcgcgagttcactggtgagatcatcgtaaaggtttctaaggagccttatgggaagggaacctatgcgatcgtggccaacatgtcatgcaataatccgaatatgactaagccttatgactcgatgaccagttgcaagagaaacgtttataaggaaattattaagttcaacgatttcgttagttcttattag

SEQ ID NO: 45606 - DNA, 279 bp, Acinetobacter baumannii
atggcttcaaaggatgatttaaattatgttgcttaccacattatcgaaattctggaagaacagggtttagataattcttatattaacgaaaaaatagatcgtctttacgaattcggcgaaaataaagccgctacattgctttgggcttcaaaccagctcgatagtagaaattttagattacttttgggcaaacttaatttaactcccgatcaagtaaagatattttgtcgcgtattgaacaagctgaaaaaatatttgggctacaatttattgagctaa

SEQ ID NO: 45607 - DNA, 294 bp, Acinetobacter baumannii
atggcagctactaactcttccaaattttataaagaaaaaggtttagttcgaacatccatcactttgcgtccagagacaatccagaccttagaaaatatggcaaaacagcataaactcactcaaggcgagattgttgacgcttttgcacgtttgcttgaaagtggcaatctgtctgatcagcttttcggtgtgcatattgaagccattcgcgaagaaaagattgctgaaaaagagcgtaggaaggaattgaagaaaaaagcgctagagttaattaaatctggccaagtgcagtaa

SEQ ID NO: 45608 - DNA, 1710 bp, Acinetobacter baumannii
atgggaaaagttgtaacaatcgcttatgacgccgtaaatgccatcctacacaagcctcctgttgaggcgaaacttgaagtacagtcggcgcttagttatttggtggatggcgccgaagaaactctagcgtttagacagcaccgttgggatggcagatcgtcattttttgactttgccaagtgctcttttccagcaggatttgtagtccatgttacggatcgactcaagaaggcaggttttgaagtaaaactcgcacgaaaacccctccccgctccacttggacctgcccgaccagtggtagatagttacggatatgaccctcgttacgattaccagccggaagttatggatcgtcttgtacgtcatggccagattatcgctcaagtcgctactggtggcggtaaatcacgcattgccatgttgtgtcaggcccgaattaaccgccctaccttgtttttaacaacccgttcgattctgatgtatcagatgaaagatgcattcgaagcaaatggcgttgcatgttcggtcattggtgatggcagttttggacaggtgaatgaaaaaggtcagctctccatcaagaaaatgacggtcggaatggttcaaaccctcgccgccaagctggaagagacgactttagagaaggaatttcagatcctttatgacaacgtagtcaaaaaacacgaaaaagagatttcggacactaaaaaacagctaattaaggtcggtaaagtcgagtccgaaatcaaaaaagtgcttcataaccttgcactgcaacatgaaaaggagcttcaggacaaggcgccagcgatgcaagctaaggcagaagcaaaattcaaggaaaaatcactcgtaagacagcaaaccatcaagcttttggagctttttgagttcgtaattctcgaagaagcacatgaggcaggtggaaattcgtattacgagatcatgcgccactgtaaaaacgcctattaccgcttggcattgaccggaacgccgttcatgcgtgaaagccaagagtcaaatatgcgtttgatggcttgttccggaccgattgccatcaaggttacggaaaaaatgctgattgatcgcggaatccttgctaagccttacttcaaaatcgtcgaattgaagaaaaagccagccaaattacactctattaccccttggcaagctgcctatcgcttgggaatcgtgcaaaacgaagagcggaacaatgccatctgtatggaaattctcaaagcccgtgaatatggcatgacggcgatggttctcgtccagcatacctcgcatggcgacaccctattgaagctgtttgacgatataggtatcagagcgagatatattcgcggtgaagatgatcagggagaacgtaaatctgcgctcaccgaacttgccaataaggatattgatgtactgattggaacaacaattcttgatgtgggtgtggatgtccctgctgtcgggttgattattcttgccggtggtgggaaagcggaagttgccttacgccagcgtattgggcgcgggttacgtgctaagaaattcggtccaaacgttgcgtttattgttgatttcacagaccagcacaattcaacgctcaaatctcacgctagacagcgtttacagatcatcagagaaacacccggctttggcgagaatatcgttgcgaatttcgagtttgaaaagctcggtttcaaaaaagctgcatag

SEQ ID NO: 45609 - DNA, 639 bp, Acinetobacter baumannii
atgtcagttgaatatttagaaatcgacccaggagagctttggcctaatccttggaattcaaacgtcgtatcacctgaaaacgagcgaaaaatcgaagaaggtattaaacgtcacggtatgtttaagccaattatcgttcgtacccttcttgatggccgcttacagatcattggcggtcagcaccgagcaatgattgctaaacgtcttggtctactcactgtgccggtaatgaaccttgggcgcattgacgaagccagagcaaaagagatcggtctaatcgacaacggtcgttatggcgaagatgacatcgttaagctcaacgaaattcttcatgatcttggcggtatcgatgaattgatcgatgtaatgccttggtcaagtgaagaaatcgacatcttctctagcactaatatagcgctggacgctctaagcgatctcgattcgccatcagaggaagttgaattacccaagacaaccaaagttcaaactcaccaaatcatgcgtttcaaggttccgatcgaggacgtagacgcaattaccaaactcatcgagaagaccattaaggcacagggctttaccgaatccgacagcttgacgaatgcaggggatgccttggtttatctcttgggaagcaagtaa

SEQ ID NO: 45610 - DNA, 603 bp, Acinetobacter baumannii
atgaccgatttatctcaaaaagggcaggttcgaatgtaccgacggggtggccaataccctgtagaccttgaagcaatccagtttaatggaaacaacggctccgaaattgaactctggcttggggttcactgctcaacccaaatgaaaacagtagccagagtagggggaaatactgatgaagacttttcccttgtcattcccggcattggtacagccgaggcaggtgattacatcgctaaaaacctagatggaacggtggtcatcctcaagccagactatttcgagagcgagtttcaggaagttatcactttcaacacgcctgaacaggaacatgaaggggcggttcccgaagtagatgacggcgccttgaagtttttgaagaagttctgcaatggataccgcatcgtttcaacatgcgacctaacagaattgcagattgcagaagccaacgtagaaggtcgtctctatatcgaacctgaaggtggcttcggatgggtagcgctcccttgggaattaactaccgtcagggatcggcaacgcgaaaagttctaccagatcaacaagcagttgattgagcaaaccgatacgcgggtggccgaatga

SEQ ID NO: 45611 - DNA, 651 bp, Acinetobacter baumannii
atgagcgaactaaaaatccaaatgtggattgttgacgatgtaaagccttacgaactcaacgccaaaatccacagtgaagaacaagtcgccaagattgccgagtcgattgcccgcttcggttgggatcaacccattgtggtagataaaaatggcgtaatcatcaaggggcatggtcgccgtcttgcagccatcaagttaggtttaatcgaagtacctgttctggtccgcgatgacttgaatgaagaacaggtgaaagctgcacgcttggccgataaccgagttgccattggtgacattgatgccgacctgctcaagctggagctgcaatccatcaacatcgagttccttgaggacatcttcgacagcaaggagctggagttcatgcaagccgacctctccgaaatgaacgtcgatgtgattgttgatgatctggacagcgcggtagccgagcaacagcgccatacggcaaatgcagtatcggaatcgaacgaaaaacctatccgaatcgacaaggttttagggttcagcgaagtatcgggcaaagaatcacgttccattcactactttatggccattgcagaagatgcaactggactagaagggaaggacgctttcgtaacgtatatcagcaaattggtggagagcgcttaa

SEQ ID NO: 45612 - DNA, 657 bp, Acinetobacter baumannii
atggctgtttataacatcgatgtccgatacaaaacgtcagttgagcgtaccgaacgtgtactggaaattgccgagtcgttcgggttgggcttagatgcgaaggaatttgtggttttcgataacacgccaattgaaatcgagcagggagacatcgtttacatcactggtcagtctggtggcggtaaatcgaccctgctacggaagctggcggaacaaatggaacaaagcggcttaaaagtcgctgacctgaatgccattgagcatgatgaccgtccaatcgtcgaccagattggcgaaacactaaaagacgctctggatgtactcaccattgccggcatcactgatgcctatatctggctaaacaagtttgatgccctctcggacggccaacgttatcgcttcaaactggcaaaactgattgagagcaaggcggacgtctggattgcagatgaatttcttgccgttcttgatcgaactgttgccaaagttgttgcgtacaacattcagaaaattgcccgaaaactcggaacaaccgtactggttgccacaacgcatgacgacatggttgaagacctcaacccaagcctcttcattgataagcgataccgcgaaaaagtggtaatcaccaaagcacctgaaggatttaaacaagtatga

SEQ ID NO: 45613 - DNA, 423 bp, Acinetobacter baumannii
atgactaatcgatcaaaaaaagttgtaactaaagacactgtagatgctcatgaattcgcgtcagaagcatccgaaactgttgcagagcaaatcgttcaagcagaagttgtggagcgttctgagagcgaaccagcgcaaaccaagcgcacattaaccctatattcttcaaccgtctgctcaccttgcaagaccatcaagccgattctggaaaaacaaatgctaggtcgcgcaaccgaataccatgtgctgaccattgatccaaacaatatcgaacctgaaatcaaacagcagtttgaagaagcgggcgtaacgcaagtgcctaccctgatctgcaaggaagatggcaaagaggtaggtcgtttatcgggatacagtggtgttcgaccgctactcgatgtcttgaaagcttgggaagtgatttaa

SEQ ID NO: 45614 - DNA, 954 bp, Acinetobacter baumannii
atggaaaaggttttactcgatacaccagatattctcgttactcgtaaatcacctaagcaaaaccacaacctgtcattgctcaaggacatcattgtggagccgggtgacaagagtgactgggaccttctgcacgaattgcactacaaggcagaaacgctgccgatcggttcaaggttctggaaagtaaccctgcatggcaagaccattggtgtcgggattctggctgttcccaaaatgttgctttcgggtcgtaatgacttgttcaaatatctacgtccaaacgtcaacggcaaggatacccgcctgatcaataaaagtcgggctgaatggctaaacgaaaatgtctgcaccaatagccgacttgtactggacaccatctaccgtggttgcgggattgcgtatcgtgcccaaaatttaatgatgcgcatggtggatagaaaacataccgagttccaaagctcgatgtcgaaattcaatccattcgcggaaagggcaggcatcaagttcaccccgcctaagcaggcgaccaattatcaacgcggtgtggacttctttgtgaaatggtttgaaaccaagcatccgacagatgttgtggggattctggaggagctgagctccaaacccgaacctatcaaaaagaagatcatcgctgaaatgcggaagttctattaccaatacagctctttggaaaaatccggcaataaccggctgaatggttttagccgtgtagagagcatgcctgtcgaaaagctgctaaagaacattcaacaactggtttttgcgtctccgttatatggggtctataccaatcctgacttgatctacaaagccaaacatcctgagcacgagattcccaaacgggtatcaattttggcatttgactgtcagaaaccagacgaacccctaaatgttgaactcattaaatcaagagggcttttattcgaatgcaattag

SEQ ID NO: 45615 - DNA, 324 bp, Acinetobacter baumannii
atgcaattaggtctaaccccaaaacagatcgaattactgacaaagattcgcgataaaaatccagacggttctttgctctcaatcgaacagcttcatgacgccgtgagttacacctgcacccgacaagccattacatgcagcctaaattttctgattaaaagaggcctgattgagaagagcgggcaaaacgtggtgagaaacgggcgtagatttacggtcgtcagcatcaagccattgggcgaggaaatactaaacgcctatgtaccttcgctacggcaggtacttgtagaaaatgaggatgaggaaattgaaaaaatcttctaa

SEQ ID NO: 45616 - DNA, 495 bp, Acinetobacter baumannii
atgaggatgaggaaattgaaaaaatcttctaaggtaaaaagcgttaagaaaacctcgccaagttggttccgcactccgtacaatcgcttatggtatgttttggtccaagacccaaaacaattcttggctatggaagatgaaagccatcatgcgctttacgagattgctaaagagcattttcagtcccattttaaagccatcactttctatgccgccaacaattcgggcgagttgattgccgcgatctattatccgaggatgtttgacgctgacgaaaatgaggtactaaccgtgctttgccatgagtgtgttcacatatggcaggaattcgcggaaagcctacatgaacacgagccttcgcgtgaatttgaggcttataccattgatgagatttttggaaacgtcctgactgaataccgcaagttagtggaaatcaataaagcccataccgagagtaaagccattaaacataaaaaacagcccgaccttgtttaa

SEQ ID NO: 45617 - DNA, 402 bp, Acinetobacter baumannii
atgtcccaagtacaggaaatctttcttatcggcgaagattttgagccaggcatcgtcggaaattctgaaattgatattttattgggccatgacacggcgatctgtggagagttcgcaatcaggaaggaagatggctatacacactgtccggactattgcgaggataagaatataactttcagggagttatacaaattaaacttacatccactcatccttccagccagccatgaatcctccaaaagacgctctaaaaaagctttagagaaagccgaacagcttcaagacaagtttgttgcagtctttattcttggctctgaattttacgtaaccagaccatttgaaagtgaaaatacagcactagcttgcgtgctttggtatgcgcttgcttattactcttaa

SEQ ID NO: 45618 - DNA, 606 bp, Acinetobacter baumannii
atgactgaagaaacagccaacaaacgcagatacccttcagcaagtgcttgggcagaagcagaggcgttatgggcttctggtgatgtgaccctagaggacttagccaagaaagtcggggtaagcgcaacttccgtttcccttcacatgaagaagcggaaaatcacgaaaggggagaaggccaaggaacattccgagcgtatctccaaacaggtcgccgaagatattttgtcagaagggaccgtacatagccaaagaattaaggaaaccaaagaagaacattacaagatggcgacgggtctagctcgcctgacttggaatgaaattgtcactgccaaggcaaagggcggtgcttatgcggcgattcaacaaaatttaaaagcactagaaatcgcttcgaatgttttggcaaagatccgccaagaacggtacgccgttttaggtttggataagcctgatgctgtagatgctactcaacttccggaattggtaattgaagaattgacggccgatcaggttcaacaattgaaagagcgtgatttcaacaatggtaattacgactttgaagatgaggacatgttagagccatcaaatgattcaggggaatga

SEQ ID NO: 45619 - DNA, 1245 bp, Acinetobacter baumannii
atggcagataaggttcggctttcattgcatccaaagcaaatggaagtctatctttcaaatgctcgatttcgcgtagtggttgctggtcgccgatggggtaagaccagcctttcgcgtactctgattatcagtaaaagtagaaagccaagacaaagaatctggtacgtagcgccaacttaccgaatggcaaaacaaatcatgtggaaggatttgattgaagccattcctaggaagtgggtagttaagattaaccattcaagtctatctattgaacttgttaatggcaccctgattgaacttaaaggcgctgatgacccagactctttgcgtggtgtgggtatcgatttcttggtattggacgaattccaagacattagcgaagaggcatggacacaatgtttgcgtcctacccttgcctctacaggtggtcatgccatctttatcggcacacctaaagcatataaccagttatataccgtctatatgcagggacaagacccgaaaaaggtcaaagctggccaatggcagtcatggcagttcccaaccattacatctccatttattcctgaatcggaaattgaagcggctagagccgatatggatgagaaatcattcaagcaggaatttttggcttccttcgaaaccatgtctggacgtgtttattacccgtttgatcgtaaggaacatgtcgggaaatatccttttgatccaaaactgccaatctggatcggcatggactttaacatcgacccaatgagtaccgtcatcatgcagccgcaaccaaatggcgaagtttgggtggttgatgagattgtccagtttggctctaacacggaagagatttgtgaagagattgaacggaaatactggcggtatatgaaacagattgtcattttccccgatcctgctggcggtcaacgccaacatgctcgtggtgagtccgacttggacatcatgcgcgagaagggatttaagaaaattctttacagaagaaagcaccctgcaattgccgacagggtaaatgcagttaaccgcatgttgagaactgcggatggaacagttgcattaagggttgatgaaaaatgtaagcatttgatcaattcatttgaacagaccatctacaaaccaggtggacgtgatgttgataaatcaggtggtgtagaacacagtgccgacgccattggatatgcaatcgaacaccaattcccacttcgtaagattgaaattaaaggcgtttcaatttaa

SEQ ID NO: 45620 - DNA, 1671 bp, Acinetobacter baumannii
atgacaaccgaactatcctcatacgaccgacatgcaataagttcgaccgcttcctcagaagaagcgaatgaccctcttgtacgtttagtatcacgtcgtcatccactatatgaagccatgtccaaacactggatgtttatggatgacacctatagcggtggcagagaatggtttaatcatcatatcttcaaatacatcaaagagggtgatgccgaattcaaggatcgtatctcacgcgcttatcgtttcaaccatacccgcgaagttgtagatttaattaataaatatttattcaagcaggaaatcacccgcaataaggtagatgctcctgccgacgtggtgaagttttggaaaaactgcaccaagagcggcttgacgattaatgatttcgttcgccagatcagtaagaaaacctcaatttacggtcgtattggggtagttattgatatggatgcggtaccagaagatcaaagacccttaaacaaacgggaagaaaaggaagctgggctatctgcttacgcctacatcatcactccgcttcaaatgctggattattcgtttgatgatcacggcaaattaaactggatgctgattcatgaagtggttcgcgatgatgaggatccactaaattcaacaggcaaggcgattcaccgcttccgcttatggacgaaaacggaatggaaactgttcgaaaagcagaatgatgatcagaacggcaagattacgattaaagagattgatcgaggtagcaataccattggtgaagtcccaatcattctggctgacaacatcatttcagacgaagaatattctgcaccatccctgatcgatgacatcgcctatctggacagggcggttgccaattatctatcaaaccttgacgccatcattcaggaccaaaccttcagccagttagccatgccagtacaaggcatgctgccgggcgatgaaagcgagaaaaagctcattgaaatgggcaccaaacgtctctttacctatgatgggtctgatggcgcaaaaccttactacctatcgcctgatgtaaagcaggctgacctgatcattcaagtggtcaccaaaatcattaacgaaatctatcacaccgttgggttggccggcgaaagaaccaaacaggataacgccgtaggtatcgacaatagttctggtgtagctaaagcctatgactttgaacgggtaaacgcattgttagcagcgaaggcagatagccttgaagcgattgaaaacaaaatcgttgatctggtttgcaaacgtcatggggtcaaattgaaggaagacagcactcctttagtttcatatccagataacttcgatacacgcggcttatacgacgaatttgatattgctgcacgcctgatgctgattgatgcaccagaaaccattcgcagtcatcaaatggagtccattgttgaaaagctctttcctcaattaagcaaggcgttgaaagacgaaatgctacgcgacctaaagaactggccgacagaccctttggaagagttgaccaacagaactaccgatacgacgggagaggggaatctaaagcgtaacattacacgctcctcttccggcacaccaaccaaaccatcgtccaatagctcaacaaaggcgaacaaaaaaactcgccaagggcaagtgacagaatcaacaagctaa

SEQ ID NO: 45621 - DNA, 1788 bp, Acinetobacter baumannii
atgcctgttaataatgataaaataacgactattgattgtttcccaaatgataatattagtcgagtggtttatcgatatggtggactcgttcgaaacgaagataacgactcaactaatccttttgttgaagtgttattaattgagattagaaaaagtgatcaatggttatttttagataagtgctcaacattccttgttcccgtacttgatcttgatgctgttcaacatggcagtatttgggacgggaatgttctgaccaattacacttatagattttcaggaaaactcatcacaaaacgattttctttcgacttcagcaataataaaccgaggaacataaaactttcagacaaaattccggatacgtcagagtactacattccattaaaaaactattttcttcccaataaagttgattatgttctacaaggctatccattcactaaatacaccaatgattcatatcggaaagtgaatcactgcttaatgcattctaatgatggaactcaagtcatcacttcctcaatccatattttgcatagcttattcgtcaatcggaaggatattcggggactcttattaagcacttcaggccaatctatcattaaccgctttttagaatcttatacaacagaagttgagaatgataatattgaatataaaataaaaatcagaaagccatatgaagatattggcgaaacagcaattatatttctggctaatctagccttaaatccatatgtgcagacgatagtcgataaaattcaacgaagtatggaagttactgagtttcatcatcttcagcatggcacaggcataagataccccattgtatatccgccacatcctacaaagctttttcttgaagcagaaggaatttggctagatgacaataagacacgtttttttattactagagtgaaaaaatttgatcctattaacgatcacatgattgatgtcaataaagaccttaccaatactgtttcaaaaactgatgaaaaaaaccctcgtcctcgtgaaaaaagtcaaaataaaaatgagcatatcaatacacaaaaaccaccatcaagaacaagcggtgaataccgtaagcgttctgatgtggaaactggaaatacacaaaatattttgaagtattcttttaatgaaccagccaatgacccaattgaagttggcacatccaatcatccatattcagataaatcagaggatgttgaaacatcatctgatgaaccatatggcaataaaaatactaaaactaaaaagtctgaaacaactgataatccgcctagcagagatgaacgctttgatattcaatatattattcaatcacttaaccatttaacactagatacaacctctccattagaacgtgtgtattcaattgatatattggggaatgagatacacggattcaacttacttcaaataaagaaactcgttcctcaaccaaagcatccatcttggattgatgcagaatttggaaggaaattgttatttttaaaactggaattgaaagatcagcatgatcaatattatttaattgatatacataaaaataaaagccatgaagcattctgtgcttttattatcgtgtcaccacataagttaacccgtgagcaaataaaaaatatatgtatagagcttgagaatgcaaaaggaattaaaaaatggacgctacgttgtgaaagttttaccaaaaaaattatttcgattaaacattcatctgctactcccgatgagtggaaaaatagatttaaaaatttattttcaacattaattaattga

SEQ ID NO: 45622 - DNA, 846 bp, Acinetobacter baumannii
atgtacttatctgatttaaacgcacaacaaagggaacctccattgaatcgaactaatattttttttggtgaatcgcattctgactggttgcctgtcagaggcggagaatctggtgattttgtttttcgacgtggtgacgggcatgccttcgcgaaaatcgcacctgcttcccgccgcggtgagctcgctggagagcgtgaccgcctcatttggctcaaaggtcgaggtgtggcttgccccgaggtgatcaactggcaggaggaacaggagggtgcatgcttggtgataacggcaattccgggagtaccggcggctgatctgtctggagcggatttgctcaaagcgtggccgtcaatggggcagcaacttggcgctgttcacagcctatcggttgatcaatgtccgtttgagcgcaggctgtcgcgaatgttcggacgcgccgttgatgtggtgtcccgcaatgccgtcaatcccgacttcttaccggacgaggacaagagtacgccgcagctcgatcttttggctcgtgtcgaacgagagctaccggtgcggctcgaccaagagcgcaccgatatggttgtttgccatggtgatccctgcatgccgaacttcatggtggaccctaaaactcttcaatgcacgggtctgatcgaccttgggcggctcggaacagcagatcgctatgccgatttggcactcatgattgctaacgccgaagagaactgggcagcgccagatgaagcagagcgcgccttcgctgtcctattcaatgtattggggatcgaagcccccgaccgcgaacgccttgccttctatctgcgattggaccctctgacttggggttga

SEQ ID NO: 45623 - DNA, 837 bp, Acinetobacter baumannii; identical to SEQ ID NO: 22759

SEQ ID NO: 45624 - DNA, 225 bp, Acinetobacter baumannii; identical to SEQ ID NO: 13704

SEQ ID NO: 45625 - DNA, 1494 bp, Acinetobacter baumannii; identical to SEQ ID NO: 13713

SEQ ID NO: 45626 - DNA, 405 bp, Acinetobacter baumannii
atggggatctccttaaaccatggcgtacatgccaaagtttccacgccagtgcatttacgaaaagcacgtacttgctatgatcatttagctggcgaagttgccgttaagatctatgattccctttgtcaacagcaatggatcactgaaaatggttcaatgatcacattaagtggtattcaatattttcatgaaatgggaattgacgttccttccaaacattcacgtaaaatctgttgtgcgtgtttagattggagtgaacgccgtttccatttaggtgggtacgttggagccgcattattttcgctttatgaatctaaagggtggttaactcgacatcttggttaccgtgaagttaccatcacggaaaaaggttatgctgcttttaagacccactttcacatttaa

SEQ ID NO: 45627 - DNA, 624 bp, Acinetobacter baumannii; identical to SEQ ID NO: 10352

SEQ ID NO: 45628 - DNA, 1218 bp, Acinetobacter baumannii
atgaatagttcgacaaagatcgcattggtaattacgttactcgatgccatggggattggccttatcatgccagtcttgccaacgttattacgtgaatttattgcttcggaagatatcgctaaccactttggcgtattgcttgcactttatgcgttaatgcaggttatctttgctccttggcttggaaaaatgtctgaccgatttggtcggcgcccagtgctgttgttgtcattaataggcgcatcgctggattacttattgctggctttttcaagtgcgctttggatgctgtatttaggccgtttgctttcagggatcacaggagctactggggctgtcgcggcatcggtcattgccgataccacctcagcttctcaacgcgtgaagtggttcggttggttaggggcaagttttgggcttggtttaatagcggggcctattattggtggttttgcaggagagatttcaccgcatagtcccttttttatcgctgcgttgctaaatattgtcactttccttgtggttatgttttggttccgtgaaaccaaaaatacacgtgataatacagataccgaagtaggggttgagacgcaatcgaattcggtatacatcactttatttaaaacgatgcccattttgttgattatttatttttcagcgcaattgataggccaaattcccgcaacggtgtgggtgctatttaccgaaaatcgttttggatggaatagcatgatggttggcttttcattagcgggtcttggtcttttacactcagtattccaagcctttgtggcaggaagaatagccactaaatggggcgaaaaaacggcagtactgctcggatttattgcagatagtagtgcatttgcctttttagcgtttatatctgaaggttggttagttttccctgttttaattttattggctggtggtgggatcgctttacctgcattacagggagtgatgtctatccaaacaaagagtcatcagcaaggtgctttacagggattattggtgagccttaccaatgcaaccggtgttattggcccattactgtttgctgttatttataatcattcactaccaatttgggatggctggatttggattattggtttagcgttttactgtattattatcctgctatcgatgaccttcatgttaacccctcaagctcaggggagtaaacaggagacaagttgtcagttccacaaataa

SEQ ID NO: 45629 - DNA, 1797 bp, Acinetobacter baumannii
atgcctgttaataatgacaaaataacgactattgattgcttcccaaacgataatattagtcgagtggtttatagatatggtggacttgttagaaacgaagataacgattcaactaatccttttgttgaagtgttattaattgagattagaaaaagtgatcaatggttatttttagataagtgctcaacattccttgttcccgtacttgatcttgatgctgttcaacatggcagtatttgggatggaaatgttttaaccgatcaatcctatcggttttcaggaaaactcattacaaaacgattttctttcgacttcaccaataataaacctaagaatataaaacttacggacagaatccccaatacttctgactactacattcctttaaaaaactatttcctcccaaataaagttgattatgttcttcaaggctatccatttaccaaatataccaatgattcatatcgcaaagtgaatcattgcctaatgcattccaatgatggaactcaagtcatcacatcatcaattcatgtattgcatagcttattcgtcaatcggaaggatattaggggacttttattaggaacttcgagtcaatccatcattaatcgttttttagaatcttatacaacagaaattgtggacgataatgttgaatataaaattaaaatcagaaagccatatgaagatataggcgagactgcaattatttttcttgctaatcttgccttaaacccatatgtgcaaacgatagttgataaaattcaacgaagtatggaaattaccgagtttaatcatcttcagcagggtacaggcaaaaggtatcccattgtgtttccaccacatcccacaaagcttttccttgaagcagaaggaatttggctagatgacaataagactcgtttttttatcactagagtgaaaaaatttgatcctattaacgatcacatgattgatgtcaacaaagacctgaccaatacaatttcaaagcctgatgagaaaaatcctagacctcgtgaaaaaagtcaaaataagaatgagcacatcaatactcaaaaaccaccatcaagaacaagcggtgaatatcgtaagcgttctgaggtggaaactggaaatacacaaggtattctgaagtattcttttaatgaaccaaccgatgatccaattgaagtcggagcatctaatcaaccttattcagataaatcagaagaggttgaaacatcttctgatgaaccctatggtaatcaaaatactaagatcaaaaaatctgaaacgacagatacaccacctagcagagatgaacgttttgacattcaatacattatccaatctctccaagaacttgcttctgaaatgggttctcctctggaacatctgtctgcaattaatgaacatggtgaaatgatagcgagtattaatttgcttcaaatcaaaaaacttgtgcctgaacccaagcatccctcatggattgattatgataaagggcgaaaattattgttcttaaaattagacttaaaagatcaaaatggattttcctatctcatcgatatacataaaaataaaaatcatgaagcattttgtgcctttcttatttttactcagaataagttaacaagcgaacaaattaaaaaaatctgtattgaactagaaaatgccaagggaataaaaaaatgggcactctactgtgatagtttcattcataaaatgattgcaataaaacatttatacgcaacaccagatgaatggaaaaatcgctttaaaaatttattcataagcttacagaaggacaaatcctaa

SEQ ID NO: 45630 - DNA, 1488 bp, Acinetobacter baumannii
atgttatccactattcgagaacaatggttctccaatattcgcggggatgttcttgcgggtattgttgttgctttggctctaattcctgaagcaattgctttctccattattgcaggcgttgatcctaaagtggggctatatgcttcattctgtattgctgttgtgattgcttttgtgggcggtcgtcctggtatgatttctgctgcaactggtgctatggctttattaatggtcacactggttaaagagcatggtctgcaatatttattagcagccacaattttgacaggatttattcaaatcctagcaggctatctaaaattaggagccttgatgcgttttgtatcaaagtcagtcgttattggctttgtaaatgccttggctattctaatttttatggctcaattgcctgaacttaccaacgtcacttggcatgtttatgcgatgacaatcggtggtttagcggttatttatctatttccctatatcccagtgatagggaaacttttaccctctcccctcatctgtattgtcctacttacgctctttgccttattcattggtttagatgtaagaactgtcggtgatatggggcaattgccggatacgcttccaattttcttgcttcctgatattcctttaaatcttgaaactttagctattattttaccctattcactaggtttggcagccgtgggtttacttgagtccatgatgaccgcaacaattgtcgacgatttaacagataccaccagtgataaaaaccgagaatgtaaagggcaaggtgttgccaatgtcgcttcaggcttcttaggcggaatggcaggctgtgccatgattggtcaatccattattaatgtgaaatctggtggacgtacccgtttatcatcatttagtgcaggggtctttctgttaattatggtggtgtttatcagtgactggcttaaagccattccaatggctgcactggttgctgtcatgattatggtatcaattggaacatttaactgggattctctacgcaatatccgccaatatcctctctctagcaatatcgtgatgatcgttacagtcgtcgtagttgttgccacacataacctggcttatggtgtattagtcggtgttcttctttctgcattattttttgccaataaaattgaacgctatatggcgattcaatctgtatttgatgaatcagaaagcacacgtacttatacggtaacaggtcaagtgttcttcagttcagcagataaatttacttctgcatttgatttcaaagaggcactttcaaaagtggtgattgatgtcagtcaggcacacttctgggatgtttctgcggttgctgccgtagataaagtggtcattaagtttagacgtgaaggaacagaagtcgaacttattggaatgaatgaagctagtaaaacattagtcgataagtttggtatccatgataagccagatgctttagatcgcttaaatagccactaa

SEQ ID NO: 45631 - DNA, 852 bp, Acinetobacter baumannii
atgtcaaaaattattgcatgtattgatggatcattagtaacaaatactgtgtgtgattatgcagcttggtttagcgataaacttaattcacctattaaactattgcatgtcattgataagccaaaagcaaaagcaccacaagatttaagtggtgcaattggtctaggaagtcgagaaaccttgctcaaagaattggttgaactcgaagaacgtaagggaaaaatcgagctagagcatggccagattcttcttcgggaagcaaagaactatttattggagaagttctctattgatgctcaaagttttcaacgccatggcagtgttttagaaacaatcatgggaatggaagacgacattagagttcttgttatgggtaagcatgggaatgaaaccgagcatgattccagtaaaattggaacccatattgaaaatgttgttcgtgcccttcataaacccgtattaataacgtctgcaccatttagtccacctaagtcttttttaattgcttttgatggaagtcagactgcaagaaaatgtgttgaacgcattgcgtcaagtccattacttaaaggtcttgcagtacatttggtttatgtcggaaatccgaatagtgaaatgcaaaatcagctctcttgggcaaaagagcaacttgaatcacaaggttttaatatcacctcgaatacgttggatggtgaagttgataaggcaattatcaattacgctgaacagcatcaaatcgatttgattgtggttggggcttatggtcattcaaagatacgtcaattttttattggcagcaccaccacaaaagtgatcacaagcgctaataaaccagtcctgttactacgataa

SEQ ID NO: 45632 - DNA, 300 bp, Acinetobacter baumannii
atgaatacgatgttaataagcccaactctaaatgtttcttgttccgaaaatgtgctgttaaaaatatcctcatactttggtgtatctcatgaacaagcttatcgaaaaggcgtagattctcttttaaaattaacagagatggttatagcaaataatgaacattctgaaattattaaactttttttgtgtgattgtcatttaagaacatctatcaatttagatgatatatccgatatgcctactcaattgataggcgattgccttaatgtgattgttctacgttatgcatttgtagtttga

SEQ ID NO: 45633 - DNA, 372 bp, Acinetobacter baumannii
atgggacaagctaaacaaaggggtacacttgagcaaagagtaaagcaagctcaagaacaaaaagatgatttttatggaactgaaagaagtgtagcagaagttctagctgaactaggcttaccaaaagaaagtacagtaaaaggttatgttatccatctacctgaaaaagatgaatttgtagctgcaattaatgacaataatatttctttttcagttgcttatgctcggacacctgaattagcgatgatatatgatgaaccacaaaaagcgatttcagacgctaaaaagatttcaaaacataagctattggtttgtgttttatttgaaacttcaaaccaatacatgattaatgatatttgggctaattattag

SEQ ID NO: 45634 - DNA, 1431 bp, Acinetobacter baumannii
ttgactgaaaatgttattgaacatgactgtcatggatgcaaccagtctgtttcttttataaaaaaacgatataaaggcaagaaatattgttcgacttgttatgcccgtatctttaaaaagcgattatgcccaagttgtggtgactttgcccgactccctagagatgatgaacaagccatttgcaatgaatgtataaagaaacaaccctgtattcgatgtaatcagacaaataaaccaataggtaagctgaccgaatatggtgtggtgtgtaatagttgttccgtgtattttagacccattgagccttgtgaacgatgtggtacgccatcacaaaaattgacccgaatttcacgatttaatgatgatctacgggtatgtccaaaatgtgcgacacgagattatgagacatgcccatcatgccagaaacatcgcttattggagtctgatgtatcaggacaaagaacgtgtaaaaaatgtagagataagcctcagaaatcctgtaaagcatgtcattgtatgattgcagcaggttgtgctgatttatgcgatgattgttattggcatcaaaatttatggaataaatttgatcaaaatcagaaagtatttgagtctagtgacttaaaacagcagtatgaaaactatataggctggttagaaaagaaagttggatcacataaagctgcattatatataaataaacatacccatttctttattaaaaccgaaatagattggaatcaatctgtgcctactccaaagcagttattagtaaggttacgaagtagtgggcttagaaaatttgaattggtgatgcaatggcttgaagaggtgcatgacattcgaatagatatggataacaaaaaaagttgttcagaacgagatcagatggaaaagcttgtgcaacgtattttgcaaccatctttggcttatgatgttgtactggaatacaaaaataaattagaagaaaaaatcaaacgaggtgagacttcaatacgttcagcgaggttggctgtaaagcctgctgtggcgttgatgctgtcaatggagggagaaagtgctcaattaccaaatttggagcatgtcaaagcgtatcttgctgaatattctggtcaagctgcggcgctcactggattcattaactttttaaatgagaattacggtgcttccattgattatttaaaattaaaaaaatctgattttttaaagactaaacaaaagaaaaaactagaaatggaacttattgcacttacccaaactgatttaaatgacagtgaacttatcttaagttgggtcagaaatgggcttaggtattttcatcaacttccttacatagatgctctaaagattaaaacggaaatgattactgagattgaggatggttttactgttgtgcttaatgggcaatattattggttgccaaaaacacaataa

SEQ ID NO: 45635 - DNA, 1116 bp, Acinetobacter baumannii
atgagtcaacctgaacaatgttggtatatcagaactcccattcagcaaggggaaatattttcatcttggttgatccgttcagccttagatgtaggttgctcacctatggttctcattgaggctttatgggggaaatggagagctttaacgattgatttagacaaaggagtagatgccgaaagattcgatgctctgttatctcatagtatggagtcaaaacagaagatacagcaatcgatgttgagtagcgtcgtttctcagatacagccaaattatgattcaaatcaaaatatcccttgggttttatccttgggcacacgaaaccgctcaaatacatcaggtcggcaagtatgtgttgaatgcctgaagagtcatgaaaatccgccttatttgcgcttaatgtggcgtattgggtggcattgtagttgtgttgagcatcagttaagtttaattgaccattgccctgaatgtggtgtgacgatccaaccatttaaagccgatatggaacatggttgtttagcgatctgtacgacatgtggctttgatttaaggcgttgtgaggaaagcaaaaacatcaatttaaatgctttaaacttccaaaataaagcagagcaagtcttaaaacaaaaaattggtttttataatcaatccccagtgactactcaagtatggtttgaaattgctcgttcatggctcagtgagattagatttttggtcaatacgcccaataaaaatgtgattcaattatttgaaagttttgacgtaaatttacatctttcacatccagttaccccattagcatttgaatatctgagtactcaggaacgaatagttttgctttcaatgttggatcagattatggatattccatgtgacttattggtacaacgatcaaaggaatatggagtaagtcgtgcaaatttttgggacaagcgcaagaagttgcctgttcagcttcaacagatgaaagatttaatgattaagcctacaagacgttatcctgtctctcgtgcagcaataactgttactaagccaaaatctaaagcgactgtacaacgtcaatggttaaatttattaagaagaagcaataatagtggagcgatgcatattgactga

SEQ ID NO: 45636 - DNA, 921 bp, Acinetobacter baumannii
atggaaaaatatgaacatcttgcagagcatgtacttgaaatcatgcaattaagcgatagtgaacggattgagacattatttactgatagatggattggctataagaaagccattaccatcatgaacacattgaccgatattttgaatcgccctaggaaattaagacctgaatgcttgttgattgttggtgactccaatatgggcaaaacaactatcattcatgagtttgctagacagtattatacaaaaaccgtaagtgatgctgacatggatttattgtccgtaactaagccagttttaccgatacttgctccagcaaaagccaatgttaaagaactctatattaatattttaaatcacttctttgtgccatttcgggcaagtgatcctgaagccaaattacgaaatcaagccgtacacttgatgcgtaagtatgaaacaaaaatgttgattatcgatgaaattcataattgtctgacaggttcagccaaattgcttcccgaagtcatgaatacgctcaagaacctcagcaatgaattgagtctgaatatcgtaggtgttggtactcgtgaggcaatcaccatactgcatactgatccgcaatatgccagtcgctttgatgtggtgaatttacctaaatgggaactcaatcaagattttttaagattattagtcagctatgttcgactattgccgttaaaaaaacagtctaatcttgcatccaaagagattgctacgttgatttttgaagtgtcaggtggaaatttaggggatttaaatcgattactggtggagtgtgccaaagaagccattttacaaggtgatgaagaaattacctatgacatcgtacataagtttaaatggcttaaacctacggagggtttaagaaatattagaaatataaatctcagcctgagttaa

SEQ ID NO: 45637 - DNA, 1911 bp, Acinetobacter baumannii
atgattgaatctaatgctgtcaatatcgatcgtagtcgtatcattctaaaacccaatgtggttgtcggttatgaggggcaaccctataaaattgtgaatgttttaaatgccaatgacattgttatatcaagtcttgattcggtacgtagtctacaggtcaatgctagaagtttgaccatttttaatgggggaaatacgctaactgagcgtttgaataagggtgatcaggatattagtaatgaagcttggcagattgctttacaacgttatgagattattaagcctttgattgagtattcaacgactgaactggtcgaaaatagggcgaatgaatatgatgtgaatcgctcaacattgtggaaatggcttaaagattatcgggaaaataattctctaatggcattgattcccaaaaaacgaggttggacaactgaaaaatcaaggttgtcacctcaagtgagcaatatcattaaacaagctatcaatgatgaatatttgaatgcgaagaaacccagtatttccaaaacgattgaaattgtaaaagcagagtgttctcggcttcagcttgaagcaccgcatgaaaactctattcgtagaagaatcgaggctttaaatgattaccaagtaacgaaagcacgtcttggatctaaagctgcaatagataaatttaaggctgctgctggttcatttccaaatgctgattaccctttggcatatgtgcagattgatcatacacctctagatattgaaatcgtggatgacgagtttagagaagcgattggaaaacctcatttaaccttggcaatcgatgttttcagtcggatgatcgtagggtattacctatcactagaagcgccaagtacgacttcagtggcgatgtgtatcgcatcttgtattttgtcaaaaaaacgtaagttgatcgaactcgatattgatgctgaatggcaggtcgaagggattatggactcggtgcatacagataatggccccgattttagaaccaatcacatcagtaaagcttgtctaaagtatgggattcattgggaataccgaccaattggtggggcaagatttggcggtcatatcgagcgtatgcttggtatcgtcaatcttgaaatgcatgtcttggatggtacaactttttcaaatgtacagcagcgtgggacttatgattccgctaaacaagcctgtatgacattaaaagagcttgaatactatatcgtgtattggattactaaagtttatcaccagaagaaacattccgctttaggaacatccccaatcgttaaatgggaagaaggtgtttgggggacgaagacgacagcaggtacaggtttgaaagaacgtgtatcagatgaagataccttgtttattgattttctacctgaatttgaagcgactattcagcgtacaggggtgcaaaaagataacttattctattttgccgactgtttaagacaatgggttaattctattgatccagaggacaataatcgaaagcgcaaaagaaaattcttgtttaaacgtgatccgagggatatttcacagatttggttttatgagccatattctaatacctattttaaagtacctaccgcaaagcgagagataccaccgattagcttatttgaatataagcaggttcagaactatctcaaaagtgaacgtcaggatgttcagaatcaggatgagatttacaaggcgattttgcatctacgtgatcaacttaatcaggctagaagcttgactcgaaagcaacgtcgctcaaaccaaagaaaaaaggaaaatgcaaaagccattactcagctttccgaacagaatcagtctaaaaaggctgtagtttctgaaagtcttcagacaagtgatgatttgtggagtactcctttaactgcatttgacgatttaaggtga

SEQ ID NO: 45638 - DNA, 711 bp, Acinetobacter baumannii
atgaaaaaattgagtgacgaatacttacctgttagaaaagctcaaactgtttatgggagtatttcgggaaattatgcctttagaggtgagaaaaccatttggtttgaatcgacccttgagcgtgatttcatacttaagcaagaatttaataacaatgtgattgatgttatcggtcaacctgtagttatcccctacatcactgaattgggtaaccaatcaacctacactcctgactttttagtgcagttttcaagctcgaattgtgatgattttgaggattttcctgtaccaatgctcatcgaaattaagcctaagaaaaagcttgttgaggactgggataagttaaaaccaaaattcagagcagcccatcgttttgctgctgataaaggatggaagttcaaaattatcagtgaaacaagattatatgatcagtattgggaaaatattaatttcttaaaaaaatttagacgctctcatgtaggtgccgttgatcaacaactattactcgataccctacaagagttaggtcaatcaacaattaatcaattacctgcccatatttttaaagataaaaccaatgttttaaaaggaattcaccaagtttgggcattagtggcaaagcgcatgattgcttgtgacttgtattgccctttaacggctgaaacagtgatatgggtgaaccaaaatgatgcatttgcgaggaatatctaa

SEQ ID NO: 45639 - DNA, 171 bp, Acinetobacter baumannii
atgttttctttatattttacgcaaacaaaatgttcatactttattgttatatataaagataattatttggaagatttttatttttcgcgttatataagttttttagtctctaaattaatgaagtgtagcgataccaaatatgaacttggcacagcaattgctaaagcttaa

SEQ ID NO: 45640 - DNA, 855 bp, Acinetobacter baumannii
atgacgatgacactccctgattttaaactcgatttattaatagaagcagaagagttagtgccttatttaggcaatgaatatatccgtattgttgatttgagccgtacatcagtttatgaacagctccatgttccgcatgctattcacttacagcctaaatggttagttgctcaacacgaagaagcgacaggtgttttaccggatgaagcaggtttacaagcgcttattgaaaaattgaatatttcaccaaatcaccatgtggtggtctatgatgatgaaggtggagcatgggcagggcgtttaatctggaatctccattgcttaggttttacccgtacaagtttaattaatggcggaattcatgcatggcttggtgcaggtttacccaccacagccgaggttgaagaattacctcgagttgataacttaattcagatcgatttatcacatgctgctcagttccgagtgaactatgaagaactacgcaaacaagttgagcaagaaagtgtgcaactctgggattgccggacgagtgatgaatatagtggcgtccgtttagcagcgcgacgcggtggtcacattccaaatgccctccattttgaatggagtactgcacttaatcgtcaaaatcatctaaaattgcatccgcttgaacgcacgcggcagcgtcttgaacaacttgggttcgatttaaaacaacctgtagtcgtatactgccagtcacatcaccgttctggtttggcttatattctggctagacttttaggttgggaagcaaaagcctatgatggtgcgtggagtgaatggggcaatcgcctcgatagtcctatcattactggagaatcgccgtcttga

SEQ ID NO: 45641 - DNA, 420 bp, Acinetobacter baumannii
atgcaatcacttccaaacgttctactatatcttgctgctttattaacattgtgtgccgcattacttcattttgtttgtgtgttctggggagcaaatggttttcggtttttaggggctgggaaaagtattgtccagatggttgaaagaggacactggtatcctaattttacagctataactgtgggcttaattctgactgtatgttctatgtatgccttctttgcagcaaagggaatacaggtattaccttttacaaaaattattttgtcgcttgttgcagcagtgtttcttatccgtggttttgcttttccatggttaaagtcaaaatttgtcggtaatagtgatttattttggtatgtcagctcagccttttgtttaatattgggcgctttatatgccgcaggcgtatatttaatttga

SEQ ID NO: 45642 - DNA, 2025 bp, Acinetobacter baumannii
atgtcaaaaatttatattgttaaatcaggtgatacactttggggaatttcaaaaaagcatcatatctcagtaaaagagttagctagaattaattcattatcaggtagaatgattcataatcttagaattgggcaaaagatttatttacaaaatgatgtaaataacactaataattttgaaacccaattaaaaattattttgatggacctttcttttaagcctatattaaaagctaccattcaattagagtttgatggaaaaaaaattattagaaatacaaaaaatagtatttttgaagatataaacattcaagatcattcgaaaggattaaaagttttttttaaaaacttaaatggtactttcgatttaattgccgatcataaagtgcttccattagggcggaaagtattaaaattaacatcaagaaaaatgaaagtagaaggttcacattatgcaaaagatggaatattaaatgaaacagttaatcagattatgagtaatttaaaaaaggttggaaaacctatagttgaaagcatatctactacatcgaataaagatgaattgaaaaataagcaaccaccactcaaaatacctgaagaaaaaatagagcaaaagcgtaccgataatggtaatagtacccatataattgctgcacaatttacagaagataactttttattaaagccagttaataataaatatcgagcttatattgtgaatgcagctaaaagacatggtttcacgccccactctttagcagctgttattgaagctgaagcagcaaaaataaaaaagacaggtgaatggaatactaatagtaaagcaaactcgagtactgcagcaggattgacccaattcttagatgaaacatggttagctatgtgtaaggataagagttcattagttgggcaatatgtaatgaataatcctaaactaactatacagcagaaattaaatttaagatttaatgcggaaatggctattgatgctgccgcagcctatgcaattagtaattttaaatcatctggtttgccctatcaaaaactaacagaaccaagttcaatcgctaagtttgcttatttgttacatcatgaaggagctacaggaggtaaaaattttgtactaaacactttaagtcaggaacgtgcaaaaaaattactttttactcaatttggaaagaatggcgctaagcaagctgcagattttttaaaccggtataaaggtgatgcaaaggctgcttatggagcatggctgagaaattatattgatgggcatataaatatttatcaatatgttgtagataagagcaagacttctggaataaacttaagtacggatgaaactataaagttattgaaaggacaaacaatttccactcctgctcctaaaatatcaactaccactaataatcaacaagtgacaaatgtcagtactattgaaaaatctgaatctaaaattagaattaatacttcccaagccccaacaaataatgttggaggagataataagtggcataaccctttagcagattgcaaattaagaacagcaggtttagcgaatgctaaaggtgcaacgtttggtaaagtaagaaataatggtactaagaatcaccagggtgttgatttacaagctaatccaggtacgaaaatatatgcagtctgcggtggtgttattgcatttgctggggcaactggtggtgcatatggtaaagtaattgtcttaaaagttgatataaacgatttacctgaaaagcaaaagaaatatgctcaaactaaacttacaaaaaataaatatgtctacttcttttatgctcatttatcagttattgatgtagataaaggtgatccagttgatactggcgaagtaattggaaaaactggtgcaacagggaatgctaataaaatgaccactatatccaaaggtgcccatcttcattttgaagccagaagcgctcccttattaggagtagggttagatggaagatttgacccaatcccatttataaatgcgaatttaccatattaa

SEQ ID NO: 45643 - DNA, 2484 bp, Acinetobacter baumannii
atgttcttactgaaaaatctcgtctcttcaatatcaaaagttactcaggacctgggtaatattgtatcgataacccctgtagtaaacacaggttcctctgttaatgtaaatgtttctgatatcaacattgctaatgtttcaacaacaggcttactttctaatgtgatttcaactgtaaccgatacagtttcacatacaaccacagacttagtttctaatgtagttggtaccgtaacaggtactgtaggttctacaagcccaattgatactgtaaccaatattattggcggcgtaacgggtggcgttacaggcaaccctcttgaagttgttactgacattatcggcggagtaacgggtggtgttgtcggcggaacttctccaatctctccagtaatcgatgttgttcaaggcggcattgatattcttcaaggcgttgaaagcttaaaaactgaaattattaatacaggcattgaaactgtagctgatgcagttattggtgtattacctcaagctgagcatccagtttctgaaattgcagaccttggcacattaacttttgaaacttctcgtgacacagtcaatggtgctcttgaagttgtttctgatttagtcggtggtgatattcaaggcgctactgaatcagcgactggtattctcgatacgcttattacaaatggcacaactgctacaggtattgttactggtgtggttggaagtgttactgatgttattggtggcgtaactggtggtgttgatggcaacccacttgaagtgattacagatattatcggtggtgtaactggcggtgttgatggcaacccacttgaagtgattacagatattattggcggtgtaactggtggtgttgggggtgataaccctcttggcgtagtaactgatattatcggcggcgtaaccggtggcattattggtggcggtacatctcctatttctccagttattgatgttgttcaaggtggcatcgatattcttcaaggcgttgaaagcctaaaaactgaaattattaacactggtattgatacagtagccgacactattattggtgtattacctcaagctgagcatccagtttctgaaattgcagaccttggcacattaactttcgaaacgtctcgtgacacggtcaatggtgctcttgaagttgtttctgatttagtcggtggcgatattcaaggtgctactgaaaatgcaactggtattttaggaacacttattcagaatggttcaacagcgactggaattgttactgatattcttggtggcgtaacaggtactatcggcggcgtaactggtggtatcggtggtgacaatccgctcggtatagtaactgacattatcggcggtgttactggcggtatcggcggtgataatccgcttggtgtagtgactgacattatcggtggtgttactggcggtatcggcggtgataatccgcttggtgtagtgactgacattatcggtggtgttactggcggtatcggtggtgacaatccgcttggtgtagtaactgatattatcggtggtgttactggcggtattggtggtgacaatccgcttggtgtagtaactgatattatcggtggtgttactggcggtattggtggtgacaatccgcttggtgtagtaactgacattatcggcggcgtaaccggtggtattattggtggcggtacatctcctatttctccagtaatcgatgttgttcaaggtggcatcgatattcttcaaggcgttgaaagcctaaaaactgaaattattaatactggtattgatacagttgcggatacaattatcggtatccttccacaagcagaacatccagtttctgaaattgcagaccttggcacattaacttttgaaacgtctcgtgacacggtcaatggtgctcttgaagttgtgtctgatttagtcggtggtgatattcaaggcgctactgaatcggctaccggtattctcgatacgcttattacaaatggtacaactgcaactggtttagtaactgaaatcattggtggagtaacaggaactattggtggcgtaactggcggagatagcccactaggtttagtaactgatttacttggtggtttaactggtagcgtaggcggcgacagtccgcttggtgtagtcactgaccttctcggtggtttaactggtagcgtaggtggcgacagtccgcttggcgtagtcactgatctgctcggcggtttaactggtggtgttactggcggtacagacaaccctatcggtatcgtaacggatatcgttggaagcttaacgggtggtgttactggtgaaggcagtttagatgttatttctaatttgctaggcggattgactggtggtagcttactcggtggtgtaacttctacagtatctagcgtaacaaatacaacgcatacgatcgtaccgacatcattacttactgataacttcctagaaaactcattcaatactgtttaa

SEQ ID NO: 45644 - DNA, 948 bp, Acinetobacter baumannii
atgagcaataataacgattacgatatttcggattcaaaggattgcgaaaaatttgccaatcaatttattcaggaatttccaattcgctctgccgaaattggacaggggacggtgattaagcgggctttacctagtcgacaaaaaagaatgattggggcatggtgctttttagatcatgcaggaccagtaacatttcctgccggcaatggtttagatgtaggacctcatccacatattggtttgcaaaccttcacttggatgattgaagggaccatgatgcataccgatagtttagggtcaaagcaattaattcgccctaaacaggtaaatttgatgacagcaggacatggtatttctcataccgaggttgcacctgatactgaaactcaaatgcatgcggcacagctctggatcgccttaccggaccataagcgcaacatggatccgaaatttgaacattatcccgatcttcctgttgttgaaaaagacggtctggaatttactgtactggtgggtgaatatttagagacgacttctccagttgtggttcatacaccgttagtaggggttgatctcattgctacccaagatactaaaacacgtattccactaaatcctgaatttgaatatggttttatggcattagatggcgtagctcatgtgaatggccatgaacttactgctgacaatatggttgtattagatacaggtttgaacgaaattgagattgaagtaaagaaagggaaccgtgtgctattaatcggtggtgaaccttttgaaactccgatcttattatggtggaatttcgttgcacgtacgatggacgatttaaaagaagcacgtgagcaatgggttaatcatgacgtgcgttttggtgaaattccagattatgtgggtgcccgcttagaagcaccagttcttccagatcaaatgagagcatcaaaatga

SEQ ID NO: 45645 - DNA, 393 bp, Acinetobacter baumannii
atggatgcacatttactcactaaaattatccatatgactgcggtagcagctgcacttatggtttttgtattacgcgcttcaacactatttattggtgtacaaggtgaacaacctaacccagcagggcgtaaagttttagttgctttacagcatttgtcatttaccgtggttttcattaccggagcaattttactggtgatgaagaactttcaggtacagccatggttctacgctaaaattatcttatttttagtgcttttatcatctttaatgaaagcctttaaaaaggatgacactattttactagctcagcgccgtgcgggtttagtcattagtgcaatcgcatttgttgccattattattttggtgatagtgaaacctgtttttgcttaa

SEQ ID NO: 45646 - DNA, 1866 bp, Acinetobacter baumannii
atggataatttaaataacgcaaaaaaagataatttttcacggaagaccatattagtaacaggtgcagcaggttttattggtagcagattgatcgttgaacttctgcgtgaaggtcatcaggtgattgctgcgctgcgtaatgccgcaaccaagaaagataagctattaggtttcattgcaacccaagggctggctgatccatctatatcttttgttgaatatgatttaagccgcgattttaagctggactctctattatcggacgcccagacaaaaatccatgtaatttatcatctcgcagcatcatttaattggggcattagcaaagctgaagctgagcgtaccaatattaaatcagggcttgctttgattgagtgggctgcaacattgaagcagcttgagcgatttatctggattggtgggtatcgtgtggctgcgccgccgcaagaatcggctgatgaattgtattgcaaacatggtggttatgaggcttctaaaattctagggcatcaagctttcatcgaggcttgtaagcgtttaaatgtgccatggactgcaataaatccggcgacagtcattgatggtttttataattatggcgatatgcaatatattggtattgctgacatgattggtaagctctatcagggacgtttactggcattaccaggtggtcgtgacacattcctacctctatgcaatatgcagtatatcgtgagctttttgatccgaacgatgtcttatcctgaaactattgctcaggaatatatgctgcttgatcctgcgacacccaaatttcatcgcctagttcacctagctgctgagcatttgggagttagctcaccacatttacaaatacctaaagttttgctcgagaaattaccagaggtattacttgacggttctaaagagcaactttctttcatttctaccgagcactaccatgttgctggggcagaggcgatggcggcgaagatgggcatcgcagacttgatcagtatcatgccttatttttctcgttggattgatcgcttggtgtttacacgttttggtcgtatgcaagtaccaacacctaattcttttagctatcagaaccgttattggacagaaatttatactaaccagccagttggttcagaaaaagtttctgcattatttttacacggcattccatttgatagtgcatgttggtctccaatcatcaataaaattacttatgatcaggtcgctatgatggacttaccgggacttgggcgttcaggtagttatgaaatgatggaagataataaccatcaatttattgatactgcggcagagcttttggcaccaaatagtgtagtgattgcccactcattaggatgtctttttgcattaaatcttgcaaagaaatatccagataaagttgcacgccttatccttatatcgccttattttgttcaggcacaggctgcaaaaatgtttcagatacaagcgatatctaaactcattttccgttttgtgccgaaagatgtgattgctaaagatttacatccagaggggcaacaaaatctgtcagtgagatatgcgatggattcactacgtcgcatgtcagtgtctaagcatattagtgagtacatgcaccacattaatttgccgcagcagcgcgcagcacagacagctttgctttctgagcttcgatctaaaatcgagattattgtgggagagaaagatccaattgttaccccaatcagtccagatatcccggtacatatcatcgctggtgcaggtcataatccacacgttacccatgtagaagcggtttatgatcaccttacaccagttctgacaaagtacatcagcactacagcacagcttagtgatgtctga

SEQ ID NO: 45647 - DNA, 1275 bp, Acinetobacter baumannii
atgacgcaaggtgcctattgggtatttgtatgctgcagtagctttatgctactgcagcatacttatgcagatgacagcgaaatgagttttgtgagccaaaactcagctagactcgatgtgtggtcatcagatcgtgatttaagttcgttaaaaaacattgggcaagcaagtttctggtccaatggtacactcaaatttaaccctgcatttaagctgcattacgacatagtggtttcagacgaaacggaccacactgtaaacccagatcaggtgagtaaggtaaatcgtaacttacgtgagttgtatgcgtcatataattgggaccagaccgtctatgtcgatgttggtcgtcagattgtcgtctgggggagagcggatggaattaacccaacggataacctatcgccccgtgactatacgcgtctagtaccagacgagacagatcaacgtctaggaaatgatgcaatcaaattgacgtatattcctgaatctggaaccaataaatggacggcattgtggtatccgcgtagtcgttcagatgtgattccattgcgtcagattgctggtgttcagtatgacatagaccgtaagagccgtcctgcatttgcaatgcgttgggattattccgtagatggtctagatgtaggggcatcgtatttctcaggtttagatcatatgcctgatctgtcagttctttcagcgtctccaacaggggaggccacattgcaactgaaaaataatcctatgtctgtctatgggtttgatttcagttataaccataacgatctcgtatggcgcggtgaagctgcatatacaaagactgactcgaatggcagcgaagatcttacccataagaaaaataatttaactatagttatggggccggaatggtcattaaaaaattctacgctgagtttagtaggcgtgtataagcatacagaagactttaaatctgccgatagcctaacaaatccatcattgagtacagtctaccgttatcagcaaacgattagtgatcaatatgagcaagatcagtatggagctatgctgcgttatgcgcttaacctattgaatgacaatttaaagttagagtttacaggattctattttgcaccagagcctaatgaattgttgagagtacgtattaactacaacctcaatgatcactggcagttaaatgcaggtggagatcgcttctggggcagaaatgatacggtactaggacaatttagagataacagtctggtgtatgcccaggttcgatataacttttaa

SEQ ID NO: 45648 - DNA, 2895 bp, Acinetobacter baumannii
atgttctgggaacgtctgggtggtatggatgagtttaaagaactactcctaccaatccagactccggccactttggttggacaagatttgacgttaggaagttttccggttcgccagcaagaaggacagttggatattacgctggaaatgggcggtgaatatcaaggtgaactcgttggtgtattgaaatacaacactgatctattttctgcgcagtctgccaagaatatggtgcaactgctgcaagctgtgctatcagagatggtggctcaccctgaacgtaagatcgttgagttagatatcgcacctgattataaagatagtatccagttcgaggccctccgtggaaaggcgactgattatgctcagcatgatctattcgcaatgattctcaagcagattgatgagcgtggtgacaatcatgctttgacctcaaacgatcatgcggttagctactgtgagttaggtcaacatattgctggtattgctgaatatttgtgtgcacacggcattacacgcggtgatcgtgtaggtctgatgttagaccgcacggcgttattgccagcagcaatccttgggatctgggcggcaggtgcagcttatgtgccactggatcctaatttcccaactgaacgtctacagaacattattgaagacgctgaacctaaagtcatcttgactcaaaccgagttaatggatggtcttaacgtttctgtgcctcgcttagatatcaatcaagctggtgttgtggcacttgaacaagtgcgcgagacgcttgcctttggtgacatagcttatgtgatgtacacatcaggctcgacaggtaagcctaaaggtgtccgtattgggcatccttcaattatcaatttcttgctatctatgaatgatagattgcaagtaacgactgaaactcagttgttagcaatcaccacgtatgcatttgatatttcaattcttgaattactcattccgctgatgtacggcggtgtggtgcatgtttgcccacgtgaggtatcacaagatggcaatcaattggtggattatctaaatgctaagtctatcaatattctgcaggcaacaccggcttcttggaaaatgctcttagacagcgagtggagcggcaatgcgggattgacagcactctgtggaggcgaagcgttagatactattctggcagaaaaactgctgggtaaagtcggttgcttatggaatgtctatggtccgaccgaaactacagtgtggtctagtgcggctcgtatcactgatgcaaagtatattgatttaggtgaaccactggcgaacactcagctttatgtccttgatgaacagcagcgtttagttccaccaggtgttatgggtgagctttggattggtggtgatggtctggcagttgattactggcatcgaccagaactgacagatgcccaatttagaacattgccatctctaccaaatgccggtcgactctaccgtacaggggataaagtctgcctgcgtacagatggacgcttgactcatcacggacgtctggattttcaggtcaagattcgtgggttccgtattgaactaggtgaaattgagaatgttctcaaacaaatcgacggtattacagacgcagtagtgctagttaaaactacagctgacaacgaccagaaactggtggcgtatgtaactggacaagagcttgatattgctggtttgaaaaagaccctacaaatccatcttccagcttatatggtgccaagtgcgtttatccgattggatgagtttccaatgacggccaacaataagttggatcgtaaggcatttcctgagccgatctttgagcagagcaatgattatgttgcaccgcgtgatccgattgaaatcgaactgtgtactacctttgaacaaatcttgtcggtcaagcgagttggtatacatgatgatttctttgaattaggtgggcattcactattagctgtgaagcttgtcaaccatcttaaaaaggcttttggtaccgaactgtcagttgctttgttggcacagtactccactgtggaacgtctgggtgagatcattcgtgaaaataaagaaattaaaccatccatcgtaattgagctgcgccgtggaacctatgaacaaccactgtggctgttccatccaattggtggcagtaccttctgttatatggaactttcgcgtcatcttaatccgaaccgtaccctacgtgctattcagtctcctggactgattgaggccgatgctgcggaagtggcgattgaagaaatggcgacgctctatattgctgaaatgcaaaagatgcagcctcaaggaccttatttcctcggtggctggtgtttcggtggtgcgatcgcatacgagatcagtcatcagttgcgtcaaatgggacagcaggtcacagggattgtcatgatcgatacccgtgctccaattccagagaatgtgcctgaagatgccgacgatgccatgcttttgtcttggttcgcccgtgatttggctgcaccttatggcaaaaagttgacgatcccagcgcaatatttgcgtgagttgagtccagatcaaatgtttgatcatgtacttaaagaagctaaagccattaatgttctgcctctcgatgcagacccatcagatttccgactttactttgatacttatttggcgaatggcatcgcactccagacctatttccctgaacctgaagattttccaatccttttggtcaaggccaaagatgagcaggaagactttggagaaagtctaggttgggatcaactagtcaaagacacgttgacacaagtcgatttgcctggtgaccactcatcaattatgtacgctgagaatgtcgtggctgtagcccagacaattgatcagatgtacccaattcctacataa

SEQ ID NO: 45649 - DNA, 717 bp, Acinetobacter baumannii
atggaaagttggcaagaggatttattatcagcatttttggtggtaaaaaatgaataccagttgtttgagatcgttaaatctaccgcatcaaggctcggatttgactattgcgcttatggtatgcaatcacccttatctattgctgaaccaaaaacaattatgttgaataattatccagaagcatggcagaaacgttatgtggaacggcaatatgtgaagatagatccaactgtgcagcattgtatggtatcacttcaacctcttgtttggtcgagtcaatctgcaaagacacaggcagaaaaagatttttgggaggaagcgcgttcttatggtttaaatgtcggttgggctcagtcaagccgtgattttattgggacccgaggaatgctaacactggcaagatccaacgaccagttatcagaaaaagagcaaaaagcacaatatacgaatatgtactggttaactcaaacagtgcattccagcattgctaaaatagtaaatgatgtagagtttgctaaattcaatctttatttaacgaacagggaaaaagaggcattacgttggactgccgaaggcaaaacgtcagcagaaatagctcagattcttggggtaactgaaagaaccgtaaatttccatctcagtaactccatgcaaaagttaaatgtaaataataaaatttcagcagctattcgagctgtaatgctagggcttttgtag

SEQ ID NO: 45650 - DNA, 1230 bp, Acinetobacter baumannii
atggaacgtgttgtcatcacaggtatgggaattaattcttgtattggaaatacattagagaaagtaaccgagtccttaaaagcaggccgctctggcattcgctataacgaagtctatgcaaaactaaactttcgaagtcatgtgagcgccactgccgaaatgaattttgaaaatattgatccagaattaaaaaaacacatgggcgtttgcgccatgtatgcctacaactcggcactcgatgcgctacaacatgccaagcttgatgtaactgacattgccaacaacccaaaatatggcgtgattgggggaacaggcggcacctcaacagcgtctatcatcgacatgttgcataccctaaaagaaaaaggcgtcagcgaagtatcacccgatttagcaccacgctacctcaccagcaccattagctctaacttatcacgtgctttcaacctaaaaggcgtatctcaatcagtcgcgagtgcctgtgcgacttcagccgatgcaatcggttatgcatatcaccttattgccgctggcaaacaagacctgatgctggcgggcggtggcgaagaagaccattggtcccaaaccgcaatattcgatgcaatgggcgccttatgttctaaatataacgatgcacctgaaacggcttcacgtccatattcagtcgataacgatggctttgtgatcgctggcggcggtggcatggtggttttagagtctttaagtcatgcccaaaagcgcggagcaaaaattttggccgaagtggttgggtacgctgccaatagtgatggtgtcgatatggtagccccgagcggtgaaggtgcgactcgttgcatcaaactggcactcgcagaagcaaagcaaaacggctctgacaccatcgactatatcaacacgcatggcacttcaacgccagcaggagacattcccgaactattggccatagagcgagcttttggtggcgaagaagtaccgccactgagttcaaccaagtcgatgactggacatagtttgggggccgcaggggtacacgaagccatttattctattttaatgctgcaaaatagctttatcgcgccgagtattaatattaccgaactgcgcgaagaagctaaaaagttcgatattgttcaaacaagccgagaaaccgaactcaaaacagtgatgagtaatagctttggttttggtggggtaaatacttgtctggtttttagaaagtgggaagggtaa

SEQ ID NO: 45651 - DNA, 420 bp, Acinetobacter baumannii
atgactttaatagaaaaagtggttcctggggtatttaggaaaattaataataacttggagattttagtatttagacatcccttagcaggaattcaaattgttaaaggtactgtggagcatcaagaacagttagaatacgccgctttgcgtgagctttatgaagaatctggaataaagagggctcaaattcattcatatctaggtaaacatattccttcagaggcagggcctgattggcatgtttttgtgtgtagtacacacgaggctttaaaagataaatggtcacatttttgtgaagatgataatggattaactttcgagtttctctggcactcttttttgagtcctccaacagaagaatggcatcctctttttaaagaattatttgaatttattaaatctaaatataagctcaattaa

SEQ ID NO: 45652 - DNA, 267 bp, Acinetobacter baumannii
ttggaaacaacaaataaattagataatcaagctgagaggaagttaccagttaaagcgcatctattatgtggctggccactcgtacttatgttggttggaggtgctattggcggagctcttggagcaagtgcttatggtataaatattaagatctataaatcaaacttatcaaatatcgctaaagtactactcaatttgttgacaggtttaacagctattattcttatgcttattgcggcaaatttgattcgaatgtattttctttaa

SEQ ID NO: 45653 - DNA, 834 bp, Acinetobacter baumannii
atgttgcagttttctgtattgttatctttatatttcaaagagaaacccgaatacctagaaaaatgctttgcaagtatttgggataatcagagcttagaacctagtgaaattgtattagttttagatggttcaattggggatgagcttgatgcatgtgtacaaaagtggaagttaaaaattggtgattgcttaaaagtagttgcgctacctcaaaatgttgggcttggaaaagcattaaatgaaggtttgaaacagtgcagttatgattgggtattccgtatggatacggatgatatttgtacccctgatcgttttgaaaaacaggttgcttttataaagcagaaccctgatgttgttctgtttagtggacaagtgatggagtttgataaagacattactgatgcaaatgttcttaaagcagtaccgataacttatgaagaaattagagaatttgcgcaaaagcgttgcccatttaatcatatgactgtagcttataagagagatgtaattttaggcttaggtggttatcagcaccatttatttatggaagactataatttgtggctacgtgtaattggaaataattacaaagtagcaaacttgcctgatgtgcttttatatgctcgtgttggtaatggtatgcacgcacggcgcaaaggtttccaatatattaaaagtgaaaaacagttactagatttaaaaaaacaactaaagttacaaaatcctctatatgctaacatgctgtttctggtacggtctgcgtttagactgttaccagcgaatttattaggtacaatttataatacctttcttcgtaaagatattaaaaaatga

SEQ ID NO: 45654 - DNA, 813 bp, Acinetobacter baumannii
atgggaaaaatagctattttaattatggctcataaacctataaagtattttgaaggtttagcaagagataatcagcaagttaatttttttgtccacatggatataaagactaattttgttaatcctgaaattaaaaatttatatttgttaagagtagatgttaagtggggaggattttcgcaagtacaagctaccctcaatttactttcttttgtattccataattccgattctgaattttttcatgtagtaagtggtgaagatgttattctatcaacaaataaaaatttatctgaaactttaacttggagtaattctaatatttttatggaacttacggactctcctcgacatagatatcgtgtaagattttttgctccccatgttgagactagatggcaacgtaagctagtaggtaaattatttactttttctttaaagatattagataaaatttttattaccaagaaagatttctggtttggaagtaattggttttcaattcgtagagaagaattgaaaattattttaaactcaattacagatagagatatttcattatttaaacatagattaaatcctgatgagcatttcttccaatatatagtggtgaaagctggtcttagaaataatattagtttgaaaggtaacaataggtatattatttttgataagagatataataatggaaataatcctatttacttaaatgctgatcagttgttaaagctcaaaaatacgtgttcccatttttttgctaggaaagtggatattgataatcagttaaaatattatgaaagggtgaatttctaa

SEQ ID NO: 45655 - DNA, 1008 bp, Acinetobacter baumannii
atgaaattgaaattggttttaagtactacaatcggcctgttgttcatcacaggttgtagcaagtctgaacataacgctgacgctaaaacggttttaccaaagcatgccattcaatcggctgctttgggttccatcgaacagtgtaagagctatacaggacttcctacagactggcttaaaaatacaaccgcaggcatggtattcattccagatgggcattttaattttggttctgaaaaagcttatccagatgaacttaactttggaaaaaaacagcgggaagttaaaggtttctggattgatcaaactgaagtcactgttgctcagttcgcgagttttgtgaaggcaactggttatatcaccgatgctgaaaaacaaaaacaagctgctgttttttctccagacccccatcaccctcagcaatggtggcaacttaagacaggatatacatggaaaacaccaaacggcaaaaatggtgcacttcctaaccctcatgaacctgtacgctacgtaactaaaaatgatgctgaacattatgcagtttggctaggacgtgatttacccacagaacttgaatgggaatatgcagctaaagcaaactcaccaactgatactcctttacatcaagcacctaccgatgagcaccagcatccacaagcgaattactggcaaggtgcatttccctttgaaaatctgaaccaagatcattttactggtattgcgcctgtcggatgttttaaacctaacggttttaaactattcgatatgattggaaatgtttgggaatggacatcttctccttatcaaggtgcgcacgaccagcacatgggtaattattcggctttaaggcaacaagaaatgagcagtactcaatatgtgattaaaggtggatcgtttttatgtgctgaaaattactgttcacgttatcgtaatagtagccgctatccccaagattttgatttagccgccacccatgtgggttttagaacgattttacgctctccttaa

SEQ ID NO: 45656 - DNA, 1335 bp, Acinetobacter baumannii
atgaatgcggttcaaatagatcagttaaaacaacaatttccacttattgaaacacttcaagcctatcaagaaacattttggtttaaccctcaccgttatcctttaaacgaagcactagcgaaagtgtgtcttacagaacaggatgtaaaagaagcagaagcaaggctagcgcgtttcgcaccttatttggcaaaagtctttcctgaaactcaagcccagcatggaaaaattgaatcagcactagtagaaattgcggagatgcaacaagctctatcgctacaaaagcataagacacttacagggaaactttggctgaaaaaagatagccatttacctatttcgggttcaatcaaggcacgtggcggtatttatgaagtattggcccatgctgaaaaattagccattgaggcagggcttctcaagctagaagatgattacagtaaattagaccaagactcatttcgaacatttttttccaaatatcaaattgcagtaggttctaccggtaaccttggtttatcaatcggtattatgagcgcgaagcttgggtttagagtgtcggtacatatgtctgccgatgcaaggcaatggaagaaagataagctacgttcacttggtgtaaatgtggtggaatatgccagtgattacggagttgctgtagaagaaggacgtaaggcagccgaacaggacccattttgtttttttattgatgatgagaattcgactactttatttttaggttatgcagttgcaggtttgcgtttaaaacaacagtttgaacaaaagcaaattaaagtcgatgcagatcatcctttatttgtatatttgccatgcggagtagggggcggacctggtggggtgagctttgggttaaaactcgcttttggtgagcatgtacattgtatattcgcagaaccgactcactctccatgtatgttacttggcgtttatacaggcctgcatgatcagatttcagtaaatgacattggtttagataacatcactgcggcagatggattagctgttggccgtgcttctggttttgtcggacgtgctatgcagcagttaattgacggttactacaccattcatgatgaatgtttatatgaactcattgcgcttttaaatcaaactgagaatattcaagttgaaccctcggcggcggcgggcatgatggggccatattatgtgcaaactactcctgattatttggctttgcatcaattgtcagctgaaaagttacagcatgcgacacatgtggtatgggcgacaggaggaggaatggttccacctgatgaaatgcaaaagtatttaacgtatagccaacgcaattaa

SEQ ID NO: 45657 - DNA, 1329 bp, Acinetobacter baumannii
gtggccaaatgtaaagggattcgcatgatggatacagtattttcatctgaagtagatacaacggttcgtaaatcggcgtatcgaaaaattgcatttcggctcatgccatttttaatgctttgttatttttgtgcctatttagatcgggtaaatgtgggttttgccaagctccaaatgatgagcgatttacagtttagtgaagctgtatatgggctaggcgcagggattttctttattggttattttctttgtgaagtaccaagtaacattgtacttcacaaggtaggcgcaagacgttggattgcccgtatcatgattacatggggcattttgtcaggctgttttgcctttgttcaaaccgaatggcaattttacaccttacgttttttactgggtgtcgctgaagctggactagctccgggtttgttgctctacctcacttactggttcccgtcttaccgccgtgcacgcatgaccgtactttggtttatcgcaattccaatttcgggaatgattggtggcccactttcaggcttaatcatggaccgaatgagcggtgtacatggttggtttggctggcagtggatgtttgtgatcgaagctattcccacagtgattgtcggcttacttgtactagctgttttaaaagattcagttcaagacgccaactggttaacccaagacgaaaagaacttggtgaagcaagagcttgctcaggataaccagcacaaagaaggtcatgctagcgtcaaagagttcatcgcagataaacgtttatggctactcgcaggtatctacttttgtgtagtgatgggccaatacgcaattacattttggttgccaactctcattcgtaactcgggcattagtgataactggcatattggtttgctcacaagcctgccttatatgtgtgccattgtggtcatgattttggcggggcgtagcggcgaccatttccaagaacgccgctggcacttaattattccgatgtgtgcaggtgctatagcactcacatttgcgactttattcgcttcaaatctaacgctctctttaatttgcctttgcatcgcagcctcaggtgtgctgacagcatcctctttgttctggatgttaccgaccaactttttgggtggtgtttccgctgcggcaggtattgcagccgtcaatagctttgccaaccttgccggattttgctcaccttatttaatcggttgggtcactactaacacgggttcaaatgcaatcggcatgttcttaatcacagcagtattaattttcggtgccagtctggttctgcgtgttccggcaaaactggtcaatcgttaa

SEQ ID NO: 45658 - DNA, 906 bp, Acinetobacter baumannii
atggacagtagtgaaaacaatttcaatcagatgccctctattaaaacattacaggcttttgagcaaactgcccgttttggcaatgttgctaaggcagccgagcatttgaatctcaccccttcggcagtgagtcaccaaattgctaagcttgaagaaatgattgggcagagtttatttattcgtggtgcccgtggtgtgacacttactccttcaggtgagcgctattttcaagatgtcaccaccattttgcataacctaatgttagccacggaaaaagctgccgataaaagccctaaagacagtttatatattcattcatccccaagttttggtttactttggttgctccctcgccttgaatcatttaaagaaaagttccccatgattcaggttaatttgtcgtgttcgtatgaaaatttgcactttacccgcgataagatcgacattgatattcggcatggtttacccaactggacaggggtagaaatcagaaccattcgtaatgaaaaacttgaagtgcttgcgtcccctaagctactggaacgtagtcctgtgcataaacctcaagatttattaaagaaagatctgattttatcgcgctcaaccttagtgacttggccccaatggtttgcccatcagggtttaagcattcctgaatttccctacactttgagttttgaccgctcttatatgtcacttgaggcagccacacacgggctaggttttgttttagaaagtaatttactcactcaaaattacttagaatctggaaagttggttagagtttttgcagatgagctatcgattccaatctctgctcatcacttggtatatccacgaacccaccaatttattcctaaaattgagctatttttaaactggattcatgatgaattgtcaggctga

SEQ ID NO: 45659 - DNA, 1914 bp, Acinetobacter baumannii
atgacaaaatccggccattatttagtgcttacaataatgggactgctgagcggttgtcaggtcattcatttaaaagaaagtaacttaagcagtgctttaaaaagtaaaaatgaaagcattttgaccgataatactctaagtcatcagacccaaaacttactgtatttggtcaaagaagatgaaaaaacttgcctacaaaattttgatgattgtttaaataaggttcagagcctgtccgaaaatagcagcagagaagaacgctatgctgcgctgagtgaaatttatttggcaaaagctttagatgttgggcgtagtagccagtgtaatgtcactcttaaaagtaacagttgtgttgagcaagagctggcgttgtttgataaaagcttgcgctatagctatgtctatttgtttgattctgaagagccaccttttgatcgggtatttgaccatcgccaaaatcaggtacgtattttttataacgtcgccttgtcgaagctcatgaccacgtattttaatcatttaaatacgcttcatttcccacctatactaaaagcagatgggcatgagtaccacgttaactttgatcatgctgtagatgtacaatacattgaagttgatacctttcgctctagctataacatgaacttttcagggtttaataccgtcaatcgtaaggatggtttaggtgcggagtttattgtgggacgtaaggagcatgatgtaaatcatggttttattttagatcccgatgctttttatgcttaccagagtaatcccaacattcatttaccacgtttctttccagtcacggctattgcttacccaaaacaaaaggccacagccgatcaggtcattgatggggcagagttagaaattgccatgtttgacccataccgacaggaccgtgtaaaagttgaaggtgtggactatccacttactgcaaactattcggcgccttatgggctatggttatcgaaatataatttaggtgcagcaggctattggtctttaattaataaagaagccaatttgattatgccgcatttatatatgctggaaccttttaaccccaataaaaaaattattgtgtttattcatggcttggcaagcagcccagaggcatgggtgagcctaacaaatgacattatgggtgatgccgaattaagacaaaactaccaagtttggcaggtgttttattcaaccaatatgccgatttttgaaagtcgtttccagatttattctttgctgaatcaggcttttcaaaacgttgccaaagacagctacgctgcacatgatgccgtattggttgggcatagtatgggcggagtgattagccgcttactagtaagcgatgcagacgtttctgatttagccatgcaaaaaatgaatgaagcacagctaaagcgtttaaaagaaaatcctgttattcgagaacgttttcagttcaaagatttgccctattttaagcgggttgtttttgtttcggcgccgcatcatggtactgactatgctgaccgatggtttacccaaattgctcgccgtattattcgcttacctgccgacttttttattgccgttgaaatgagagatgagaaaaataccaaactcagaaaaggcttaattgaaaatggagcgagtaatttaagtcgttcttctaactttatgcagttgacccaagccattcaaccctcgtccaacgtggtctatcactcaattatgggcaacataaatggtacgacagataagtcaaaaatgagcgatgggattgtgccgtatcaaagttcacatttgggtggggagcagtcggagctgattattaaaggtgggcattcgattcaaactagccctgaggcaattttagaattacgccgtattttacgattgcatttaaagcagtcgccgccttcaaaatag

SEQ ID NO: 45660 - DNA, 891 bp, Acinetobacter baumannii
atgaattatgaattatggaaaatatttttagacgcggtggaactcggtagcttaagcaaagtcgccatgctgcataacaccaaccaaccgcaaatcagtcggcaaatgaatgagcttgaagcccaatgtggtggtcgtttgtttaaccgaactggacgtggtgtcgagctgaccgatttaggccagcatttacttcctaaaattcgttcatggctgaacgtgaccgatcaactcaataatgaaattttgcactcgaccgatacaccgattggtacggttcgtattgccagtttgccgtctactgcacatccgttgttatcgactctctataaagtccttcaacaaaaatatcccttaattaaactttcagtgcgtgaagggcaaggggtacatttagaaaaatggctcgaagatggcagtgttgatttagctattctttatcgctttaacccgacacctaaacaaggcgatatttaccttatccaagccgatacctatttggtcggcagcgaaggagatgcgctcactcaggccagtgaagtcgactttaaagagataagtcagttaccgctggtcacgttttgcaggccaagtaactggcgcaattttttagaccacatggcctatgaaaatggggtagagctgaatattgtgtttgaagccgattcgattagtttacaaacccatttggtttccgagtctcgcatgtataccatgctggggccgcaagctttaaaaaaagccagccaatacacctcaattcaagccgcaaaaattattaacccagcactcaagcgctatatttctttgtctatttctaaacatggctatttaacgcctgcgtgtaaagcggtgatggaagaaattagaaatcttgctgatttgctttaa

SEQ ID NO: 45661 - DNA, 1347 bp, Acinetobacter baumannii
atgaataaatatttgctgtggggctgtattggtttaggcagtgtgagcaatgcgtatgcagagcttcctcaagaatttggcaagttagaattaaaactcaacacccgttattggaacgatgaaggcactgcccaccccacgctcgccaacccttcgccttcgtcgagtgaatatgaacaaagtgccttagggcttgagttaaattatcagtcaccatacatgtgggactggcttggggtggatggttcactctatgcagtcaccaagttgtttgactccggcaagccgagtgctcagcttttagaggtcgaaaataacggcaagctcgaccaaaactttgcgacttttggacagctctatatcaaggcaaaactgggtgatcaaggcgaaattaaattaggccgccagttgcaagactcgctgttacttaaaagcaccaataaccgcgcagtgcccgacactttttcgggtgcgagtgggcagtttcaactaaatgatcagctacagacttacattgcttactatgaccgctggaaaccgcgcagcatggattcttttgaaaaactggtgactgaaaatgacgagcgcattgattatgtcggtttgcttggcgccaaatatcagtacaaaaactggagcgtgaatgccgaatatttaaatagcaaagattatttaaaaaagtacggggcgattgctcaatataaattgccgatgcatggcttggtgtggacatttaacacgggtgcttttttctcgcgtgatgatggcaagctgtttaaatgcggtgccgaaaccgagctggactgtgtcaaaggtcaagacattaacaaccgtggcaatggttactttgtcgatgtaaatgtagccaaaaataatattgaaggtggtattgccatttccaagtttgatggtttttggattgaagataactttgccgtgcactccgaccgcaactcggttttaacgcaagaccacggcactaacccgtttccgacctctgcgaccattggccctgactttaccaataatgatgaaaccgccgttgcccttcgcctgaaatataactggaaagactacgtgaaaggcttaaaaaccgaagcgaagtatatttatggttttggcgctcaccaaagtaatatcagcagtgatattgaaggtaaagagcgttactttgactttacggtaagttatgccttgccgtgggtaaaaaacttagatgtgcgttattcatttttgcattatgagtcaaagtttgaaaatgcaaacctaggtgaaaaaataaatggtatgtctcggaaatattgggaccagcaccgtgtatttattaattaccgttatacattttaa

SEQ ID NO: 45662 - DNA, 303 bp, Acinetobacter baumannii
atgtcaattgaagatttctttataaaagattctccctctaagagatatcttttaatgagcttagccctattcatgtcaataatggctttaattgcttactttaagggaaagttgggatttgaatatatattttcccttactgtagggtacgccttaatattttttattttaaaaaatgcagcattaccactttttcccccacttacggaaaaaagtagtgatgcaaatgctatggctagaacaaccatagcaattgtttatatccttgctttgatagctctaactatttcttattctttataa

SEQ ID NO: 45663 - DNA, 951 bp, Acinetobacter baumannii
atgaacgacttgataacgagatgtgtaaataatctggggcagtggcatgaagttgcactgacaatgactaaagcgatagttgcaataggggtgttgtgcttagttgcttatcttttaacaattggctatatcccgtcggaaattagctttggtgatacacttatttttctactgatttttgctgcgttctctattgcttacgctgtattagggtttatgctatttttctttggcacatccttagctccagtgacctatcttgtcttaagctgggttgataagtatttaccacctcatattagaattgggaaaaaacttccttttccaaaaattaatattattacgttaattggctctctttatcttttatacgttattcacggcatatttttattgcattggaaagtcaatttatacataggaattaccgtattttttatcgcctttgcgtattatcctttttacatgaatcggcagaagattaaagaatttaatataaaatttgaaaatctagcagatattgttgatgatcctgatgctagtgaaaatcttaaagcattcgcaagaaaaaaattaaagagattagaaacgcatattagagatagcttagaaatagctttttttattagcttgactccacttgtgccccttatccttattggtgatgttggtaaagcattcctaaattacactatgcaaaatactggggtacgaatagaaaaggcaaccttatatattaaagaaccgtatgcaaatttaattgaattgccaagaacaacaactaaggaactgagtcagtataaaacctttatttttaaagatgttaaagtgttatttcaaggcattggtaaaagcactttagtttcttataagctgaaagatattgaaaagcagttagtaattccaaatgaatatattactgtagagcgaagcaagaaaattgaagagtaa

SEQ ID NO: 45664 - DNA, 864 bp, Acinetobacter baumannii
atgagtgttgataccttttttacgcctttaagatacccaggaggaaagggaaaatttgctcctgttgtgaaatctatttttaactttaatggattaaaaggtggtcattatcttgagccttatgcaggtggggcgggtgttgcacttgatttactttatagtggattcgtttcagatatacatatcaatgatattgatatagctgtatatagtttctggaaatctataactgaacatactgatgattttttgaaattacttcatgattcaccaataactattgatgaatggcataaacagaaatatatcttaaatgattggtcttgtaccgatcatttacttaaaggttttgcagcattttttctgaataggacaaataggtcaggtatccttaaaggtggtgtaattggagggaagaagcaagatggtaattacacccttgatgctagatttaataaagcaaatctaagtaaacgtattgaaaaagttggagcaaatgcctcccgaattcacgtttataatgaagatgctttgatgctgatccagaaagttgatgaatttttacctgataattcattagtttacttagatcctccttattatgtaaaagggcaaggcctttatcgaaatttctatgttcatgaggatcatgtcaaaataagagaagctttagataaaattaaatctaaatggatcgtttcttatgataattgtgatgagataaaagagatttataaaaattatcaaatgactgattatgatttaaattatagcgcttatcatagaattaaagctaaagaagtaatgtttttttgtgatggactaaaaaatcctcaagaatatgaccttttttctgctatttag

SEQ ID NO: 45665 - DNA, 1722 bp, Acinetobacter baumannii
atgacttcaaatataactcaattgaaaaaaataaaagttaatcattttcgtggattaaagaatattgagataaatcttggcgatagattaacagttatttgtggaaaaaatggtacttcaaaatcaacaattttaggaatgattgcgcaaatttttaattttgataaaaatcattttgatggtagtgatattaattttaagacattggctggtaagaattttaaatcgagttttagagaacattttagattttcaaaaacttatgacttacctggtactatggatgtagagtttgaaatctttgatgcatattttaaaaaaataattccagatttaaaattacgtctttatggttctgaagataggcctcaatcaagaccagttgtaagagataatttaaaagttgatgctgaggacaactcgagcagaaacgttactcatcctcttatttatctaagtttaaaaagattaatgccaattgcggagagaagtaaatatagtcttaattcagaagaggtagaatattttacaagaatttctagagagttcactatcactaataatcgcttgttagggaaaattagtggaactactgtatcaaaaacgactggtacaatcgaatctgctgtagttcatggaaataattatgatcatgagtctgtttcggttggagaggataatactggtcaaatcttaatggctcttttttcatttcaaaaattaaaagaagaatatgttgattatcatggtggaattctcctgattgatgaaattgatgcaggcttatttccagctgcacaagtagaattaataaaaattctagaaagttttgctaagagattgaatttacagataatttttacaactcattctccgatagtaattcaaaatatttttgaaaaatctaaatatgataaatctaataataaaactatttacttaactgatacttatggaggtgttgaagtagctgaaaattattcttgggataaaatttatgcagatttgtttattgatacaattcaatttgatgtagaaaaaaaaatacctaaaacaaacatttattatgaagatgatgaggcttatgaattctttaaagctcttattagagaaagaaatattaataaaattatcgatccaatgaaagaaattactcttggatgtaaaagttatatggatttgataaaaagaaatgttgctgaattttcaagaaatagcattattatttttgatggggacgagaaagaaggaaataaattcaaaaacactctttgtcttccaggaaccctacctccagatcaactcttatttgattttctttatagattacctgccgatgatatgtattggaaaaataataaaattagcttttctaaaccagtatttttaagaatagcctctccaatattggaattttttaatcttgaccaaactcctacggaaaattatgacttagaaactatcattttagagaaaagagcttcgagtagtgagtcaggagggaaagcgagagaaaaatttaaaaatttctataaaaatgaaattattcaatctctaatcaaaggaaagattagtgataatcctttcagagtcatgattgattataatcctgagaaatataatacttttcaggaagattttaagaaaactcttttatacgtgataagtaccaatcatcctactatgaaagatagtataaaagacttcttaaaaattaagtaa

SEQ ID NO: 45666 - DNA, 666 bp, Acinetobacter baumannii
atgaatttattggaagttatagctaaaaattgtggattggcagtggtggactccgtaactttagggctaggttcagctgtaaagaattccttttatgaaattaaagatcatgtaagtcaatgtaatgatgcactgtatctaatgcaaattaaaacatttattgagacaatcgatttagatgaaggggaagtgaaagatttttttagcaaaaatccagataacaatcgactaggaattgaattatttaaaattttagaaagtacatacatagaaaagcaagcaaatttgttagccattaactttcaaaactatttacagggtaagtatgataaaagccaatttaataagtatataaatttaataaaaaaaattgatgcacatatttttgaagtaattaataatgacttgcagtatcctgaaaggctccgcggacaatccataccttgtgaaggattgccaaaagatgccactgattacaacaaatattgggaatttgaaaatcttttagttagtgacttcaaagatttagaagttgtaggattaattgaggaagaaatagaggaaacttcggttacatacagctcagttgtaagccctaaaattaagagaaagagaacgcgtttctatcataatttttatattgacctttatagtaagctaaaataa

SEQ ID NO: 45667 - DNA, 135 bp, Acinetobacter baumannii
atgtgcgctaattatgagccaatttcaaaagaccgggtacatctattagatctcttagaacctaccttcgactataagaatgatgtttatccggtgcgaaagttaccgaacttattgacctacaagaagcaatag

SEQ ID NO: 45668 - DNA, 468 bp, Acinetobacter baumannii
atgcatgcacaagaagcatgtaagagattgagagatgatgaatcattatgcggctgtcttattgtttttgttcaatcaagtccttttgatgaaaatgtaccgttttataacaagtcaataaccggctcattttcacagccaacagattgtgcattagatttcgtaaaagctgcaacaaaaatggtatctcacatttttaaagaaggtattaagtataaaaaatgtgaggtcatactgactgggctagaacctaaatctggtcacacttatgaccttctcacagattttgaagctatagaaaagaaagaacaattgatgaaaacactagataacgtacacacaaaattcgggaagagaaaacttggtataagtacatgttatgtaccaggtcgcaattggtcaatgagtagagataaattgagtagaaatccttttcagtgggatgagttattgactataaatgattga

SEQ ID NO: 45669 - DNA, 945 bp, Acinetobacter baumannii
atgcttaaatcttttttctttttatcttgtaatttctttctaggttttttaataagtagttccgttttggctcaagcccctgtaaaaaatcaatcaaaaatcgattttcacaacaatcaggctcagttccaaatcaaatctaaaaatactggacatgaataccttattcaaatttataaaccacctgttgccccaccccaacatggttatcctgtactttatatattagatggtaatgcaacatttccaagcgcaataaatattgcccagtcgattggagcaggttctgcaaaattaggtttagatccgctcattattgtagctgtgggctatcctcagcaaaaaacctttgatgtgcaaaaacgcgcttatgattacaccccaaaaccttctgccgagtttcaagcacaaggtaaatataaatatggtggtgctgaccagtttattgcttttttaaataatgagcttaagcctgaaatcgctaaacaatttccaattaatagccaacagcaaagtctctatgggcattcttttggagggttgtttgtgctttatcatttttttcaaaaacctactgcattccagcgttactttgctgcaagtccttctctctggtttgatcaaggcatgttatttcgagaattagaacaatggcaaagtcaaaagcaaaccgtgttcccaatgctaatgacgacagtcggtacacatgaacaaggtgggccacatacccagtttaatcaaagaattaataaagacgatttctttaaagtcttagaaaataagcgttcagaccaatttacttattggcatttcaataatcctgctgaacagcatatcaccaatttgtatgcgagcttacctaaagcgcttatgtttgcttcatgccaaaatctagaaagctgtaaatctttattcgatgaaccatcgcagaaaacagctaaataa

SEQ ID NO: 45670 - DNA, 777 bp, Acinetobacter baumannii
atggaacaggttgcaaaactagtgattcgcgatttacataagacattcggcgatcatgaggtacttaaaggaatatcacttgatgcaaatgccggtgatgtaattagtattattggttcatctggttcaggtaaaagtaccttgctgcgttgtatcaactttttagaacaaccgagcaatggtacgattaagctcaatggtgaaaaattacgcacggtctttgataaaaaaggcaatttaaaagtggttgaaccaaagcaactacaaaaaatgcgtacccagctgatgatggtatttcagcactttaatttatggtctcacatgacagtactggaaaatgtcattgaagggccaatccatgtacttggagtaaagtgttctgaagcggaagaacgtgcgcgcaaatatttacgtaaagtgggattacctgaaagcgttgaaagtaaatatccggcatttttatctggtggtcagcaacaacgtgtagcgattgctcgtgctttggctatggaaccggaagtgatgttgtttgatgaaccaaccagtgcgcttgacccagagttggtaggtgaagtactaaaagtaatgcagggcttggctgaagaaggacgtaccatgattgtggtgacacatgaaatgggtttcgcgcgtcatgtatctaatcaggtgatttttttgcatcaagggaaaattgaggaacagggccatcctgatgaagtactcaataacccgaaaagtgaacgtttaaagcaatttttgacgggcagtttaaaataa

SEQ ID NO: 45671 - DNA, 714 bp, Acinetobacter baumannii
atgattgaaatccttcgacaatattggcagtcatacctttggaccgatggcctacaaatgaccggtgtggcgatgactgcttggttattggtgctttctattgggattggatttgtgcttgctgtgcctttgtcacttgcgcgagtatcagaaaatatctggttgcgtggtccagtttggttgtttacttatgtttttcgtggcacaccactgtacatccaactactgattatttactcgggtatttatagctttgattatatccacgagcatcagacactcgatgcattctttcgagagggcataaattgcaccattttggcattcgcgctcaatactggtgcatataccactgaaatcttcactggagcaattcgttctattccacatggtgagattgaagctgcccaagcttttggtatgtcaaaatggaaactctacacacgtattatcattccgtcgatgttacgccgtgctttaccgttttacggaaatgaagtcattttaatgttgcatgccacaaccattgcatttacagcaacagttcccgacattttaaaaattgcgcgtgatgtgaatgcggcaacctatgacactttcagtgcttttggaattgctgcggtgttgtatgcggtgttggcttttattttgatttggatatttcgtaagttggaaaaacgttggttggcatttttaaagccatcgaatcattag

SEQ ID NO: 45672 - DNA, 786 bp, Acinetobacter baumannii
atggcaagctttatgaaaaaaatattcgtttcaacaaccttagttctggctgctgttgcgacgaatgtccaagcaaaggattggaaggtgattcgttttggtactgagtcgtcttatgcgccgtttgaatataaaacaccggatggcaagttaactggttttgatgttgatttaggtaatgctatttgtgcaaaactcaaagctaaatgtgtttgggttgaaaactcttttgacgggatgattcccgcgcttaaagcgaaaaaatttgatggcattctttcatcaatgactgttactgatgaacgtgcaaaacaaattttatttagtagcaaaatctacaacacaccaacgcgtatggttgcaaaaaaaggttcaccgttattaccaacacctacttcattaaaaggtaagcgtgtcggtgtacagcagggcacaattcaagaaacttacgctaaaacctattgggctccaaaaggtgtaagtgttgtcccttatccaactcaagatttgatttaccaagacatgatgtctggtcgtttggatgcaactttacaagatgcaatcatggttgatggtgctttcttaaaacaaccgaaaggcaaaaacttctcttttgccggcggcaatgtggttgatgtcaaaacattgggtgtaggtgcggctataggtttgcgtaaagaagatgcagacttgaaagcgaatatcgacaaggcactcgctgcaatcattgcggatggcacatacaagaaactcgagaaaaaatacttctcttttagcatttactaa

SEQ ID NO: 45673 - DNA, 1032 bp, Acinetobacter baumannii
gtggatctatttcatgccatgagagtattcaacaaagttgttgaaacaaatagtttcagtttagcagctgatagtttgggtctaccgcgtgcttctgtgaccacaaccattcaggctttagagaagcatttgcaagttcgattgcttaatcggacaacacgaaaaattagtctcacaccggatggcgccgtatattatgatcggacagcccgtattttagcggatgttgccgatattgaatcttcttttcatgatgcagagcgggggccaagaggtcagcttcgtattgatgtgcctgtatcgattggacgtttaattttaattccaaggctccgcgattttcatgcacgctatcctgatattgatttagtaattggtctgaacgaccgacctgtagatttggttggagaagctgttgattgtgcaattcgggtgggtgaattaaaagattcaagcttaattgcgcgtcgtatcggaactttccagtgtgcaaccgctgcttcaccgatttatttagaaaaatatggcgaacctacctcaattgaagatttgcaaaaaaatcataaagcgattcatttcttttcaagccgtaccggacgcaacttcgattgggactttgtggttgatgatttaattaaaagtgtgtcagtacgtggacgtgtttcggtaaatgacggtgatgcttatatcgacttggctttgcaaggttttggtataattcaaggcccacgttatatgctcaccaaccatttagaatcaggtttgttaaaagaggtattgcctcagtggacgccagcaccgatgccgatttcagcagtttatcttcaaaatcgtcatttatcgcttaaagtaaaagtgtttgttgattgggtcgctgaactttttgcaggctgtccattacttggcggtacagctttacctttcgaccagaaatgtgaatttgcctgtgataaagaaactggtcatgaatatacaattcgtactttggtcgagcagcataatattgctgaagcttatacgctcaaaacttaa

SEQ ID NO: 45674 - DNA, 174 bp, Acinetobacter baumannii
atggtccgtatgggagaaacagggtttatggaatggacggagcataaaagtttgtcaatcacgaataaatatattaaatttgataacactattcgtatttttataacaattgatgtgtttgcactagaaaatgcattaataggagtgtgtgtgtggatctatttcatgccatga

SEQ ID NO: 45675 - DNA, 1449 bp, Acinetobacter baumannii
gtgattacatcaaaacaaaattggttgttgtcctcactcatgggaagcctgctccttgcaggctgctcattggccccagaatatcaacctgcaaaagttatagtgccagtcaaattcaaagaatctgaccccaaacttgaagataataactggaagattgcccaacctgccgatcaacaaactcgtggtgaatggtggcgcatttacaatgatgctcaactgaatgaacttgaacagcaagctatcgcaggcaatcagaacctaaaagcggtggcagcaaatattcaggcttcacgtgcattacgttcggcagctcaagctgaacgcttaccaagtattgatgccggatttgggccaactcgccaaaagccgtctccggcttcactcggtttagatgacaatgcacatacttcggctcaaaccttatggcgcgctcaagccaatgtttcatatgagctcgatttatttggtcgtgtagcaagtagtgtcaacgcagcaacagcggatctacagcaacaagaggctctatatcagtcagcacttttagctctacaagcggatgtagctcaaggttattttctgatacgtcaacttgataccgaacaagcaatttataaccgaacaatcaaattgctaggtgaaacacgagatttaatgcagcttcgttttaaaaacggactgggcagtgaattagatgtttctcgcgcacaaaccgaacttgctaccgcacaaaccactgccctaaatattgctcgtaacagagccagtgcagaacatgcgcttgcagtcttattaggaaaaccaccagcagactttaacttggcagttcaacctttaactgcaaatagtatccgtctccctgccggtttgccgtcaactttacttgaaagacgacccgatattgcggctgcagagcgtgcaatggcagcagataatgcgcgtattggaattgctcgtgcagcatttttcccaaaactcagtcttacaggagctttaggttatgaatcttcaagtttaagcgagttgggtaaatggtcgagtcggacttttttactaggacctgtcgctggtactattttgtcgttacctttatttgatggtggacaacgtaaagcaggcgttgctcaagcaagagcggcttatgaggaaagcgtcgccaactatagacaaactgtactgaatgcatttcgcgaagttgaaaatggtttatctgatcaaagaattctcgatcagcaaattcaggctcaaaaccaagcactctcctcttctcgtcatgccaatcaactttctcatttacgttatcgagaaggtgctattagctatcttgatgtcattgattctgaccgcactattttgcaacaagaacaattagcagctcagctgaaaggcagccaaatcattgcaagcatcaatttaatccgtgctttagggggcggttggagtagttaa

SEQ ID NO: 45676 - DNA, 828 bp, Acinetobacter baumannii
atgggattacttgataaattttggttcaaaaaaaagcatattagaacagaccagcaagcaactgatcaagctttagaaattcccgaagattggaatatatacatctgtcaaatagatgaacaaccagcaagttactttctaaatctagctttaacccaaattgctccactaacatctaaaccgattttgctttggcttgaaatacaaatgaatcattctagagaagatgggttatcgtctaatgaagaatttgatcaactcatcgaaatcgaagatcaaatcactctatcacttgcaacacatcctatcctttatgccggacgtctaacacataatcacttgagagatttttacttttattgtgaggatggactagatgttaaccacatcattcaccaagtcatgcaatcttatccaaactataattatcgtttcggtcaaaaatcagaccctaattggtcaacttattttgattatatgtatccaagtccagaaatcatgcagattatttcaaataatgctgttatcgaaaatttagaaaaacatggagattctcttgaaattgcccgtcctgtagatcattggatttattttaaaaataaatctgatcaagcaatcttcctcgaattgattaagcctttaggatttgaaattgttcaacaaaatgaaataaaagacagaacggattcgccttatcaattgcaaatttctagaattgatcatgtaaaccaccatgcaatagatacttgcacgctacaactttggaaattcgctcaacaagttaatgcagaatatgatggttgggaaactcaagttattagaaattag

SEQ ID NO: 45677 - DNA, 1230 bp, Acinetobacter baumannii
atgaaaatgaaactattaatgacgagcgttcttagtacgagtttatttttagtcgcttgtggaggtggaagtagtgatgatggcccagctactactaatccatccggaactccaaccaataatattcaaaatccagttgttaaagttgaagcctatacaagtactaacttaggatcagttgccgcagaaagtagtattttaacttataaaatgttaggtcaaagtggacaagaagtgcaggcaacaagtctagtgtttacaccaaacactcaaccaccagtcggcggttggcccattgtagtctgggcgcatggcactacgggtgtggcagatgtatgtgcaccaagtaaagcagctttagcagacagtacaaaagatttaattagtaaattattagcagcaggttatgttgttgtggcacctgattatgaaggtttgggtaccccaggtatacatcctttcttaaatgttaaaagtgaggctttttcaattaccgatgcagtggttgcaacacgcaattatttatcgcaacgtaatttattaacttcgaaaaaatgggtcactgtgggtcattctcaaggtgggcatgctgcattaggtgctgcacaatatgcgagccgtgcacaactagactataaaggtacagtagcggtagcacctgcttctaatttaggaagtattcttttaaatggagaattaaaagctgcaagtgcatcagtatatgaaaaaaaggcaatctatgcgcagcttgatgcatttacagcgcttgttgtagcaggaattcgtaatacccatccagactttaattatcttcaagtatttactgaatctactgcaaggattgcacaaggcgctgaaggtttttgttatgaacctttactcggggattttagcgctactatgcaagtttatattgcaactcatggggaaacattagatggttatacgcgtacacaacctaattttatggctgtgccactagttaaaacatttttagataaagattcgcagccgttacaagtaaaagttacgacaccaatcattatctatcagggtttagcagattcgacagtacctaaattggcaactgatctattgatatctaatgccactactgtaggcactaaaattaatagttatgtgacgggtaactgggatcatggtacggcgatgagtagtaatgtagataatatcgttgccgatgtgaaaactttaatgcctccgcaataa

SEQ ID NO: 45678 - DNA, 1071 bp, Acinetobacter baumannii
atgatgaaaaagtcattattttgtatgacagctgccttatttgctctgccaacagtcacttccgccgcttccccatattttagtttaaaagatggtgatggtttcaaacgtttttcagtctcagctggtcctttatatgtcaaaccaacaggaaaagcccagccttttaggattaacacttctgttaaggaaaatgagcaatctaaggtcggagatattaaagtaaaaactattcaagacaatatttccgatagtaatagtaatgtcgttcttgaagaacttattgatgttattggtttaggtactgatactattcccgcatggttaagtggaacagctgaaattcgcggtttgagtcaatgggaggctgagaatacgggcttagaagcagatgatgtaactactctcggtcttatgacaaattacttttttacagataatatttcattagaagtaaaagcagggattccgcctaaagtcgatctacaaggtaaaggtaagatttatgcacctttttccgctactgcaaaacctgctggtggaattcttggttctatggaacttgaaaataatatttttattaccgatcttgaagcacatgggagtgcggcatcagctcgagcttggacaccagcatttgaattacaatatcactttggcaaaactggcgtaaataaattcagaccttatgttggactaggtgtgatgtatgcatatttcaatgaattagaaataaatcctgaaattgaaaatgacttagtaaatgctgggcatatgattgtcaatattaaagatggtaaatcgggtgctgctttagaaagaaaaactagctctggtgatcctaaagtagatcttgaggcatccgacgcaattgcacccgtagcaactttaggtttcacctatgactttaatgacaaatggtatgctgttggctctgtgtcttatgctcacttaaaaacggatacaactattacagtcaatgatgccaagtacggtgagttaattaatgcaaaagcagatatcgaaattaatccaatattaggttatgccggtattggttaccgattctaa

SEQ ID NO: 45679 - DNA, 435 bp, Acinetobacter baumannii
atgaatgcacaaaaaggttttacattaatcgaacttatgatcgtggttgccattattggtattttggcagcaattgcgattcctgcttatcaaaactacattgctaagtcacaagtaagtactggtttagctgatattactgctggtaagacaaatgcagaaactaaattagcagaaggtttaactgcggcattaactgatgtaacaactttaggtttacaacaatctacgaatgcttgtgctattacagccaatattggaactaatggtgcaagtaatattacttgtacattgaaaggtacatcacaaattaatggtaaaaaaattgaatggatccgtgatgcagataatgctacaaatggtacgacaggtgcttggcgctgtaaaactgatgtagctgaaaacttacgtcctaaatcatgtggtgcttcttaa

SEQ ID NO: 45680 - DNA, 2136 bp, Acinetobacter baumannii
atgagtgcaattcaatacgaaaaaaatgccgacaatattgtcatcttgacacttgattcaactggtcagtctgcaaataccatgaatgcagaatttcgtgactcgcttgatgaggtcacccagaaacttaaagcagaatcagaactttcaggtgttatttttcgctcagcaaaaaaaactttctttgctggtggtgatttagatgaactgattcaagttcaacctgagcatgcaactgactttttcaatatggttgagaagttaaaaggtcatctaagaacgattgaaacactaggagttccagttgttgcagcattaaatggcacggcactgggcggaggatgggaaatcgcattaagttgccatcaccgtattgcaatcaatgacccgaaaagtaaatttggcctaccagaagttaccttaggtttactaccgggcggcggtggtattgtacgtatggttcgtctgcttggtcttcaaaatgcgttcccatttttaatggaaggcaaacagttcggtgtcgataaagcaaaatctttaggcttaattcatgacacagctgaaaatgaacaagaacttttagataaagcgattgcttggatcaaagccaatccaaaatctcaacagccttttgatgtgaagggttataaaattccgggtggcgatccaaaaactccggcagttgcacaagttctcgctattgcaccagccatgctaaaagacaaaaccaagggctgctatcctgctcctgaagcgattatggctgccgcagttgaaggtgctcaagttgatgtcgataccgccttgcgcatcgagtctcgctactttactcaactagcaacaggccaaatttctaaaaatatgattggcactttctggcatggtctaaatgcaattaagtcgggtgctagccgtcctgccgatattgcaaaatggcaagccactaaagtgggcgtgttgggtgcgggcatgatgggtgccggtattgcctacgccactgcaattaaaggcattcctgttatccttaaagatgtatctgttgaaaatgctgaaaaaggcaaagcatattcacaaaagctcttagataaacgtgtttcacaaggtcgcatgacggcagaaaaacgtgatcagattttatcgctcattacggccacagcttctgctgaagacttacaaggttgtgacctgattattgaagccgtatttgaaaaccaagagctcaaagcgaaagtcactcaagaagccgaacaatacttagcgcctaatggtgtaatggcatcaaatacatccaccctaccgattacaggtttagcgcaagcaagtaaggatgataaagcatttattggcctgcatttctttagccctgtcgacaaaatgcagttggttgagattattaaaggtaaaaatacctccgcagagacacttgctaaagcctacgactttgtacagcaaattggaaaaacgccaatcgttgtcaatgatagccgtggcttctttaccagtcgtgtgtttggtacttttattcaagaaggtatgcgcttacttgcagaaggcgtccatccagcgcgtattgaaatggcagcactgaaagctggcatgccggtaggaccacttgcgattcaagatgaagtgtctttaactttaacggagcatgttgcaagtgaaacacgtaaggcactacaagctgtaggcaaagagttaccgaaaacaccggtagatgaagtgattcataccatgattcatgaattaaaccgtaaaggtaaagctgctggcgcaggtttttatgattatcctgaaaatggtaaaaagcacctatgggaaggcttaaaacgttggcaaaaagatcatgatatctccgagcaagatatgattgaccgtattttgtttgtacaagccttagataccttacgttgttatgaagaaggggtattagagtcagtgattgatgccaatgtcggttctatttttggaattggttatgccccgtggacgggaggagcgattcaattcttaaatcaatatggtattgataaagcaaaaaaacgtgccgaagagttggctgccaaatatggtgagcgcttcacgcctccaacgttactaaaaactaaagcagagcagaagcaaaatattcaataa

SEQ ID NO: 45681 - DNA, 276 bp, Acinetobacter baumannii
atgagtcaccattttttaggtatatcagtgtcggttttctcctttgagcaagaacagcaattctttcatgaaatcaaacaaatgcttaatcagcagacttttgaacgtttgattttgagccaatataaaggagagttgacacagctggaaaaaattactttccgtgttgtggagctacatggaaaaaaacaactttccgcgctatatcatcataccacccaagatgtgactaaaaattattcattcgaagatggcttagaacagatgcagtgctga

SEQ ID NO: 45682 - DNA, 1872 bp, Acinetobacter baumannii
atgtctaaatcttttcaacctactcgtctggtaggggctatcgctattgcgatggggtgttcacctgttatttttgctgaagatgcaacaaatgcaactcagcttgacccaattgttatcactgcttcaaaaagtgctgaaaaagccagtgaagttccagcgcgtatttctgtaatttctaaagaagaaattgaaaaaaatcctgttttaaatttatctgatgtattacaaaaagatgcatctatttatataaagcaatctggtggcgttggtcagctcacagacctatctttacgcggtggacaaacgggctcaacattattattaaaaaatggcgctcgcttaaatactcaaaatggcttaggccctgtttcacctgaatttattaacctatcagatgtagaccaaatcgaaattttaaaaggcccagcatctgttcaatatggttcagatgctattagtggcgtagtacaattaatttccaataatccaacaaaatctggagcaagtttaacaggtgtgtatggtgaaaaccgtacttataaaacacttgtaaatgccgattatgtagatgacagtggtttttatgcaagtatcggtggtcaacggatggaaactgatggtactagtattatcaatatacaagataaaagtgaaaaagcagcatttgaccaaaaaggatataatgcaaaaattggttatagtaatgatgtaattaacacaagcttagcaattgaccaaaatcaaggtacgaataactatactacgaactattcaacgaacaatgcaaaacgtaattttgaaaatcgtctagtaaattggctggctagttataaggcttcttctgatttagtcttaaatgcacgttattctcactatcttgataaaatcgaacaaataatttatcaaagccactttaatacaacctctgatgaaggggacataaatgccaaatggaattttgtaccaaatcagaatattttagcgggtgttacatacaatcgatcaaaatatgatgctagctcatctcctgaagctgtaagagatatcagctctacaggttattatttacaacatcaatataacgataatggtattcatactcaggttggtgtccgagttgaagataatgattggtttggtacacatacagttggacaagctgcaattcgttatcaaatctctcctctaacaagtatctacactaacattggtactgcattcaaagcaccgacccttgaacatctatatggctcttacggctatgatttttatagtaaccctgatctaaaacctgaagaaagcaagtcatatgaaattggtatagatcagaaatttaattatggtatttctgcctatctttctggctactatacagatgttaaaaatttaattagttatggtgctataaatggtagaacaacatatatcaacttaaataaagctgatatgaaaggtggtgaaataggtctaaagtggtctaaggataatatctttgttaatgctgaatacgcttatgtagaagctagagataaagataaagacatagatgtcccttatcgtccccgtcaaacatatactttaactgcaggctatgatgatggtatttatggggtgaatgcttctctagtctctcgctctaaagcaaacgcacaaaatattgaaaactcagttaaagttccaggctatgcaactgttgatttaaatgctttttggaatatgaatccaaatataaagttatttacgaacatccagaatattggtgatgtacgttataacactgcatataatgctcaatcttcattctctccggaatactggtatatcaacggtggccgccaagcttctgttggcgtaactttccgttattaa

SEQ ID NO: 45683 - DNA, 897 bp, Acinetobacter baumannii
atgctacttagacaaaacttgaatgatgtttatctctttgttgttgctgtagagcatcagggattttccgcagcagctaaacggcttaatttacctaaatcaacaatcagtaagcgtgttgcaatattagaaaaaaagctaggcttaaccttaattcatcgtagttcacgtagttttgtcttaagcgaagcaggtaaactgttttatcaacatgccaaaaatgcagtagatgagtttcgttatgcagaagaaaatttattaatacaacaacaagagccaagtggtgtagtcaggctcagtgcttctgtacccattgcccagtatcttttatctgattgtttgcctgaacttgcagaacgttatcctaagttgttattgcaagtagaggtaactgatcgttacgttgatgtcatgagtgaaaactttgatatcgtgatccgtagtcattttcaacccttgccggattctgggttaattcaacgtgtacttaaaaatgataaaatcatcgctgttgcagcgcctgcctacttaatgaaatcgtctcctatacatacaccagaagatttactcaaacacgaaggtatatggcctgaattgcaaatgaatccatggcattttcaaaatataaatggtcagaaagagatagtacgtccaaacatccgctttgtagcaaatgagtcggagattttaaagggggctgcaaaaaggggattggggattacgcttttacctgaaactttttgtatgaatgaactatctgagggtagcttaattcatgttttgccagaatggtctgctggtagcgtaacgacaagtttattgatgctaacaagacgagggcttttacccagtgtcaatattactgctgacttcttggttgagaaattaaaaacttaa

SEQ ID NO: 45684 - DNA, 711 bp, Acinetobacter baumannii
atgtctactttcactttattttatggcgtcccatctggctgttcatttggttctattgttgccttagaatggtcaggtttaccttatcagctctgtagaattgagatgccggctcagtgtaataccgaggaataccgccaaattaatccagtcggcgaaacacccgcactgctctacgataatggtaaagttttaacggaaagcatggctatcttgaaccatatcatggcaaaaagcctgaatgcggcttttcattatgagcaaggaacagaacaatttaatctctttaatcagaaactagcttttttgaatacgactttatttaatgcatttagcccactctggtatagccttgaacactcttcatcagaaggtaataaacaagcattacgtgaatatggagcagtccaagttaaaaaagcatttaccgctttagaaaatagcctgacaaatcaaacttggctaatgggcgatcaattatcttttgtagacggatactacgcaggtatcgcacggtggttgaaatatcataatgttattgatattgatcaatttccaaactgcaaacgactttatgaacaattacaaaatgaggcggctgtgaaatttgcgcatgcgattgaacaagaacagcccacaaagagtataggtaaatttttaggccatattgcatttgaagatgccattcagcaatatgaaaatttggaatag

SEQ ID NO: 45685 - DNA, 1464 bp, Acinetobacter baumannii
atgcgtatttttcagcgaattcatcaaaagttaaattggtcaggacgtcgttatatggcggtcatactttgcgttgttgctattgcatatcttgcatcggcaatttatcacacagtgaaaccattgccgcaaggaattaactttagtggcaagctcagacatgccgatgttaaatttttagccgataaaacgtatattgatgcgaatgggcaacaacaggttgatcagcacatctttgatgaaatcttgaaaatgattgatgaggcaaaaaccacaattgtggtggatatgttcttgtttaattcagaagtgggtgactcgaaactcaagcaaagaccattgatgcaagagctcactgatgcactaattagtaagaaaagacagaaccgccaaattcagatcgttatgattaccgacccgattaattcggtatatggtggactaagccctgaacactaccgtcaattacgccaagctggtgttgatgtcatcgaaacgaatctggcacctttacgtgcttctaacccattctggtcagggttttggtacatctgttgccaaaatattggcaataatccagagaaaggctggttacccaacccatttggcgatgaaaaaattacgctacgtagttatttgaacttatttaactttaaagcaaaccatcgtaaaactgttgtcgttgataccgatgcgggttggaagtcattggtgacctcagcaaatccgcatgatggtagttcgcgccattctaatgtggcattggtggtaaatggagccacagctgctgatgtacttcaaaccgaagctgctgttgcgcaaatgtcaggaagtagttcaccatcacttattttaggcgattttgaaaaagacgttagcaagcctcaaattcaagtgctaactgaaggggcaatctatgaagctgtattaaaattaattaatacggctaaacctaaagaacatcttgatttaagtatgttctatttgtctgaacgtaagattattaaagctctaaaaagtgcccaagaacgtggcgttattgttcgtgttttactcgatccaaataaagatgcgtttggtagacaaaagaatggtatcccaaaccgtcaggtagcgtcagagttacatgctgctggcattccaattcgttggtgtgatactcatggcgagcagaaccatagcaaaatgatcttgaaatataatgctcaacaagctgagttaattgtaggatctgccaattttacagcccgtaatttaaaaaattataaccttgaaacggatatgttggttgtaggcaaagttcaagatcaagtctttaaagacgctcagaattacttcaatacttcgtggtcaaacctacaaggtagacagatgagcgtggattatgcgaagtatgccgatgagtctaaagtgaagtattggatttatcgttttatggaatggtcaggattatcgactttttaa

SEQ ID NO: 45686 - DNA, 1029 bp, Acinetobacter baumannii
atgcagccgatcgattttgtaatgatttgggtggactcaaccgatacgaaatggcagcagcaatatatatattataaatccaaagaaacaaaaaccaagattgatgagctcgttgatcaatgtcgttatcgtgactggaataatcttcattactggtttagatctgttgagaaattctgtccttgggtaaggaaaattcatcttgtaacctgtggtcattttcccgaatttttagtcaaaaatcatcccaaattaaatttagttactcatgatcaaattatagaacctcattgtttgcctacgtttaattcacatgcgattgaaatcaatattcataaaatagaaggcttggcagaacactttgtttattttaatgatgacacctttattaatagccctttagaaccagagttcttttttaaaaatggtttaccttgtgatggtattcaattacaacctttgatggtggtgggggaagagaactttttaggcgcagttgctttgacggatgtcgcaattattaataaatattttgataagagaaaactctttcggagtaatccttctgcactttttaatcatcgatattcgataagtaataatttgggcaattttttaagcttatataatcgaaaattctcaagcttttatagtactcatttaccccaaccgtttctaaaatcggtgtttgaagaagtttggagaaacgaagagagctacttaaaagaagtatcaagtcatcgatttagacaacctttagacgttaaccaatacctatttcgattatggcagttatgttcggctcgtttttacccagtaaatatatttcagcgtgggcagaactttaatttaagaatacaaaatcttcctgaaattaatcatgttattaagaatgagcaacttccacaaatttgtctaaatgacgatgaacacgtggttgattttgaaaaattaaaaacagaaattatccaaatttttgagcaaaaatttaatacggtttcgagttttgagaaaaagataacacattaa

SEQ ID NO: 45687 - DNA, 786 bp, Acinetobacter baumannii
gtgaatgcattctcagacgtcaaaaattttaaaattgaatttaaagtttcaactattggtaaatttaaatcaaagtcaaagtattcaggtatttataaatataaatttgtgaaaaatatctttaagaaaattattgacttaaccgtaaacgaagaaaaacccgaaacaaagataaaaggccttaaaatcacaggttatcctcatgtgagccgtttctttgaatataaagaaattctagaaaatcatcctgatgcttcacatgtattgctaactgatgttcgagacgtttttttccaaagtaatccttttaagaatcttagcaaaggtttatttgtcggaatggaaaatccagactttacgataggtactgagcaatataatcaaaagtggattttggatgcatacggagagagtttttataatcttgcaaaagatgagcaagtctcttgttctggcgttactattggggatcatgaatcaattaaagtctatatcaataaaatgattgaagaattctgtaaacagccatatcagaaaatgtctaacagaatttatgatcaagccatgcataataaattattaattactaatgagttggcagaggtaactcgttgtcagccatttgaatctattattgtaactcttggattatatccaatagagcaaatttctattaatgatcaaggttttattattaaccgtaaccaagaaatcattcctattgtccatcaacatgacagacatgcggaactgattcagttatgtgataattatattggaaaataa

SEQ ID NO: 45688 - DNA, 2139 bp, Acinetobacter baumannii
atgaacgacaatactaaatcaaccaataaaacaagtgaaatggctggtgccgatgcagcaaataaagccaatactacccagaaaactgaacagttagacacagttagagatgatgcaactaatgaagctttaaccacaaatcagggggttaaaatagcggataaccaaaatagcttaagagcgggtattcgtggctcgactttattggaagatttcattttaagagaaaaaatcacccactttgaccatgagcgtatacctgagcgtattgtgcatgcgcgtggtgtaggggcacatggttattttcaggcatatgaaggaaacgaacgtttaaccaaagctggattcttgacagacccaactattcagacgcctatttttgtacgtttttcaacagtccaagggcctcgtggttcagccgatactgtccgtgatattcgcggttttgccattaagttttatacccaagaaggtaacttcgacttggtaggaaataacgcacctgtcttttttgtgcaagacgggattaaatttccagactttgtacatgcggtaaaacctgaaccggacacagaaattccaacgggtgcaactgcgcatgatactttctgggattttgtgtctttagtgcccgagtcagcacatgctgtaatttgggcaatgtcagaccgtgcgattcctcgtaacttacgttcgatccaagggtttggtgttcatacgttccgtttaattaatgctgaaggtaaatcacattttgtgaaatttcactggacaccaaaacaaggtttaagtgcgctggtatgggatgaagctcaaaaacttgcaggtaaagacccggatttccaccgtcgtgatctttatgaagcaattgagcacggtttttatccagaatgggaactcggcgtgcagattgtcgaagaagaagatgaaatgaactttgacttcgatttgctggacccaacaaaaattattcctgaagaattagttcctgttacgccaattggccgatttgttttaaatagaaatgtagataacttctttgctgaaacagagcaggtagctttctgtccgggtcatgtagtacctggtattgattttactgatgacccacttttacaagcccgtctattttcatacacagatacccagttaagccgtttaggtggaccaaactttcaccaaattccgattaacaaacctgtgtgtccattccataacaatcaacgtgatggtattcatcagcataccattcataaaggacaggctgcatatcaaccaaactcaattgatggaaattggccagtagagacaccgccagcggcatcaaatggtggttttgaaagttatcctgaaaaaattagtgggcataaacttcgtcaaagaagtgagacgttctctgattatttctctcaaccacgactttattacaaaagccttgcaccgcatgaacaaaaacatgtggtcgatgcctatacttttgaattaagtaaagttcaaagaaagcatattcgtgagcgtcaagttcaacaaattttggctaatatcgacttagatttggcacgccaagtaggggcaaatttaggtattgaagtgcctgacttaaccctaagttataagaaaacagcagttgaaaaatctgccaagttatcttttttagctttcccacctgaagatattcaaggtagaaaagttgccgtacttatccataacatggtgaagtctgacgcattagaagctattaaaaactgggcaattaaagaaggcgtaatccttcacttactagcgccgagcttggctccagtcaaagatcataaagataacgttattgtggctgatggcatgcaaatgtctgagccttcaattgcctatgatgcggtaattattccggatggcgataacctaaatacggttatgcaagacggggtagctcgccattacttactcgaagcttataagcacttaaagccaatcgtatttttgggtaataaatctgatttgcttgaaccattaggtttagtggcagatgaaggaactttaattgaagatgagttccagcatgttgcggaaaaatttaagaacctgattaaagcacaccgtgtttggtcacgagaacaaatagccgcacatgtaccggcttaa

SEQ ID NO: 45689 - DNA, 765 bp, Acinetobacter baumannii
atggttgaattattattaaaagacttaacacatttaggtttaattacagcttttgctttaattgccttaattatgtggttgtcgaccaagctctctaaatatttaaccaatggacgtgtgcatgcttcagcaattgcgattgtaattggtttgattttggcatggtttggcggaaaaatgacaggtggtgaaaaaggcttgaccgaccttgcactttttacaggtgtaggactcatgggcggtgcaatgcttcgtgactttactattgtagccacagcatttgaagtacaagcgactgaggccaaaaaagctggatttattggtgccttctctttatttcttgggaccattttgccatttattgtcggttgtatgtttgcgtggatttttggctatcgcgatgctgtaagtattaccacaattggcgcaggtgcagtgacttacattgttgggcctgttacgggtgcggccattggtgcgagctctgaggtcatggcgttatcaattgcaacgggcttggtgaaagcaatctgtgtaatggtctcaacaccactcactgcgaaatttatgggattagacaatccacgttctgcgatgatttttggtggtttggcaggaacggtaagtggtgtgtcagctggtttagctgctacagaccgccgtttagtgccttacggtgcacttacagcaacttttcacacgggccttggctgtttaatgggtccaactattctgttctttgcggttaaagctttggtgggttaa

SEQ ID NO: 45690 - DNA, 312 bp, Acinetobacter baumannii
  misc_feature (296)..(305): n is a, c, g, or t
atgtataaatcagaacaactcgcccatagcattcgccaacttattgaaagcggcactctaaatgcacatgagaaattaccttcattaagagatcaggtccaacgttctggttttagtttaatgactgtgatgaatgcttatcaggagcttgaatcacaaggtctgatctattcaaaggaaaagtctggctattttgttgccgagcaaattgcactaaagccactggaacaatattcgatcgtttcacttaattctaaaattgaaattaattctttagtttttaaatatcttaaatnnnnnnnnnnatcttaa

SEQ ID NO: 45691 - DNA, 426 bp, Acinetobacter baumannii
ttgtttaagcattctcaaattttgacaaaaacattaattacaacgtctttgcttacattcagcctctcaagtcatgcagcccttacctttggcaatgctgaagaaggtcaacttaaagtaagcggtactgttcgagccaaatatgtttatgatttcgactctgaaccgtctaccagtaaattttcctttaatgacgcggtcttatggctggactacaactccccaaaatggattggccgcctagattatcgggtttatgaatattatggacgtttaggcgatgccaattggctcaccgatgcgtggttgggttataaaattaatgacaacagtaaaattattgctggcttaaaccccgttccttttggcttgggtcgcttttggggaaatacttattatttaggcattgccaatagtgccggttag

SEQ ID NO: 45692 - DNA, 1203 bp, Acinetobacter baumannii
atgcaaataccttcgtcattgcagtcatcgctgctaggtcaaaatcaaaaggccgagttaacagggcatttattgtcgaccttaacgacctataaatatcctgaacatggcccctcagttttagaagtgatggatattcaaaaaaagttccaacactttcaggccctaacgcatattaatttagacctgaaagcgggcgagttcgtgagctttttgggaccttctggatgcggtaaaaccacattgctacgcataattgcgggtctagaaaaacctgattatggaaaagtcataaaaaagggcgcagacattacgttgctaagtgctgaaaagcgtcactgtggcattgtgtttcagaactatgcgttatttccaaacttaaatgtagaagaaaatattgcgtttggcttagacaaaaagaaatgcgataaggcacagcgtagccaacgagttcagcaattattagagctgattgagttacctgatattgctaaaaaatatccaaaccaattgtcgggtggtcagcaacaacgtgttgcgcttgctcgggcaattgcaccgaagcctgatattttactgctcgatgaaccattgtctgcacttgatgctcaggtacgtctaaacttaagacaaaagattcgttcgattcaatcacagcttaatttgccaacgattatggtcacacatgaccaagaagaagcattaagcatttctgaccgtgtggtagtcatgaatcatggtgtcattgagcaaattgatacgccgcacaatatttactacaagccacaaacccaattcgttgccaagtttattggcaccatgaattttttaaaagccacttgcgctgtaccgaatcagctcgaggttttaggttttattcctctaaatttggagcaacaaaaacttaaagcaggggaaaattacagcattggttttagacccgaagctgtcgagttggttgatgattttggtagtgataaagagtcgttgtatttgccagttaaagtattaagcactgaatttttaggtgccaagcgtcgtttattttgcgctattcatatcgatggaattgagcaggcaaaacaccttttgcaaattgaaattgaaaatatcaagttcaaatctttacaagaactgatgtttataaaagtgcctaatcagctcatccatgtctttgacgaacaagggtacgcactatgttaa

SEQ ID NO: 45693 - DNA, 1038 bp, Acinetobacter baumannii
atgaaacagtatgttcaacagacaattaaactcggtactgcatcagttttaggtgtagtagttgctattcaaatgggatgttcatcagcaacatcaaaacaatcagaagaaattacagtctatacggcagtggaagccgaccaacttaagcaataccaagaagaattacacaaagcttatccagagctaaaagtaaaatgggtacgtgattcaactggtgtaatcaccgccaaacttttggcagagcagaaaaacccacaagcggacgtggtttttggtgtggctttaaccagtttgttggtcatggaaaagaaagacatgcttgagccttttaaacctgaaggtattcaaaatttaaaaccagaatttgtaagtcaaaaacctgtaccaacgtggacgggtatggatgcatgggaatctgcaatttgtgtcaataaagtcgaattagaaaaacgtaagttaccgattccaaaaacttggaaagatttaaccaaccccatttataaaaacttgattgtgatgccaaacccagcttcgagtggcacaggctatttagatgtcacggcttggatgcagatttggggcgaaaagcaggcatgggactatatgcaggctttagataaaaacatttcacaatatcctcactcgggttcaaaaccttgcaagatggcagcacaaggtgaaattccaattggtgtttcttttggttatccggcatttaagttaaaagcagaaggtgcacctttagaagtggtttatccaactgaaggtttaggctgggaaatggaagcctcagcaattgtgaaaggaaccaagaaattaagtagcgcgcaaaaatttataaattggtcggtaagcaaagcggcaaacgaagcctatgcccataacttttcaatggtggcctataaaggcattgaaaatactactatggacttcccgaaaaatcttcctcaaatgctcataaaaaatgatttttattgggcggccgagcagcgtgaacgtattttggctgaatggtcaaagcgttttgaaaagtga

SEQ ID NO: 45694 - DNA, 1215 bp, Acinetobacter baumannii
atggatattttaaagacacaggttgcaattattggttctggaccagcagggttattgcttgggcaacttctatataaagctggcatcgatcatattattgttgagcaacgtagtgctgaatatgtggcttcacggattcgtgcaggaattttagagcaagtttcggtcgacttactgaaacaagccggcgttgaccaaaacttaaaagaaaaaggattaccgcattcgggcattgaaatcttaaccaatggtgagttacatcgggttgatttagccgcactcacaggtggtaaacaagtgactgtatatggtcagaccgaagtcactaaagatttaatgactgcgcgtgaagcagcacagctcacttcatattatgaagctcacaatgtacaagtgaaagacttttacactgcaccaaaagttgagtttgagtaccaaggtaaagcctttcaaattcagtgtgactttatagcagggtgtgatggctaccacggtgtctgccgtgccagtgtgccagaagacaaaattaaaacctttgaaaaagtttatccatttggctggttagggttattggccgatgtcccacctgtagccgatgaactcatttatgtacagtctgaacgtggatttgctttatgtagtatgcgctcagaaacacgtagccgttattatttacaagtccctttaacagatcacgtcgaagactggtcggatgaaaagttctgggatgagttaaaaaaccgcctagatcctgaaagccgtgaaaagttagtgacaggtccttctattgaaaaaagtatcgcgccgttacgtagctttgtgaccgagccaatgcgttttggaaaactatttttagcaggtgatgctgcgcatattgttccaccaacaggagcaaaaggcttaaatctcgctgcatctgatattgcttatttatcaagcgcactcattgaatattacgccgaaggttccgaacaagggataaatgaatactctgaaaaatgcctacaacgcgtatggaaagcagagcgtttttcttggtggatgactcatttattgcatcgttttgaaactgaaagtgagtttgaccataagattaaacaagccgagttgagttatgtactgggttcaattgcgggtaaaacaaccttggctgaaaactatgtcgggttgccttatgaaattaagcaaattgatagttttaagcacgccagctaa

SEQ ID NO: 45695 - DNA, 384 bp, Acinetobacter baumannii
atgagtaatgaaaaatttgaaaagggtttagcaatccgtaaacaagttcttggtgaagaatatgtaaataattcaatcaacaatgccgatgaatttaacctacctcttcaagagttagtcactgaatattgctggggagctgtttgggggcgtgaagagttaagtaagcctgagcgcagtttaattaacttggcaatgatctcagctttaaatcgtccgcatgaattaaaactacatgttaaaggtgcacttcgaaatggtgtacctaaagagaaaattcgtgaagtgcttttgcaggttgcaatttactgtggcgtgcctgctgctgtagatagctttcgaattgctaaagaggcaattaaagagtttgaatctgagcaataa

SEQ ID NO: 45696 - DNA, 1458 bp, Acinetobacter baumannii
atgcagcttaatgaactcgctttatttcgtcagcaagcttttgttgctggaaagtggtgcgatgcagaccatcaacaaacatccgaaattttaaatccagcgacattagagattattggtactgtcccgaatatgggcaaggctgaagccgagcgtgccattgaagctgccaaagaagcttggccgctatggaaaaataaaacagcaaaagatcgatcaattattttaaaaaaatggttcgatttaatcatttcaaatgcggatgaattggcttttattttaacgagtgagcaaggaaagcccttagctgaagccaagggtgaaattttatatgctgccagttttattgaatggtttgccgaagaagcaaaacgagtgtatggagatattattccaagcccatatccagatgctcgtattgttgtaaataaacagcctattggcgtcgttgcagctattacgccgtggaattttcccgctgccatgattacgcgtaaggttgctccagccttggcggcaggttgtccttgcattgtaaaaccagcaccagaaacgccttttactgctttggctttagtggacttagctgtgcaagcgggcgtgcctgctgaaatttttagtgtgattacaggtgatgcagttcatattggtgatgcgatttttgaaagtgatgtcgtacgcaagtttacttttaccggttcaacaccagttggcaaaatgctgcttgagcgttcagcaaaaaccttaaaaaaagtttccttagagttgggtggcaatgcgccgttcattgtatttgatgatgccgatttagaagcagcaattgagggagcgctcattgctaaatttagaaatgcagggcaaacctgtgtgtgcgtcaatcgattcttagtacaggcaggtatttatgaaaaatttattgctgccttaagccaaaaaattcaaaattttaatattggtaatggattagaagctgggcatgacattgggccattaattaatgccaatgcggtgaaaaaagttgaagctcatattcaagatgcattagataaaaatggtcgtcttgtggttggtggtaaaaagcataaagcgggtgaattgttttttgaaccgacactgattgcagatgttaccgctgatatggatgtggcaacccaagaaacgtttggtccgctagcagccgtatttaaatttgaaaacgagcaacaagcagttgaaatggcaaatgcaactgaatttggtttagccgcatattgttataccaaagatttaggccgtgcttggcgaatgagtgaacagcttgagtatggcatggtcggaattaataaaggccttatttcaaatgaagttgcgccttttggtggcattaaacagtctggtttggggcgtgaaggttctaaatacggtattgaagattatctggaaattaaatacaccttgtttggaggattgaatatatga

SEQ ID NO: 45697 - DNA, 1170 bp, Acinetobacter baumannii
atgaaaaaaagctatttacaagtggctctaagcacagcattgatggctgtaatctatccgagttacgcaggtataagttttggaaacaccgatgatgaatacggcaagctcaccgtatccggctatgttcgcgctaactatcaagataaacactatggagagtctgcttctgatcaaaaaattcgttttgatgctgcgcagttaaaactggactacgagcatgggccgttatttggtcatgcggaatatcggtgctatcaatatgatcgtctatgtgatttttctacgttggttgatggttatgtagggtacaaattaaataaaacagatcaagtggtggcaggtgttcagccgattccatttggaccgggacgtttttggggtaatagcctatatggaagtatgagcacaaccgcaggtttagaagatgttcataatcttggtttgaattatcattttgaattgccgacagcaaccaagtttgatgtggggtattttgcggtagatggtggaagttacacaggctctacccaagattcaggtcgctacactgcaaactatgtgagttcagacgttccgaataaaaccgatttgcaagaaaagaatatgtgggtaggccgagtgactcaagatataaatcttggaattaatggtttaaccacacaactcggtggctcctattggacatccgatattgaaaataaagccgcttcgagtgatgggcgccgtcatgcatgggcactttttggtaaagccaattatggcaatttaaatgtgacccttactggtggtaaaaatgacgtaactaatcaggaccagcttaaccctaatcagtcactcatgggttcttacgacagtgaatattatgtcgcgaacaaaggaacattctatactgcagatgtgggctacacttttaaaaatgttaagcagatcgggaaaattacgccgtactttatgtacagtcagtacgataaagatcaggacagtatgaaagattcgattcgtaatattattggtgtgtctattgaccataaacagctatctttggtggctgaatacatcatgagtaaaaatgacccattcattggtgggactcaagattcattggcaaaaggagacgataaccagtggaataagttgcttaacttaacgcttttttattatttctaa

SEQ ID NO: 45698 - DNA, 1407 bp, Acinetobacter baumannii
atgagccaaaacgaaaatagcaataatgctttcgctatcgaaagtcattctattgattatgttgctccctctgaacgtaatgggaaagttcgcgatctattcacattatggttttgtaccaatattgcaccgcttgccgtgattacgggtgcaatgtcaattttaacgtttaacctcaatattgtaagtgcattgcttgcgatctgctgcggacatttttttggtgcagcgattttagctttaacctctgcacaaggcccacaggtcggcattcctcaaatgattcagagccgtgcgcagttcgggcgttatggggcattgctggttgtactgtttactaccctcatttatttaggttttttcatctctaacattattttgtcaggcaaaacccttcataccgttgttcctgctattcctgtgccgactgcgaccgtgattggtgcaattgcagcaaccacaataggcgtgattggttatcactttattcataagttcaataaaattggaacttggtttatgggtggttcgttgctcatcggcctcatgattatggtgccgcatattaatgcagatgtacttgccaaaggctctttcaatatgaaaggctggtttgccatgtttggtttgtgtgcggtatggcaaattagtttctcgccttatacctcagactattcacgatatttaccgaagtcgattggtatttataagccatttatctttacctatttaggcgcatcgttaggaaccatttttgcgatggcatttggtacgatcgcggttagtattggctcaaccacagatgccatggaagcggtaaagtcaggcactgggttgttcggctatgtccttatgattttgttcttatgcaatatcattggtcataatgccatgaacctctacggtgcggttctttcttgtattacctctattcagacttttgcagggcagtggatgccaagccgaaatatccgagtcgtgttatcaatcattgtattagttctagcgactttaacggcgctttgggcatcaagtaactttattagtttcttcttgaatgtgatttttgccttgttatttattttggtgccgtgggtgtctattaatttattagatttctatgtcgtgaataaaaagtcttatgacattcaatcgatctttgcacgtgatggtggtatttacggcaaatttaatgcaaaagcgcttacggcttatttcattgggattgcggtacaaattccgttcttaaaaaatgcgtttttcacaggtgcactggccgatgtaattccggatgcggatatttcatgggttattggattggtggtgagtctggtggtgtattacgtctttaatctaggaaagattaaatgttctgcacctgcattaaacgcaaaattacctcaataa

SEQ ID NO: 45699 - DNA, 1470 bp, Acinetobacter baumannii
atgacagcagattttcagctttatattaatggtcagtttgaatctggtgcagcgacgtttgaaagtattaatcctgcaacaggtgaagtttgggcacacatgccggaagctcgaaccgatgaagtcaaccgagcagttcaagcggcatctcaggcgttaaaagcaccggagtgggcaggtttaacggcctcccagcgcggtaaattgctctataagttggctgatttaattgaaaaagctgcaccgcaacttgcccaaattgaaaccagtgatacgggcaagattattcgtgaaacatcgagccagattgcctatgtcgctgaatattatcgctactatgcaggtattgccgacaaattagagggtagttttctaccgattgataaggcagacatgcaagcatggattgttcgtgaaccagtaggtgtggttgctgcaattgttccttggaacagtcagttatttttatcggcagtgaaggtagggccagctttagcagcaggttgtacggtcgtgctaaaagcttctgaagacggccctggaccattgttagcctttgccaaattagtccatgaagcgggttttccggctggagtggtcaacgtgattaccggtttcggacctgaatgtggcgccgtgctgagtagtcatccggacgttgctcatgttgcgtttacaggtggtccagaaacggcaaggcacattgtgcgtaactcggctgaaaatcttgcaaaagtttcactcgaattaggtggcaaatcaccatttattgtatttgctgatgcagatattcaaagtgcggtaaatgctcaggtcgctgctatttttgcggccacagggcagagttgtgtagcaggttcacgtttactggttgaagaaagcattaaagatgaatttgttcagcgtttggttgagcgtgtacaaaccataaaaattggtttacctcatgagatggcaaccgagtttggaccactttgtaccttacgccaacgccaaaaaattgagcaagtcattgcaagctcaatccagcaaggtgcaaaacttcttactggtggtaaaagcattgagcgagcagggtattactatccaccgaccattttagattgcaccgatgcacctcaagcagattgcattaccacggaattatttggtccggtgttatcggtagatagtttcaaagatgaagcggaagctgtgcaaaaagccaatagtacgccttacgggctggcagcaggcgtttttaccaccaatttaagccgtgctcaccgtatgaccaaagtcattgggtcgggaattgtttggttaaatacttaccgcgcggtttctccacttgcgccttttggtggacatgggctttcgggacatgggcgggaaggtggcgcaaatgctgttttagattacaccaccaccaaaacagtttggttacgtacctcagatgagccaattgatgacccatttgtcatgagataa

SEQ ID NO: 45700 - DNA, 1038 bp, Acinetobacter baumannii
atgcgtttttcattatttgtgcatatggaacgtgtttctgatcagcaaacccagaagcagctttatgatgaaatgattgagctttgtcaaattgcagaccgtggcggtatgcatgcggtttggacaggcgaacaccatgccatgaactttaccattgcaccgaacccatttttaaatctggtcgatttagcgaataaaaccaaaaatgttcgtttaggtacaggtacggtggtagcgccattctggcatccgattaaacttgcaggtgaagctgcaatgaccgacattattaccaatggccgtttagatattggtattgctcgtggtgcttattcgtttgaatatgaacgtatggttccgggcatggatgcatggagtgcaggtcagcgtttacgtgaaatgattcccgcaattaaaaacctttggaaaggcgattatgagcataacggggaattttggcagtttccaaaaacgacttcggcgcctcaaccgcttcaacaaccgcatccaccaatttgggttgctgtccgtgatccaaatagccacgaatttgctgtgcaaaatggctgtaatatacaggtaacgccgttacatttaggtgacgaagaagttgaaaagctcatgggacatttcaatgcagcttgtgaaaagttcagtgatgtaccgcgtccggaaattatgttgctccgccatacctatgtggcagatagtgaagaagatgctcaactggcagcagatgaaatcaataccttctataactacttcggcgcttggtttaaaaatgagcgtgaaattaaacaaggtttaattgcacctttaagccctgaagaaattgctgcacatcctttttatacacctgaggcgatgcgcaaaaataacgtgattggacaagcccaagaagtcattgaccgcttaaaagcttatgaagcaatgggctataacgaatattctttctggattgatacgggcatgagctttgagcgtaaaaaagcatcattagaacgtatgatcaatgaagttatgccggcatttgcatag

SEQ ID NO: 45701 - DNA, 933 bp, Acinetobacter baumannii
atgagtgaaatggatacgattaataaaatgcgtgaactacgtgatgctttcgggtcatttatgacaggcgttacggtggtcacaacctgtaaagaagatggaacgccacttggctttacagcgaactcttttgcttcggtgtctttggacccagctttacttctagtgagtattgccaagacatcaagcaattatcataactttgcaaataccactcattttgcaatcaatattttggcagaagagcaaaaggatgtttcaaatacttttgctcgtccaagcgaagaccgttttgcaaatctttcatggtcaaaaagcgcttgccagaacccgctgatcgatcatgtcagtgcatggtttgactgtactacctaccaagttgtcgatgctggtgaccatgcgattttaattggtaaagttgaagattttgcttcgaccggttttgcaggtcttggttattatcgtggtggatatttcacaccagccaaactttctgccgaggtgatctctggccctaaagtggtgatgagtgccattattggacatgaaaataccattttacttgaagaaactgccgatcataaatggactattccgcatgtcatggtagataaagacggtgcagataaagcgctcgagaaaatctttgcacaatatcagccagatgcttctgccaacttcatttactctgtatatgaaaacgttgaaaaccagcagcaatatatttcatttttatgcaacacacccgtagctcaagccactaaaggtcagtttgtcgatttaaatgatcttgagaaacttgagtttgtagacagtgctttagaaagtatgctgatgcgctatcgcaaagaaaaccatttgaaaacttatggtgtttattacggaaatcagacaacaggtacagttcgtcaaatcgttaaagaggaagtttaa

SEQ ID NO: 45702 - DNA, 792 bp, Acinetobacter baumannii
atgatgtcaaaaaccctgcagctgtcaaataaccgtattgctcactattttgagcaaggcgaaggagagcctctggttctgatccatggagtgggaatgcaagctgcggcatggtatccacaaattgaatatttttctaaacattatcatgtgatttcagtagatatgccgggacatggtcaaagtaccaaattaccggcagacgcaaaattacaagattttgttgaatggaccatcgaatttattacagccttaaatttaggcccggtaaatttagcagggcattcaatgggctcgctaattactacaggcgtcagtgttacccgtcctgatttagttaaacggatggctgtactcaatggtgtgtataaacggacaccacaggcacgtcatgcagtcatccaaagagctgaagagttaaaaacaggccgtattgatgttgaaactccgctacaacgctggtttggtgaaagtgaagtcgagcgtatagctgctgccaaagtgaaaacttggctcgaaaatgtcgacttgtctggttataccactgcgtattctgcgtttgcacaaggcgatgaaacctatgcagatgactggtcaaagatcacttgtcctgctttggtgttgaccggaacggatgatccgaattcaacagcggaaatggcattacaaatggcaaaacaggcaaagcatggcactgcaattgtcattgaaaatgaacgtcacatggtgaacttaactgcacctgacaaagtgaataatgcaatgcaagcgtggttggaaaccagcgtttaa

SEQ ID NO: 45703 - DNA, 603 bp, Acinetobacter baumannii
atggaactcatacgtaaaactgtacttcatgtagaaaccacttatgtagatggcggcaaagaagcagctaagcctttaaaaatggtggcagccgcagcggtaattaaaaatccgtgggcagggcaaggttatgtagaaaacctaacaccggaaattcgtcgcattgcgccgatcttaagcgagcatttaaccaagcttattcttgatgaagtcggttcgggcgaagccgttgaagcttttggtaaaagtgcagtggtgggcttaaatggtgaacttgagcatgcatcagctttaattcacaccttacattttggtaatacttaccgtagtgctgttggcgcgaagtcttatttggcatttaacaatacccgtggcccagcaaatgcaccgattttaattccaatgatggataaaaatgacgaaggccgccgttctcattacttaacattgcaatttgcaattccagatgcacctgctgctgacgaactggttgttgtgattggtgcagcgacaggtggtcgaccacatcatcgtattggtgatcgttataaagatttggaagagttaggtcatgatgtcaaaaaccctgcagctgtcaaataa

SEQ ID NO: 45704 - DNA, 663 bp, Acinetobacter baumannii
atgaatcttaaaattgagaacccgcccgtaactttacgagagctgtgtttagataaagtgcgtaatgccattattacgggctatttcccttcaggaaaaagattggttgaaagaacgttatgtgaagaacttggcgtaagccgttctgtagttcgcgaagtgattcgttatttggaagcagaaggtttagtcgagattctgccaaataaaggccctattgtttcgctacttaactgggacatcgcttcacaaatttatgaaattcgtcttttgttagagcaaagtgctgtggttgactgcactaaaaatctagatgaaaaaactgctgaaaaattaaaacttctattagaagatcttaaagctgcgtttgccgccgatgacatcaatctcattattgcgacctctactcggctttatgaaactatttttactactgccaatcaccatattgcttgggaagtggttcaacgtttaaacggtcgaattagccgtcttcgtgccatgaccatgaaatcgacaaagcgtgaaatttcaggttatcaacgtattaaaaatatgtgtgaggccatttatcttcacaaagaccctgaaaaggcaaaacaagctgttgctgaacatattgctgaagctgctgctgtcgcaaaaaatattttagatgcgtga

SEQ ID NO: 45705 - DNA, 285 bp, Acinetobacter baumannii
atgtctgcgtactggattgctcatgtcaccattcatgatatggaacaatataaacaatatatggccactgctccgcaagcttttcaaaagtacggcgccaagtttcttgcgcgtggcggtgcctcggaagtcttagaaggacaagagtttgaacgtcacgtggtgattgagtttccagatatggaaactgcacgtgaatgttatttttcacctgaatatcagcttgccaaaagtaaacgccaaggctgctgtgatgtcatggtgagttttgttgaagggatctaa

SEQ ID NO: 45706 - DNA, 573 bp, Acinetobacter baumannii
atgcaaaataaatctaacgataatgctccacgtcattttaatttgactgcgcgaatactgcattggcttatggcggcagcaattctggctatgctatttattggggtaggaatgaccacctcaatgacttggcgtccgtggttaattgatattcaccgtcctttaggaatcgcaatcttactattggtcatcataagattaataaatcgactctgttatccaattccacctttgccgccgtctgtaccacgctggcaagcgtttcttgctcatgcatcacattggctactttatattttgatgtttagtttgccattgctcggatgggcaacgctatcggcaggtaattggcctgtcactttatttccgggttgggatcttccacctatagcaccaaccaactctacgctttacgcttggttccgtactctacacggaattttggcttggttattatttgctgtcgttattggtcatctatctgctgcattattacatgcatggatttatcgcgatggcgtattttcgagtatggctttggggccttcttctaaaaaagaagaagctgattag

SEQ ID NO: 45707 - DNA, 336 bp, Acinetobacter baumannii
atggcgcaggcggtttggcgatataatatctatcgaaaaattcaatggctaattcagtttgccgtgataattacaccagtaattattcatacaaatcaattagttatgtgtgttttcttggagattattgtattgttgtttgatatattattatggtataatggaagtagtatgtcgcaagaaaagatggcaataaattgctctcactgttgtaaacatttggttcgggcgaaaacacagcaatgtgcttgtcaactgaaccatgacgagggtctggctagtcttatcaccgatgagatgagctatgtccatgttgataactgtgcccctttttaa

SEQ ID NO: 45708 - DNA, 1464 bp, Acinetobacter baumannii
ttgagtgatttgaaaacgcatatttatagcaatatcgaaaataatcattctactttagaagttcctagatggattcgaggattaccagctatttttaaagatacaagggtttcacactttggtttaagtacttctactaaaatttttgatagtttgatgtttagtcaggtcaaagatgcaattatttgctttgatgatttcgaacggatgtctaataaattggatattaaagatgttatgggattggcaaattatctaaaattagaaaaaaactgtcaggttattttgattttagatgaaaataaaacagcaagcgaaaataagaaaaattatgctgaatacaaggaaaagttgattgatacaacaattcctattgactcagtgaaatcattaattcaagaaaatacagaagactttgaaggagatgaaatacttgttgagttgatgtttgagtttgcagaaaccttagaaatccataatttcagattttttcaaaaagtaatcaagttatatcgagattttaggaagtcattacctgaggcagtcgctgactcaacaaaagaaactattctaataagaattcttcaaggctacttaattcaggatatacctgaattagaatatggatggaatgactgtaaatattttcccttagatcagcaaaaagattggtctgatagaagaaaaaaaacttataagagcctaattgatctttcaaatgtgtgtataaaaggtgatggtgacctttggtttattgaatttaagaaatggtttgatcaaaaagagaatttttctattgaatcaataaaagagttagctcaatctgaacttataagtgataaaaataataagttaaaagataaactctcggctcttttcgatgagcgagataattatcaggcgagtgatgattttatagataggttattttacctagcttgtcagtgtattggggtctcttctttattagaccttagagcgtgtatctccactttagaagacttcgatgaattagaaaaggcccaattgcttgaaacaaaagttgagctttggattaaagagaaattgtcaaaaaatagaagcgcttttaaaggcagtgggctatttggttcacatggattcgaagattttatccaaatgtttttaaagcagaatccagatttagacttacctttattaaaagatgcaatttataacaagtatataaatcaatattctgaacaagatataaagcgtattactagtgctgataaaactagtctctatcaatttatttttaaggactttcctgaggataatcgatttttaaataccagagttcataaccttgttgttaacttacctaatgtgcaaaaagaacttttaatagagatattaaatgagagagcaaaaaactctaattttcaaaaaaaatatgcaaattatcttatttctaaattaataaacgaaaaaaaggagtcctaa

SEQ ID NO: 45709 - DNA, 978 bp, Acinetobacter baumannii
atgcgaagtattatccatcgtaattttggcgaacctgtagacgttttagagcaggcggatatgccaaagcctgaaccaaaagcaggcgaagtgcgtattaaaaccatcatgtctccgatccataatcatgatgtatggacagtacgaggaagttatggctataaaccaaccttacctgcgattggtggcagtgaggcagttggtattgtagatgcgttgggtgaaggtgttgaacatgtacaggtagggcaacgtattgccgttgcggctgtgcatggcagttgggctgaatactttattgcgccagcgcaagggattattccactcaataatgaaattgatgatgaaacagcagcacaactgattggtatgccaattagtgcactcatgctactcgactttgttaacgttcaaccgggtcaatggctcattcaaaacacggcgaatggtgcagtcggtaaaacggtggcaatgattgcgcaggcacgtggtttacctgtgattaatctggttcgccgtagtgatgcaattgccgagatgcaagcattaggtattcaacatgttgtggcaactgatcagccgaactggaaagagcaagttaaacagattcacggtgaccaacctcttattgccggtgtggactcgattggtggaagtgcaagtggtgaaatgctgaatttactcagtgaaaatagcctgctcgtttcgttcggtagtatgactggcgaaaccatgcagatttcatcgggtgatctaattttcaaacaagcgacagtaaaaggtttctgggcgagtgtagttaataaagaaatgccagcagctcgtaaaaaggaactgatcgttgagctgctaacattagcgactcagaaaaaattaatccttcctgtagaaggtgtatttagttttgatgagattaaaactgcggctcaaagagcaacgcaaggcgctcgtcaaggcaaagtattattaaagccgtaa

SEQ ID NO: 45710 - DNA, 1245 bp, Acinetobacter baumannii
atgaactcttcatctacacccagtaccttaaacactgaggcaacgtctgttctttcccgtgagtggattcacaaagggactaaagcttataaacatgcaggatttgctttattcctcgtaggttttgctagcttctctctaatttattgtgtacagccactcttacctgcatttagccaaagctttcagattagtcctgcgagtagctctttggcactgtcattaacgactgcctttttagccatttcgattgtgctatcgagtgccttttcacaagcgattggccgtcgcggcgtgatctttgcgtcaatgctgtgtgccgcaattttaaatattgtctcgatgtttacaccgaactggcacagtttactcatagcacgtgcgttagaaggtttactgcttggtggcgtacccgcagtgactatggcttggattgccgaagaaattgcacctgaacacctcggtaaaaccatgggtttatatattgcagggacagcctttggtggcatgatgggccgtgtcggtatgggtattttggttgaatatttttcatggcgcaccgccttaggcctacttggagcaatctgttttatttgctcaattgcatttttaaaactactgcctacttcgcgtaattttgtgcagaaaaaagggctgaatttaggctttcacatgcaaatgtggcgtgctcatttaagcaatactaaattattacgcctgtttgccattggtttcttgcttaccagtgtgttcgtgaccttgtttaactatgcaaccttccgcttaagcggcgcaccttattcactgagtcaaacacaaattagccttattttcttgtcgtatagctttggtatggtgtcttcatcgttggcaggtagcttagccgatcgcttcggcaagaaaaccatgatgatgagtggctttgcgcttatgatcgtgggtagtctcatgaccctcctcacttctcttttcggcattattattggcatcgcatttattaccacaggcttctttattacccactcacttacgagtagttctgtgggtgccgaaagcaaacaagctaaagctcatgccagttcgctttacttgctgttttactatatgggttcaagtattgtcggctcggcgggcggttggttctggttacacggtggctggagtgcgattgtcggtttaaccgtggtcttgtctttaattggaatatttttagcggtttatacttcacatgccaaagcacattaa

SEQ ID NO: 45711 - DNA, 564 bp, Acinetobacter baumannii
atgaataacttcaaaattcttttcattactataggactaatgttttcaatgagtttatttgctaatccaattttctcagatgacctattaaagagagctacaaatggtgatacatcagctcaactagagttagcagatgtttatatatatggatggggtatcgaagagaatgaaactcaagcggaattctgggcaactaaatcagccgaaagcggtaatgtaaaagcaatgcaatggctcggtgagggatatgccacttatgctggtcttgttggagatatggatccagctgatgcagatgaacactacaaaaaagcttttaagtggttttcgaaaggaactcaactaaatgatgcagattgtatggttggtttggctaacttgtatagtagcggtgacggagttgagcaagatactcataaagcactagaactacgtaaaaaggctgctgctcttggaaataaacaagctatgagggatattgcctttatgtatgaatatggattgggtgtagagaaaaatttagagattgcaaaatattggagtgagaaaggaaagatttaa

SEQ ID NO: 45712 - DNA, 306 bp, Acinetobacter baumannii
gtggggaagaaatataaaatttctcctgagagtttacctgttgctcatattaatcaagaataccaacaaattattaagatttctggaggaaaagttatagataaatacgctgaattagaaacgaatattccagaaaatctaggcattaccgttaagcctgttgatgacttggatggatataatattatacaaatcaaaggtgttccaaagtacaaaggaaaatatactatccatatacgagctgacttctatgcaggtggtgatgctgaaattgacaagacatatagctttattgtccaagattaa

SEQ ID NO: 45713 - DNA, 882 bp, Acinetobacter baumannii
atgacggtaaaatttagacaatatttcttaattttaatttttggattattactttccgcttgtcagccagccgcacaacataatgaaagtttagattcccatcagcaagcctacactttgcatatgggtgaaaaaggtattcaagatttttcaaaatatagtgatagcaatgtcgataattatccagctggcgttagctttagagaacttcaattttctcctcctaacttaggaaaaataactatagagaatggttctaacactttatcgattgaacatgttttctctgttttaggaactcaatatgataaaaatgaagggatccaagttttagatattgatgctggcctcacaaaagaagaatttgctaccccagagcaggtttatcaaagctatgtagctttaatgaaacgtattaatcaggctggttggaaaaactatttctttacagatgctccgcgtattgctaaagaagataatattaagcatctatcgaaaagtcgtgatgtcattgatcctagttatatttttagctttgaggagtggaaaaatataataaacaacagcccaacaaaatcattgggttatagattgtacgctaatgggattattttagatatcagtttaaaaagaacagctaagaataagtgtaatgaagagcaatatatgcttagatttagctttcagagtgttcgatacaatgaaagagactcaattcctgactctgataaaatgacacctagtgaattcgagcaagcgtttaaaaagagattaattgaaaataaaaaatatcgggaaaaggaggagggaaaagctaaggctgagggctatcatatcgatgaaaaatatacagatcctgatgtttggccatatgttaaatag

SEQ ID NO: 45714 - DNA, 957 bp, Acinetobacter baumannii
atgttcagttcagatttaacagattatgtcattcgacaattaggtcggactaaaaataaacgttatgaagcatatgtagttagtcgaattattcatttacttaacgactttactttaaaatttgtcactcaacagtttgttagattatcaaataagaaaattgctttaactgatttatattttcctcaacttggtattcatattgaagttgatgaagggcatcactttttaagaaatagtaaaatggagtattcactcaaccaaatagatgagcctctttatagtatctctcaaacagaaagtgacgctatgagagaagaagatattattagtattactggacataaaatttttcgggtaaatgtttataaaaatcaggaaggtcaacctcaaaatttagagagtatccatcaacaaattgataaaattatagaagaaataaagactgcaaagaataagctaatagaggcttctacatttaaagaatggaatatagaaacagaatataaccctcaaacttatattaatttaggacgcatcagcctagctgacaatgtagtattaaaaacaacaaaagatgtctgtaattgctttggttataactataaaaattatcagagaggaggggctattcatccgtatgaagaagataccttaatttggtttcctagactttatgaaaataaggattggataaatactatatcgcctgatggcttaacaattactgaaaagtcgacagatgaaactattacacttaaaaaattagaagagtggaaaaatggcccacagaaaagaattgtctttgcaagagttaaggataatttgaatagtcgagctatgtatcgttttatgggtttgtataagtttcaaaaagcggatttaaaggatggagcggtatggaaacgggtggaatgtgaagtccaaacgtattctcccaaggaaaccaaatgctaa

SEQ ID NO: 45715 - DNA, 459 bp, Acinetobacter baumannii
atgctaaagcctagaatctttataactatcggattacttcttgctggattaactttatttgcagtccttgaggcatacgagaaaaagactaacgttgaaaaagaacaggcaagtcgagttgctattttcttttttaattcactttctaatggagactcagctacagcatacaaatatgtttggtcaggcgagaacttaaatattcgaaatgctgaaataccccaaatttataaagactcaaaagttctagaagtgctaaaagttcgttacgactcggcaaaaaatagacctgattactatcaacaattttataaaatgatttcacttaccataaagataaaaacagtacatgcagatcttgctggtaaccctgcgggaacctatattgtgtttgtaactgttgtaaaaaaagatccaaaatctaattggctcgttactgagctgggcagtggagcttaa

SEQ ID NO: 45716 - DNA, 2190 bp, Acinetobacter baumannii
atgccggctttagaactgaaaaatagatttcacgtaaacgacctcctttcgggagttgtcgtatttctcgtggccttacccttatgtttgggtattgccttagcctcaggtgctccaattatttctggcattattgctggaatagtgggtggaattattgttggcctgctgagtggctctcacatcagcgtttctggcccagcagcagggttgactgcggtcatccttgtacaactcgatcaattaggcggcaattatgccgcctttttattgtgtattgtatttgcaggaattttacaaattctgtttggtgtatttaagttgggtttctttgccaactttattccaaacaatgtcattttaggattattggcagccattggtgccattttgattgtgacacagttaccttatttatttgggttgactgatttttcatggaaagaagtttggactgctactccggatacgtttatccaaaaatttgatgctggagcagcattgattgggctgctgagcttatttttaattttagcttgggacagtagcccacttaaaaagttagcgttgccttctgccttaattgccgtggtactcgcagcagtttttaactttgttttaataagtatcggttcttcatgggctgtgcaaagtaataatttgattcaactaccaaatatattgcaagcaccagaagaggtattggtttttcctgactttagctatttagctgaaccattaatttataccggagccattacacttgcgatcgtggcatctttagaaacattactaaatttagaagcagcagataaacttgatcctcaaaagcgttcatctccacctaatcgtgagttatgggcgcaaggagcaggtaatattgtgtcaggtttgattggcggaatgccagtgacctcagtgattgtccgtagttctgtaaatgccaatacaggtgcacgtagtaaatgctcaaccattattcacggtgtgttgttactgcttgcaattctattttttgtcccactcatgaacatgattcctttgtctgcacttgcagcaattttgatcgtgactggttttaaactgactcatccaaagttattcaaacagctttaccaaaaaggttggagacagtttttaccattcattattaccttggttgcaatcttgctgacagatttattaaccggaatcttggtggggctatttaccagtagtgcatttattttatatggcaacttcaataaaggtgttcgtgtttataaagaaaagcatttacatggaatcgtgacgcgtattgaacttccttcacaagtgacttttctgaatcgttccgcgctcatttctgccttggaacatgttcataaagatcaacagttgattattgatgccactcaatgtgattcgattgatccggatatttatcaagtcattcaagactatcaaaatgagacggcagttaaacgccaagtcgaccttaagcttattggatttaagcagcactatgaagaggtagatgatgcagtactggatatctacattagtacgagagatctacaacgtaaattaagtccacagcaagtcattactttacttaaagaaggaaatgaacgtttcgtaaaaaatgagcgcttgcaacgtgatatttatcgccaaattcgtgttactgcagatgaaggccagcacccaattgctgccgttttgggttgtatggactcacgtgctccaactgaaatgatttttgatgtgggtattggtgatctatttagtttaaggattgcaggtaatattgcaggtcaaaaggtattaggctcgcttgagtttgcttgtcaggccaaaggctcaaaagtcattttagttttaggccatactgactgtggtgcagtgacgagtgcatgtcagttacgcttacagcaaaagcaaatctctgatgtcaaagagatgccgcatattcaatatgtgcttggtccgctcatgcattcggtagaaagcgtatatgacattatgcaaccccgtgaattaaacaagaccttcgtaaatcaggtaactgctatgaatgttcactacaatatccaatatattattaataacagtacggtacttaaagacttattggatcgtggtgaaatagcgattgttggcgcgatttacgatgttaaaacagggcatgtcgagtttttagatgcgtaa

SEQ ID NO: 45717 - DNA, 2655 bp, Acinetobacter baumannii
gtgcaaagcaatcgcgaaaatcaggctgaggccttattaaatcatgtcaacagatatcaagccggtcgactaacggtctttcttggtgcggcacctggtgtaggaaaaacttatgccatgctcgcccgcgccaaagaattatttcaacagggcacagatgttgttgttggtattgttgaaacccatggaagaatcgaaactctaaaaattttggaagggttgcctcagattgctagaaaagaaatgcaatatcaggggcatattttagaagaaatggacttggatgctattttacttaggcatccgcaaatcgttttggttgatgaattggctcatcgcaacgtcccaaatagtcgtcatgaacgacggtggcaagatgttaatgagttgctagacgctggtattgatgtatttaccgctataaatattcaacatttagaaagcctaaatgatgtggtctatcaaattacaggcattcgagtaaatgaaacagtaccagatcgggtatttgaccgtattcgagatattcgcttaattgatttacccgtcagtgaactcattgaaaggctccatcaaggaaaagtctatgtaccagagcaagcaaatctggcattacaaggcttttttagcatttcaaatttaacagcattacgtgaactcgcaatgcaatgcgttgctgagcatgtcgattcagacttaaaagagagttatgcctcaaagggattgaaatctatctcgctgcaaaatgaactgatgattgcgatagatggccaaggctcatctgaatatttagtacgggcaggttgtcgtttagctgaacgctatggggcaacatggactgtagtgaatgttgctaaaagtttagactttggacagagttcgggaaattcatataaaaaagaatatattgagattgatcgggcgtttgagctggctcgacaactcggtggtcgaacagaaatcttatatggccatcgagttgcgtcagtattaatggatgccgcggttgaccgaggtatttccaatctggttattggtaaaagtatttcaccgtggtggttaaagttatttaagaaaaatttagctcagcaattattaaatcaagaaaactcgattgctttaaccattttgcacccagaacagggcactaaaaagattaatcagctcgaaaaaccttcatttttattattaaaagaaagtgtttttgttttagctgttacatgcgcaagtatttttatagctcacttcgcagaagttctatttggtattgaagacttctctgtcatttttattatttctgttttaattgttgcaactaagacccgaatgctcgctgcagtagtggctgctcttatttgtttcttagcctataattttttctttattgccccgcgttatacctttcagatttcagcacaccaaggggtagtcaccgttgttgctttttttgcagcagctttaattgctggccgtttagcttctcagttacgccagcaagttttgtctttaaaagctgcgaatgcctacactacggtaatgcaagacttggcacgtaagctttctagtgcagtaaaccttgaagaagtcatgcaaacaggacgtatgactttagaaacccagcttcagactaaggtgtggatttctattcgagataaaataatttcatctgatattgagctaaatgataaagaaaaagtagctgcagaatggtgtttgaaacatcagcagccatgcgggcgttttaccgatactctgagtcaatcaaactggtggtttttacctcttttagagcagaaaaatagcttaggtattgtgggaatttactttaaggatgaagtggtttccttaaattttgagcaaaagaaattgactgaaagtgtaattgagtacattgcacaggcagcacttcgaacccaattggtcaatgagctagaacaagcaaaagtcaccagtgaaacagagcgcttacgttctgctttattatcttcggtatcgcatgatttacgctcgccactcgcttctattattggggcagcagacacacttgccaattttaaagctgaaatgacagaacaagaccaacaagatctgcttgaaacaattcatttagaaggtgagcgcttagaccgttatattcaaaacttgcttgatatgacgcggttggggcacgaaggtctaactttaaaaagagactggattggggtagatgaattaattggttcggcaacccgccgtttaaagcgttataaaccagatacgcaagtggtcgttcagttacctgagcaatcgattagtttgtatgttcacccagcgctggtagagcaagccatttttaatgttttagaaaatgccgcaaacttttcacctccagatgaatctgtcatgattcgtgctcaactttcgtcagaagatgaggtgaaaatagaaattgaagataaaggtgcaggaatccctgaagacgaaagacaccgcattttcgatatgttttatactatagagcgtggagaccgtggaaaattcggtacaggtttagggctaacaattgtaaaagcgattattggtgctcatatgggtacaatagaagcattttcagggcgccaaaataaaggtactttaattcaaatcaaattacccattcatccagtaaaagaataa

SEQ ID NO: 45718 - DNA, 975 bp, Acinetobacter baumannii
atgtctttaaaatcaaaattttctctaccaaagactttgttggcatcaacattggggtttgtatttgcttcatctacttttgccgcaattccgactacacttaaacttgattacgcctactacgcaccaaccagtctggtggtaaaagatcaaaaacttctcgaaaaagcactaccaaatacccaaattaaatgggttttcagccaaggcagtaaccgctcattagaatatctcaacagtaatagtatcgattttgcttctactgctggattagctgctgtattaagtcgagcgaatggtagtccaattaaaactgtttatgtacaaagccaaccggaatggaccgccctcgttgtcgcaaaaaactcacccattaaaagtctaaaagatttaaaaggtaagaaaattgcagctacaaaaggaaccgatcctttcttatttacactacaatcactagaaacagtaggcttaagtaaacgcgatgtacaactggtccatttacaacatccagatggcaaaaccgcattagaacgtggccaagtagatgcttgggcggggcttgatcccttaatggcttcagctcaaattcaatcgggtgccaaattgctttatcgtaatgtagcatttaatagttatagcgtgcttagcgtgaaagaagactttgcaaagcaaagccctgaagcggttgaagcagttattaaagcctacgaacaagcccgaaaatgggcaaaagccaatccagataaagtggcagcacttttagctcaagaatcgaaacttcctctacccgtggctaaactacaattgagccgaaccaactttgatcaaagtattccaacagcaactcaagcacaagcactaaaacgttctgggaaaattttgactgaagaagacttggttagaaaaggcaccaatgtcaaccaagtggttgatcagttattagatccacgttttgctcaaaaagtcgtgaaatag

SEQ ID NO: 45719 - DNA, 840 bp, Acinetobacter baumannii
atgagtgattcacttaacaaagctgaactaaatcacttcttagctcagcaggctttaaaatcacagaaaaagcatttaaaccacaaatttacacggtggtttaaagcgctactcattccacttatttttttagcggcttgcgagtttttagtcagaaatggctatatcgatgcttatctactccccgcaccatctagtttatggcaatcttttttagatttagctcatagcgacctatttgcccatatttatattagtacgtggcgtgttctattcggctttattatagggagtggtttaggtttaatttttgcgatttgggttggattaagtaaagaggcagaagcatatttagaaccaactttttcagcaattaaatcgatcccaagtcttgcttggattccactgttattgctttggttaggaattgacgaaggttcgaaaattacgcttattgcaattggagcattttttccaacctacaccaatacagttgcagcgattcataatgtagataaaaagctcattgaagttggaaaagtttatcggcttaatgcttttcagcgaattatatctattattttaccagcagcctctccgggcattttaacgggtttacgtaacagcttaagcttatcgtggatgtttatgattgcagctgaactgattgcggccacacaagggattggctatttactcagtgatggccgagaaacgtctcgaccagatattgttatcattgcaattattttattggcgctattgggtaaaataaccgataccttaatgaaacttatagaaaattggttgttacgttggcgtgatacgctacaaaaataa

SEQ ID NO: 45720 - DNA, 903 bp, Acinetobacter baumannii
atgtctcgccaatttgaccatcttgccgatgttgaagtctttttaattgtggctgaaaagctttctattagtgcagctgcaattgatttatctacaacgccttcggtcattagtagaacaattacaagactcgagaaaaaattaggtatccagttttttagaagaactactcgccatttaagtctgaccgaagcaggtcagctttactatgaaaaaatgcaacatgcttttcagttaattgaccatgctgaacgcgtggttcaaggtgaacagctacaaatttctggaaaaattaaattaagtgtacctacgacttatgggcactatcgtctaccccccttattagaaaaatttcttttgaaatatccggacattcaaattgaaattagtatttctaatcgaaacgttgacttaattgctgagggttttgatttagccatccgtcaaggacaacttcctaacagcaccctcattgctagacctttagagcaagcacctttaaaacttgttgcctcacctgcttatttgaaacgcatgggtattccaaaaaatttggaagaattaaaacatcatcaatgtattgcctttgaattgcccagtagcggcaaaataaccccatggtttttaaaaaatgataatgaggaaattcaatggataccaacaaatcgaattttagtaaaagaggatattgtgggtgtggtaactcttgctgaaagcgggctaggtatatgtcaaagttatgactttattgttaatgaaaaaattcaacaaggaaaactacaacctatacttaatacatatgcaggtcatacacgtcctttttctttgttatatgcgcagcataaacacatgtcctctgctacccgagctttaattgatttcttatgttcaaatgatgactag

SEQ ID NO: 45721 - DNA, 732 bp, Acinetobacter baumannii
atgcgttatagaattcattatattgatgtgcaaaatgccctacaaaactatatctggattttagaagatactgagactcatgaagctgttgcagttgatccaacagaggctgagttagtcacccacttttgccaagaacatcaattaactctaaaacagatttggcttacccattggcataaagaccatatcggcggtgttgctgatttaacggctaacacgtctatggcggtatatggcccaagagatgaactaagtaaaatccctggcattactcatcccttacaacacgatgatcatctaaaatttaatgatttaaatgtagagattattgcaacacccggccataccttaggtcatattgtatattttattgaagagcttaatgccctcttttgtggagatactttgtttgcaatgggatgcggtcggctatttgaaggtacagcagaacaaatgtaccactcactaaatcgtcttgctgcactacccactgcaaccaaagtgtattgcacacatgaatatacactttctaatgcggaatttgccttgagtgtagaacctgaaaaccacgcactgcaagaacgtgctgaacaagtccgcatgcttcgtcaagaaggtaaaattaccttgccaagtagtattgaacttgaactagcaacaaatccgtttttacgtgctgaaagtgtagatgagttcgctcacttacgtagcttaaaagacaatttttaa

SEQ ID NO: 45722 - DNA, 1158 bp, Acinetobacter baumannii
atgctatcggatgcccaagtaaagtcattaaaacctaaagaatctagatattcagtagcagatggggaaggattaaacatttccgtttttcctaatggaaaaaagaaatgggttttgtcttatcgccaaaatggaaagcaaaatcaaaagatgttgggtgaatatcctattatgggatgtaaagaagcacgccaactagcaagacaattaaaattagaatatcagggcaaggtcgccaattctccaccagtccataaggtggttgaggaatggttgagtatcatgaaatcacaatggaccagcaaaaaatactatgacacagtcgaatatcgacttgcatatctaaccgaggattttaaaaatcttccaattaatgaagttgaaagaaagcacatctcgaagaaaattaaagaaattgttgcaaagggtactttagaaacagcaagccgagcattaagacttggaaagcaagtatttgattttgcaattgcctcagattatacagatcgtaatccatgtacattagtagaggatgtaatacctgaatatgaatctgacagccatccttgtttacctgtgagtgaaatgccagaattctttaaacgcatgaaagcgagtcattctagctcaatagtaaaaatggccatgcttttagtttgttataccggaacccgaataacagaattgttaaaagctaggtgggatactggagagatagattttgaaaacaaagtctggataattcctgcagagcgaatgaaaaaaagaaaagaattaatggtcccactggtaccgcaaatctatgctttgtttaaggaactcgaaagcgtcaaaacagatgatgggtacatatttaaaaaacgtggaaaaccttatgagcacatgacatctgagtcggttctcacaatgataaaaagaatgggctacacagataaaatggttactcatggttttcgttcattgttttcgactcatgctaatgaaagtaaattgttccgtggtgaggttatcgattatcaaattgcccacgtgaacaaaacaacaaaagcagataagacaagtaaaatttataaccgtgccgaatattgggatgagcgagtagagcttatgacttggtatgcgaatgaagtagaaaattggattggtactaactcatga

SEQ ID NO: 45723 - DNA, 885 bp, Acinetobacter baumannii
atgaaccaaagtttatttgtcggtttttggaatataaatttatctcctcctataggaaatagatggaataaatcaaaagttgataaaaaaataaaagtttctagggtaattcaagggctcttgaaactcgattttgattttttatgtctttgtgaggtttcacctgaggatatggagtttatagataatagtattcaacttattgggatgggctatgattacaatatttatcgaaaaaattatggaggcttatattttgatacatgtgtaatatttaaaaatacttttgattttgttcaatcaaaagtagaagtcgatggtgaagaaaagaataagcttaaagtctttcaaaaatatgaatttctaagtgggcacttagaagaaagaattatattttatgttactcattggttatctcaattaaatgataataaggaaaaaagaagaacagtcgcatcatttattaaaaaagatactaatgatgaaaaaaaatttttcaataaaacgaagtttgttgttttaggggattttaatgttgaaccttatgattcggcaatattagaggggttaagaagtactagggatcaaaaagttatctctaataattcttcactgttttacaatcctttttggaaatttttacaaattaaggaagatcaaccctcaggtacccatcactgtactaaaaatgagttccatcactggcacatttatgatcaaatcttagtttcaggaaactttttccgtgatggatggaatttggatgataatctagttcttgtctttgatgataagatgattagttctttacataatgattcatttagtaacccttcagatcatttgcctatctgtctaaagttggagaaaacaaaatgcatttag

SEQ ID NO: 45724 - DNA, 456 bp, Acinetobacter baumannii
atgcatttagatttaagtttagcagttgaagagggtatgcaatcctctgtaaccagagacaaaagtattgaagaaattgataatgtattatttgaagtagaccaagcagttaagaaagcaacaaataataaagttgaatttggttggagaaaaaaagggtttaatacgttaggtttattaacgggtcttacttcacttccaattacagatgtaaaaattgaatctcaagagcctgagtcgcgtgttctctatgtttctgcaacagatgacaaaacacaaagatttgatataacaatattagtgataagtcctgatggcttcccatgtgaaatgaatgttaacggcaacaagcttatatcacatgatgctgaatccttattagagcaatttaaacccttactttctagtgcttttgttggagataaaataagaaaattaatgaaaaaaggcgcttaa

SEQ ID NO: 45725 - DNA, 993 bp, Acinetobacter baumannii
atgggtaataaatactacgatcaattagtaaataatgattctcattttgaaattacgtttaatgattttgaggagtttataacttttattcgtccagataaattacatgtaaaagatcttatgactcaattaagattggaatttaacccatcagctgttaattttcctttttttaagataaaagattttaaagggtatagtacattagacaaatcgatcatttatcggggacatggagaaagtgattgggatttaaaaccaaccttttatcgtaataaaaaaaatattgggtgggttaagacaaattggagtgtagatcaaaattatgagtcagaaattttattgaaattccaagattcctgtgatttagctggtgttcaattaccatcagataatgatcaattgagaagaagacaaaaaaataagttaagtaaatataggaaatcgtttggaagagatcagctagattggtttgatgatgatttttttgagttagctgtatatgcacaacattatggagttgaaactagattgctggattggaccaaaaatccgtttgtagctagttatttcgcttgttctcatgcactcaaaatgaattatgatccaaattcaaaattttgcatttgggtattaaattctgaaagtattacaaatgaattgaatcaagtactcgaagtgctagatccacctaaaggccttaatcagcatatttctcatcaacaaggtgtcttaacttacacaaaaaatcacatcaaaatctttaataaatttggaactcgaccatgcttaaaagatattctaaagtattatgaaagtggttacaggttattaaaaataactttaggatatgaattaatcgttgaattatttaattattgtaatattcataatttcaatgcatgtcacttatttcgtggtgccaacggtgctgcaatgcacaccactgatttattaaattttgatgactataaatatcctatagaagattaa

SEQ ID NO: 45726 - DNA, 171 bp, Acinetobacter baumannii
atgtcttggtattctttaagacaattagctaaagaactcggaatggctccaaatacttttaaaaaatattatttggagaaattcccgcctgatcgagaatccaaaacttataagggttggacatctcaatcagtagcaaagattaaagttgagattcaaggcgctaaataa

SEQ ID NO: 45727 - DNA, 216 bp, Acinetobacter baumannii
atgagtgaattagaaatacttgaatcagcacccaaagatgctacccattattttcttgtgcctaatggatctggtgaaccttattacgttcttgaaaaagaaaaaaagttctactggtttcacggtcaggatgaaataactaagccacacattttaagttggattaagtcaattgaatcactgaaagaagttaaagcggaaagtcaggagatttaa

SEQ ID NO: 45728 - DNA, 210 bp, Acinetobacter baumannii
atgagcataacacttagcggtcatcaactaaaaagccttctcgaatttgtaaatccagatggtgagaaagatttagatcaacttgatactgaactaacaattaaattctttgaagatggccacagtggaaaaggctattacttttggatgaccgaatatccagaagaaggtgcaatgaagttggatattgaatcgggagctgagggatga

SEQ ID NO: 45729 - DNA, 510 bp, Acinetobacter baumannii
atgattttttatgaccgtgctttttttgaagaaaatttcaaaaaaactgaaactttcaagcaagaaagcaatattcgaaaaaatgacattcttgtatttagtgaaaccatgaatggctattttaatatagtgacaaataaagcttggttactttggaaaaaggaaatgcaagctcatgctgattggtataaaaatgatgacccaattgcatataaatgggccaaagatggaagccctgaatatgaagctgacttttatacaagtgcaaaagcttgggctgcagcaaaagcccaagctgggcccacttggatcagcgtaaaagatgaagagccacctacagacataatggtacttatttgttgggatgatgcgccagatgttactccagaacaagactatataactattgatgaagatctaaatagtgtatgggcaaattattataatgacccaccttctcactggatgcattttcatagtgtgccaaacgtatcgggagctgaacaatga

SEQ ID NO: 45730 - DNA, 537 bp, Acinetobacter baumannii
atgattaatttagcgaaccaaagagaagctttaattgcagaagtagaagtttttaaaaaagacagtatggagctatggtttgttcctgatctcgcagcttcttatacaaatcgggactttttttcttattccataatagaagataaccaagtcttttttatgatcgaacaaactcgacaactgtgggaattctggaataaagccaaggatcataatttgcctaaaggttcagttctaattgttgaagaccaaattaaaactatgtggcaagacaatgaagagcctgaaaattgcgtaaataaagaaaaagactttaattgtttgggtgattgtttagacattgaagatatcatttcaatcacaaagcaacgctatgcatatatctcagccgaaaaggtctacggtacttgggtagctaaatttgaggctggtgaactgaaaaaagattatttcttcgttggtagtcaaaaagaatgtgaagaaattgtcgaaagtaataaagctctttattcaagcagaatgggagctaattcatga

SEQ ID NO: 45731 - DNA, 720 bp, Acinetobacter baumannii
atgcaagagcccgttaaagcggaagcaatttacgattttacatctttaaatgaatctgattttttgaatcaaagtattttaataaatgacgacaaaacctatagaggaattagatttcatgattatgatgtaggtacaaaattaataggtgcagcgagtatcgaatcaattcagaaggttgataatcatactttggctttggcatcctcaaggccattaataaatcaaaaagctggtttatatggggtactggcaaataaagctaattttgatggtaatttagttgttttagtttttgatccaaatgtacaagcaagggttatagaaggcgacataattgcatttaagggcactgttgcgccgtcagacgtttttacttatacaaacccaaaaactaaccaaattgaagagttaccaattatatatgttcatttttatcaagctggcgaactatcaatacaaggtattaacgattatttaaaaaaacaattttctgaaattcctaaaatcattcaagacaaaattctccaatatgaaaagctcaatgattcatgccgtggtggttcgggtgatgacccaaaaactattgaaagttgtgaagaaagagatactttatatgtcgatattaaaaatggcggatggtgttggggctctgaaaacgagaatgctgcaggaaatgatttgaattggctaccatgtactaaagatagatataaataa

SEQ ID NO: 45732 - DNA, 399 bp, Acinetobacter baumannii
atgtataaattcatgagaattacttttttaattatgagcacgattacttgttcagttacttttgctggtatagataaatgctcaaatttgccaaatcaatcggctttaaatacttgctcatcaaatgttttgaattctgcaaatcagaaaattaattccgtttatgcaaattatatgaaagagcttaacccaacagagaaacttcaattaaaagaggctcaaagagcttggattcaatacaaagaaaaagattgccaatttcaatcttcacctgttttaaagggctctttatatccatttgttcataatgcatgtttagtagaaaagacagaaaatagaattaaagaactacaagatatgcaagagtgtagatcaggtaacgaacctggttgcttataa

SEQ ID NO: 45733 - DNA, 741 bp, Acinetobacter baumannii
atgcttattgaattgtacgatcaactaagaaaaaacttaatagaaataaatgacttttacttagaacaatgtcagctcaagcttttgaatcaatttgataacatctctcaagaagctgatgaatatgaagaaaaatggcggactgaaaaagagagccattacttcaataaagatccatatgattcctcttcattatattatgattcatatgatgcaagtattatcttttatcaaaatctaagtgatcttcaacagaatgtcagattttcagttattgcgggaatgtatcatagatgggaaaaacagtttcgttcattcctacataatcaatccagatggtggggatgtactcatcaagtcagaaatgaaatttggactctgccagttaacaaattatttatgctttttaaaactgatgaattcgatatcgaaaaacaagagttttttaaagattttgatgcttgtagagtaattgttaatgtttttaagcatggaaatggaagctcatatagagagctgtgtaacaagtacccattttatttaaaagaaaattatcatggtatggaaaataatccgttgccttactttatatatgaacctacatttaatattacggatgatgacgttgttaaattttcaaaagctattagtgaattttggcgcaaacttaaaaatattgagaatgttgaagatcgagaggaatggttgagaaggacgtttgaaaagagaaagcgaaaataa

SEQ ID NO: 45734 - DNA, 945 bp, Acinetobacter baumannii
atgaagtctagcaatatttctaataccgtagacttgttatcttctgatcgattaaagagttataaattatattttaatttaaaaaataatgaggagtgcataggtgtatacctttggaatgatgcgctctcaactgctttttttaagttgttaagtatttttgaagttgcatttcgtaatatggtacataaagaattatcgtatctttatttttcgcataaaaatcaaggacacatacatgataatgattggtacatgtaccttatggaccaaaatatactaaacttggaaactcaaaaaatattaaaaaaaatgactcataggaaaaagaaggttaatggaattacgactttagttcctaaaacacaaaacattccaactccaggtaaagttatagcaaatcagacatttggtttttggattaaacttattgaattacatccttctattgattggcctgaagttttctttaagggttttaaagatcattttgctgtaaataaaagttattgggatacaaatgctatagacgatttgattattcggttaagacaggttctatctttaagaaatcgtattgctcaccacgagccattatggaaatttactgagattcttcatgaaaaatcaaaagtagtgatctatgaatctgctactaccccaagtgaaagcatttcaagaatgttgaccttgaatcatcgtttatgccggttaataggttggatatcaaaagatagaagggatgactatttatcatcaagttataaaagacattttgattggttctgccaagaatcaactatcgaaatatataaaaattattcctatatgagagaactgccattatcaagggctaagagagagttccgtcgtcttttgaaaatttcatgcttaatagaaattaagcaccaacatggtggaatagttatttctagaggtttttag

SEQ ID NO: 45735 - DNA, 201 bp, Acinetobacter baumannii
atgactgacttaatcgataaggcacaagaaagtgctgattatttattgcagcaagaaattgcaaaccgatgccgttttgaaggcgaatctgaaaaagaatgtgttgaatgtggtgaagaaataccagagcgccgccgtgctttaggtggcgtgaaattctgcattgaatgccaaaccaagttagaacgcaaacggcgctaa

SEQ ID NO: 45736 - DNA, 1992 bp, Acinetobacter baumannii
atggctttggcaccattaaaagaaattcccgaatggtgggaactttgtgagcgttatcgatacgacatctatgctttcgccgtagaagcattaggtgtcgaacccacatggcaacaagaattactttttgaatctattgcatttgatggtagccgtacttcagtagcatcggggcatggttgctttggtaaagggactttaatcaaattagccaatggggaatttatcccagttgagcgtattaatctaaatcataaaattcttgctgcagatggtaagacagaactagatgtaattaaaacagtaaccggttatcaggaaatgttccggtttgaatatgagaatggtaaagctcatacattcaataaatcacatattctttgcttaatttctttatacgatggtaacgggtggtcaaagggcgacaagattgaattgcttgtttctcaatatatgaaccttaaacctgaaagtagggaacagtttgcatcttataggcttatagatggggaacataagcctttaaaaattacatcggttactgagctaggtgaaggtaaatattacggttttgtactcgatccagatccatttttcttgggtgaagatgacttagtacttcataacactggtaaaacggccagtgccggtattgttgccttatggcatctcttgttttttgatgaatccatcatgatgtttactgctccgcagattgggcagttaaagaaacaagtgtggaaagaaatcagtatcaatctagcacgattgaagcaagggcctttggcttggcttgctgattatgttgggtaccaatctgaacttgtatacatcaaaggctacaaagaaaaatggtatgtctttgcgaagacagcaccaaaacatcaacctacaaacttagcaggtaaccacggcgataactacatggtctgggtcgatgaggccagtggtgtagatgatgccgtacttgatgtagcatttggtgccttaacgcacgaagacaaccgtgcagtaatgacctctcagcctacccgtaacgcggggatgttctatgaaactcatcataagttaagtcatcgagcaggtggggtatggattgctctcacatttaatggtgaagagtcaccactagttagtaagcagtccttagaagaacaacggcaaaaatacggaagcagagaagatgcccagtataagattcgtgttctaggtgaattcccagacttatcagacgagttcttaattaccaagcgtcaaactgaagaaatgtatgttggcgccagtatttttgatgaccatcaattcggctatgtcattacggttgacgttggtggtggtgtcggccgtgacgattcagtaattgttgtttctaaagtttggggtgaatcgcaatggggagagcgcgcacgccgtgtagaagttgtagatattccattatgcaaaaacagagatgatatcttagaactatttgcaaagattaatgagctacttttacagtacccaaatgctaacttagttgtagatgataacggggcgggtaaaggtttaggccaataccttaaaaagcaaggtattttctacgttcctgtttattggggctcacaatgttttagtaatgacaatagaaaagagtttacaaataaaaggtcattagcttatgttggcttagctcgagcaatcgcaagtggccgttttaaaataaaaacgaagaaacacaatgtgaaaattaaagatcagttaatccacgttccataccgttttgatgactttgctcgttataaaatcttaagcaaagacgaaatgaaacggatgggaattaaatcaccggatattggtgatgcttttgccttcttattcttagaaaacgttcattacactgaagcttacgaaactgtaaatgtcactgacgatacaccagaaggccgtgaacaagctgaacgtaagtcaagattcagtgctttaagagaagctgccgaaaaagaaaatgattag

SEQ ID NO: 45737 - DNA, 279 bp, Acinetobacter baumannii
atgagaaatgattatcgaaatgctattagagacttaattcaccggaatcttcaacaaaataatattcagaatctgattgtttgggaaatcaaagacgatgaatctcaagatccatcactgttgagtttgaaaatatatggttcaagaaaccatattgatgcagtacttgtggcgtgtggtgtgaacggcgtttgggaaaagttacctcttaataaggtggcttttccaaggcttgttgatcttttaagacttcaaaaagaatacttgcaggataattaa

SEQ ID NO: 45738 - DNA, 1131 bp, Acinetobacter baumannii
atgtcagcattcaagccagatgatttacgccgtgcccagctgcaattaaaccagtctttgcaaaatggtggagttcgtagagatcaacagagccgccagcgtgcagatagagaacagcgggcatttgcagaaaaagaaattgaatatgatgattggggacgaaagatccctaaacctatgttcttgcgaccacaagatattgcccaaggggaaaaatatgatgtcgaaagggtactttttacaacattaggtcagcgaaatggagaagtaccacggcgtattacccgtgatgatatcttggcatttcaggaaaacattcaactattaaaagatcagtatagtaagggtattacccctcaaaacatcattaatttaagccgacaagacgatattgaccgggcaaatgagcaaatctatttggcggttccagtaagcagaaaagctggattagtgcacttacttacgaatgccggtccaaatagtaaagtcttaaatcatcacgttgagattgagttttcaaactttaaatctgtcgtatttgatatcgacaagcaggcattaaccactgttaaaaaccgcttagctaaaggcaaaatcaaatttcagtgtgactgcgaacgtcatacgttctggtaccgctatatggcaactattggcggctacaatttgggacgtgatgagggcggctttccgaaaatacgtaacccgcatttatccggtgtggcttgtaagcatgtattgcgggttgttaagtggattagttcaccagcagggattgcctaccttaaaaaggaagtagagaaagaccgtaagaaacaagtaggtgcacggtataagcaaacagataagcaaatacagaattcaattaacgagcaagtaatggatttgatgaatggttctgttaagccaatcaaagccaatatccaaaaagcagaaaaagaaatgatgcgtagagctgataaagttgccaaaaagctcttagaacgcgaattaaaaaccctcaaacgttttgaagtggaaactgttagagcaagtcaaattgaaagaattcaagccttacataaatcaggcgcaatcgacaatgacatgttaaatgtctttatgaagggtttaagtcgaaatgctaaatag

SEQ ID NO: 45739 - DNA, 549 bp, Acinetobacter baumannii
atgctaaatagatcagtaaatcaagttgcaaatggacgccgtttagcagctagacgtgttgtgatgaatgctctagcaagtattcccgcgcaaatttggcgaaaagaagtagttttcaataatccggctgaagattcaaaacctttagatcctctttcttttgaagcgaacactttatcgattcaagacgaacccaactacaagtatgaatataagggcgctgcttatgttcatttcgataaatttaatggtggttatattcaaaagaacttctcaatgaataacccatctgacttggtgctaaccgctcaagtagagacattcaatgaagaattggatgatgttttggaaaggataatcaacatccctgacttgattcttaaagaaggtgatcttttaggtttaatgatttatgaaaacctaatgttgtggtttgagattgtaaatattactggttttagcctcatggcagattttggcagtaagtatgttttaaaccgtagagatgatttgtttatttcacctataggtgatggagaaactaaatga

SEQ ID NO: 45740 - DNA, 303 bp, Acinetobacter baumannii
atgagctatttaattttcaatgaaaaaggtaaaaagacaggcgacattgaaatggctgaacaatgtacttctgcaatattcaattaccaggtaatcgggaacggggcagaagtagagtttttcggaagcaatattccatatgcagatccgcaaaacgattctcactgggtgtctattcttacattaacagctgctgcgcccgatactgaaccgtttagacagcattgctgggataagctccgttataaagtgaaagcaggtgataatgtggagatttatgtttcaagtggtgtaagcggatag

SEQ ID NO: 45741 - DNA, 1779 bp, Acinetobacter baumannii
atgactgtgttaacagaagaaattcgtaaaaagtatgatgctcaacaactagctactgttcagtgccgaaattactatttcaaaagtcctgaagagcttgaaaatgggtttgacagtgctcaaacagcggcagatgagtacccagaagtattaaaagcaatttttgattcaattggtatcgaatatgcgccagaagttgataaagctgtgatgtttggggtatcacaatatcaatcacgtcatggaggtgaattaccacatccttcaatcattgcagctgcattaactgctggtttaagtggtgcgaaacaagcagctgctttgcctgccgagacccttagctattacgatagtattaatgaatctggttttgatgatgtaaatcaccagcatcatgaatctgtaagcatcgttccagcaattacagttgctactatcgccaacgttatcgcttatgcaacacctatcgttgctatgattcccaactcaaatggctcaaatgaagtaccgattgtatctattcgctttatcaccaaccgtgattttggtgcaatgaagaaatcagaatacttagatggtgcaaatgcttctaagccttatgttgaaggacgattccgttttgcattgtctaatggtggcgcaggtgcaacttatactgtgactgcacgaactggttatgaagacttcaaggctaaaacacctgacgccaaagcgagtttattgccatttattgcgggtaatgtatctattaagatcaatggtaaagaagttgcgcatactcgaaatcgcagtaaatcaaaattttcaggcaagatttctgctattgctgagaaagacgtagtagtaaacggcgttgaatatcgtgtagttggtagcgaaattgacatttcagctagcaaaattagcgtgacattaaatgaagcattaccagctggtgcgaaaattgaagttcatcttgtggcggattttgatgcgcgtgatggtaatgataactatctattaaccccagttggtgttgatttcgaacctgaatatgaaacattgattgcgtcacctatcatggcacgggtaacagcttcaacactattacaatctcagttaactaacgaacttaagcttggttttctgggtcaggctttagcaattgttcaaggtaaaatcttcttagaacaaactgtacgtttattaggtgaagcaaaagatttagctgaatactccgctcgtgaagttacttttgatgcttctcgtggtgtgactggaaaattagcagctgcatttaatacttcaggtgacttgtttgcggaagtaaataaatttattgcagctgccaaattggatattaaccaacgtactggtggctctaccgtagcatttgacttatatgttggcgatactgggtcagtattctttaatcaactgtcaagcgacaagatgccagttaaaaccggatacactgctggttatggtcaaattgtccgtattggtactcttgcagatggtacaaacgtttaccacgcaccgacagcacaagagcttgtagctgaagcagatacagcgtttgatatgcttttagttggtcgtggtaatgagccaattcgtgcgccgttcgttggctttattcaaacgcctctttcagttattgaaactcgaccagatgcgcgtgaatcagtacttactttaatcggtgctcaagcagccgaaatgaacccgttagaacgttatgctgatcaaagctatgtcatccactgtatcaatatgccatctctcaaaaattcgtaa

SEQ ID NO: 45742 - DNA, 627 bp, Acinetobacter baumannii
atggctgctgcaacacaaaacactgacgaaactttagcttcaactgacgaacaagcgactactaaacaaaaaaacacacgtaataaaaccaataaaactacagaaacacagaatacccaagctggtgatgaaaaagcttcagaccaaggtgatttgttaaatagccaaggtcctgaagacggcgcatctcaagatgaaggtaataaacctactgatttgaaaaatggcgattcagataatgaagagtccaatactcaagaaaatggaaatccaactgaaacatcgaatgattctgtcaaaccttcaaatgatctagattcaaatggtggtaagtctggtgatgatgtggggacggaatcggatcatgtccttaaagaaactgatacttctaaagttaatactcccattacggatttgttaacagtatcaggtgggagtagcgtggatccgctagttattaaagttactaataacggattttcaacagttttagaaccgttatcacgtgttgctattgaggcaggtaaaacagcaagtattacgtgtcataaccaaacatttaaacatcaagtactggaaaacttacgtcagttgaaggggcttggtaagaatctaactgttgagtaa

SEQ ID NO: 45743 - DNA, 288 bp, Acinetobacter baumannii
atgactattttcattattgatggcacgaacccaattatggatgctgttggtgatcatcctactgaacgaagtattacacttcaaaataacggtttaagtgacattaccgaaccatttacgcaagttttggtacaagctggtcaaaaggtcacattcactttgatcggtgacgaagctcataaacaattgctagataacctagatcaaattaatggcttgaaaggtaatgtacttcaaattgtacctactgaggcagaagagcctacagaacctgctagcggattataa

SEQ ID NO: 45744 - DNA, 1296 bp, Acinetobacter baumannii
atgaatatacttgctctatcaagtacaggtgagctatcccttgtagcaggggccagcccatcactaaaactggaatttgatactcacagttatcttgcaaatacagaaatcaatgtggccttttttgcgaaagtaactagcccacgcggtcctgcagatatttctatgcgtttggaaatccgtgatgcggtaacaggtgatcaaattgttactgttcagggattagtagatggagacattgaaaattctgcttctattgtcgctgtagctgatgcgaaagaatattttgagcgttttgatttatcgttaggtattgatgcgttacaagcaatactcaaatcaaatgcttataacgaatcaaatagcttaggtcgtgcttcaaaaacattggcattggaagatgaatcgttaccatcatttaatccagatgaactatataagattctgacgagtcaattaagtacaccagcatatctgactttaccaaatcctcatgatttaccaatttatgttgcggcacaacgtgcagctacaaagttacgtattcctttggatgctgaaatcaacccaacttttacagctgagcaagcagctcaatttgcgacaagtgtagatgcacaatcacagtttgttcaattcatttggagtccgaacctatgccgtccatctggtgctgtcacactaagagggcgtaaggtcccagcttattatttgggccattacatcggcgataaattattacgtaacgcaaagttaaataaacaaggctttgcgccgttaaaaaatgcagtagcttggaaagattatccatttacagcaaaaaacttaagccagatgccgaatattgatcttgaagatgaacagactcaagaaatgttggcaaaggctaaagtaaatgtagttcgcccagttaagtttgaaactacattattcgttttaagtgatgtattaacccagtatcaaagtaaaaatagtgcattgcgtttagttcctgcagctgagattgcggcacgagttacgaataaatgtatcgaaatccttagaacttacatgttccaagctacaccggactatatcaaaaaagctggtgatgaaattcaagagtttttagagggtgcttctagtgaaacaaccggttggttacaaccggctgaagatctaggtggtaaaccttttgagttcagtttaatacctgacaaagactatccatatgagcgtgtacgactctatttagcccatggagttgttggtacaactcgtgccgcaatttttgatgacgacgttttagttaaataa

SEQ ID NO: 45745 - DNA, 768 bp, Acinetobacter baumannii
atgaatccatttggcccaactacagaaaaacctttagctttacgtgcttttgattcagcagcggagaatatttctaccgttgtaagtaaggtttcaagtactgatcgagaacagcaatctgtgattgaacaagtacgacaaattgctctgaacattctatctgatacggtagatacaatcagtgaaggtaagcttgaagaaggtgaactgggcgttgatcatttagacgcattaattgtcgatgcattagatggtgcagatgatgaagacggtatctatgaaaacgctttgatggcgtctctttccgatgctttcttaacatttggcgttgacgctactgatattgaagagatctttagtgatgatacagaagttgctgatgcggcgttagaagcagcagccaatacagttcttgctaatatgccagacgaaggccctgaacttgaagaactggttcgtgagtttattttcggtgaagcagatgaaactgaagaaggtttcgattcaatggctaaaaaaattaaagctcgaaatggagcatttagccaacggaaagtaaatgggcgaaaaattcactaccgtggtgtgctggctattcgtcaaggtgtcaaaaccgttgtgaataaacgattacctggtcaaaaggtccgtttaactgcagcacaaaaagctggtatgaaaaaagctcgacttcatgcttttactgcaaatgcaatcaacaagcgtttacgttcattcaaaaaaggtaaacgcttaggtatttactaa

SEQ ID NO: 45746 - DNA, 279 bp, Acinetobacter baumannii
atgaatacaactcaaatcataggtgaagcgcctggtattcaatatcagaaaaaaactgataaaacagaaataaagaccaatcaatcattaactgacacaattattattggtcgttttatgcgtgggcgttttgatgcaccgatgacaatacataagggtaatatccgtggtgaacttggttatgaaccaaataatcctgattatcgttgtgtccaagatgcgctagatcggggtgtaccttcattacaggttctgcgagtaccaccaaatattggataa

SEQ ID NO: 45747 - DNA, 897 bp, Acinetobacter baumannii
atgactactttaactcaaatcaccgtacctttccacaatgctgagttgtacttggtggaacatgatggtcagccatatacacccatgaagcctattgttgagggtatggggttagcttggcagtctcaattagcaaaactgaatgccaatcctcaacgatggggtataacgaaaatcgttatacctactcttggcgacttacaggaaatggtttgtctaccactaagaaaacttcttgcttggctcaccaccatcagtcctaacaaagtaaaacctgaacttcgtgacactgtcatcatgtaccaaaacgaatgtgatgatgtcttatggaattactggacaaaaggccaagtaatcaatcatagaaaagctatctcacctgaacaacagcatgctttacatgcaatcgtcgatcgtcgtgcaggaaaagatcgaagtttaagagcctctatgtggatacgtcataatcgccactttggaattgctaaatatagccaattgctttcaatccattttgatgatgcgaagcagtatcttgagacaataccacttcatgagctaggcccaaccgaaacagatacacttaaacgtttagaaaaatttgtagataatctcgctgcacggtatccagcattagaaaatccgctagcttatgaaatagcacagcatgtaggtgagaagctaaagtatcaatctcccaaaggtccgaaaaacttctggatttcgattcaggaaaacggcgctctttcagtacagcaatattctctacaccacacgcccattaatgtcgtgcaactacgcgaaaagtttaatgggctatgggagtttcttcataaggatgaagtacttgagcttggcaaagtattaaaacgctttccttttgaacctgtgaactga

SEQ ID NO: 45748 - DNA, 252 bp, Acinetobacter baumannii
atggttgaaaaaaacaatgtcgcaactttgcgagagcaagctggtatgacagtttatcaattagctaaacaatgcggatttatatcaaataatcatgtgcttaataggtatataaaagatgcagaagcaggaaaacacatcagtgtttatcgtgccttactcatttacaccgaactaaaaaaagctggtgtatgcgagaagtttgaagatgtcttttggcttgaatgtgatgataaagatatcgaaaactaa

SEQ ID NO: 45749 - DNA, 288 bp, Acinetobacter baumannii
atgagaaacgtcatgaaccacataatccatagtcgatttgtggctagtgtttctgaattaaaaaagaatcctacagcagttgtacaaaatgcttttggcgaagcagtagctattctgaatagaaataatccagaattctactgtgttccggcagcaatgtatgaacgcatgatggatctaattgaagatcaggaactaattaaactagccgagcaagttgatactgacgaaactgtgaaggtatctattaatgagttacgagctagagttctcaaaaacagctcttaa

SEQ ID NO: 45750 - DNA, 267 bp, Acinetobacter baumannii
atgagttacgagctagagttctcaaaaacagctcttaaaaagtttgacaaacttaacccacaaatcgctgagcagtttattcgtaagctggaagcaatcctagataaccctaagataccgaagaataagctgagaggatcagttgatctatataagattaaactgaaatcagcaggataccgccttttatatcaagtcaaggatgatgtagtcgtagttcttgttcttgatgtagataggcgagatgttatctataaacagatgtga

SEQ ID NO: 45751 - DNA, 645 bp, Acinetobacter baumannii
atgcaacaatctaatccgattttactaaatcagcttaaacaagattacattgctctacagcaacttggttcaccattattagcgtgtcaggggatgtttgttcctcgtggcatggaagaccttcgcttcttatttaaaagttgcccacggccaattgtgagtaatgaagatccagcagaagttcaatatgcgggtggatttactggaattgttgctggtcccccgaaaacccattacacaggcaaccttcaaatcctagtaactgaagcagggcatgatcaactattagctgaatatgtcgtagctagtggtggaatcatccatggtgattattacgatggccgtttaggtagttttacccgttcttatgcacttgaaaactgtgctatacgctttgagtcagctgagtatgattcagatagccgatctcaagttatgacagtttcttgcccaatcgactataactactttggtagcttcgcaaacattggtaccaacggcagtattcagccgggtaaaaaagaaattgatggtacagctgaacttgtgaatcgcgttcagcaggtaatcaatactgctcaacaagctgtacgcaactcaacgattaatgcgacatcacgtacattaggcaatcttttcgggtaa

SEQ ID NO: 45752 - DNA, 10359 bp, Acinetobacter baumannii
atgaatggtttaaaacgtgcaaagattttaagttacaacgcaaaaggtcgtactgcacaagtacacattcatggtttaactgatggcgcgagtgaaggaattacagcaacttttgcttatccagtcggcgatagtgatttagatacagaaattcaaattgtggatggggaagacgtctatgtcttctttgaaaatggtaatgaagaacgtccagtaatccatagttatgtcagtcacggagacggcgcgattgtaggtgtgcgccgtattcgacaagacaatattgaatttatctctaaagaaaatttaaaagtagattctggcacaaccgtttcgatcaaaacgccgttaatgaatgtacaagctaatactcaacaaactggtaatagcacattaacgggaaatagcactgtagtgggtaatacttcagttgcgggcaatagtgctgtagcgggtagtatggcagttggcacaacgcttacggttgcaggtgtgcctattgaccctaaagctattgagggtgcatttaaagatgctcttaataaattagaaagtttaaaggaagagttaaaagaacaaggcgaaaaaattgatgaaactaaagatcaagtaagccaagagattgatgaaaaaataaaggaagtagaagaattaatagaaaatattaaagattctgatgcttttaaattgcttgaagaaggaatgaaacattttgatgaggaagttcaaaagattcatgaacaagttaaagaagttaatcagatcgctcaaaataaagtcgatgaagttcgtgcttatatagatcaagaaataaataatactaaattaattgtagatcaacataataatgaggctaatctacgattggatgaagccaatcaacgtatcgatcagtctattcaagctaatgaagcattggttgctgatgctcaacaacgtgcaattcgtgctgagaaagaactcgatgataaaatcggttttattaaaagtgaaacagattcaatcattgctgatgtaagaagtgattcaaatgaaattcggttagtcgcagaaaacgcaaaaaaaattgcggatcaagaagttctggaccgtaaaaaacaagcagctgacacactaaatgttattgatcaaactaaggccgccttaaaacaagacattgatcaaaacttagttaaagctggtcaaatgattgatgacgctaaattagcattaggtgaagaaactaatacactcattaatcaaaaaattgaaccggttgtaacccaaactgaagctgcagttaaaaaagttgatcaagttgcagcccagtatgttgaccttgataagaaagtcgattcgggttttctagctgaagctgaagcacgtgcaaatgataaagaggcattaacaaaaagttttgagcttaagtttgctgaaatgcaaactgaattgggtaaatcaaatgccctaatttcagaagaaataaaaacccttgctgctcaagatagagcttttactgaacaaattagtactgcccagtctcaaattggtgataacaaagcggcaattaataatgttgaacgtacagtagttgatcttggtaaatctgttgctgaaaagactgatcaaattcaagcaagtttagataccactaatgcaagcttgttaaatgctactgagttagcgcgaatgcaatcacttggtaagcctttacgtgacgatcctacatttctatctgggaatggggggttaagcgcatatgttgtaccttcaggttcaacgtttactagacaagctaaatctactgataacccagtaaatagtacccatgagatgctattaagatccactgtttctctaggtggtggctggtatccgactgttccaactcttgttgctgctcctaataaaacgtttttaataaaacaaattattaaaatgcctatgggcacttatttattaccagttggcaatgctacaggtacaggtggttatttacgtgtacttgggaataaggaaggaacaggtaagtttgaggtttattactctgttgttcagtgtggctatgatgcgcctgcagctatccatgggcatttccgtgttattgctggcactaatccacctttaccaagcacagcaaacccagtggatgtaatccttgccgattatgaagtctgggacattactgcacttaatgacaccattccaaaagcatggcgtgatcaaattactggaaatgcttcatatatcgaaaaggttgaatcatctgtaaaacttgttgatgaaaagcttgtttcagaagcaaaaaaacttgaagaactaaaaaccgactataattcgaataaaactaaaacaacgtcagatttagcaacaattgctcaatcagtttctgatggtgataaagccttatctttacgcatcgaccaaacgaaagcagctctagaagaggctgatcggaaatctaatgcaaatattctagaagttactgagtcgctcgccgaatttgaacagtctactacttcaaaatttagtgaacttgatacaagtatctctaaagaaaacttaaaggtacaaggtcaaattactgatgttcaaaaaagtgtttcgaccttagaaagtaatacaaatacaagaataaatggcctttcatcatcacttaaaactactgatgatattgctaaacttgctttcgataatgcagcagaagcgcagcaaacaggtacaacggcggtaaaagctacagaagcactttctcaaaatttattaagcctaaagtctcaaactcaagtaacgtcaggggttcgtgcagtcgtaacgtcaaaaggtattgacgactggacacagtggcgtaccacaggtgaagcgaaagtaattcaagatgctgatgcattaggtggttatattcttgagcttgggaataatgccggtaatgatgaagcatgggttcactggaacgagttccaaaaaattgatccaaataagttgtatcgagtgcgtgcacgcttccgccgtgtgcttggggaaactggatctatttatcttggtgttgcatgtaaaaatgcagaccaaagtaaatatgtaactactacaaactcccttgcaggagatatgggttcgtctaactacttattgtcagccattaaacctaatttaggtgagtggcaagaagtagttctatacatgaaaggtaagtctactggggcagcaactggtttagggacaattgaaaatccacgcacattcccagcacaggctgaattttatgccccaatgtttattgctaactacaactttcagacaggaatttgtcagcttaattacattattgttgaagataacaactctttagcttctgctaatgatgcaacagcaactgcaaatgatttattcaaaacagcaactaacagaacagaagctgaagctgaaagaaccactaagcttgaatcaagaatgcagaacgcagaaacaggtattctgagcaatgcccaagctttatcgaaaacagctacaaagagtgatcttgaaagtgccatggggcgtgtggcgactgatattacagctgcagtgaataacattaagattggtggtgttaacgccgtagccaattcagaagcacctcgaacatccacagcagcaacaagccgtgaatacttaatgtatgaacgtagcaaagagttgaaagctttttatgatgaaaatttagataagccggttacgatttcatttgaagtgagtgtaccggttgctggaactgtacaagtatattcatctaatggatcagctcacttcttcacaacttctgttacagtcactaaagcaaatgaatttcaaaaatttgaagttaccgtgtttcctaaattacacactggcagcacaaccgaatcgactattgagttttacggtacatatggcactggtcgaattccaacaattcaaaaattgcagatcgaagcaggtaataaagctacagcgtggagcccaagccctcgagatactcaaagttcattaaatgcaaatgcggaagcgattaagcttactcaagctgaagtgaagaagcatggtgatagtttatcttctcaaagtttagatatttcaaaacttagaaatgatctaactataaccaataccgaagtaagtaaaaaagcgtcaactgaagcattacaaactacaaattcacaagttactgaacaagctggtcagattaaagctgttactgaacaggctaatactttatctgcaaatcttaacaagtccgcaccggctggtacgaacttgttgattaactctaacgtagttggaaactacgatggcgtttcatatcctcatttacgctataagcttggtgaagactgggaagtaggagcaaagtacactcttctttggtgtgcagagcatacacgtggtgctggtgacacaaactcaaatttagctgtatatgctggtggaggaagtcagtttttacagcaggttattaacacttcaggtaaggtaataagcaaaattacttttacgaagacttcagctggtaccgccaaagaagttaacttttatatgcttagcagaccaactgcagacaagcaaagtgttggtactgtgtattgggctgtgttagttaaaggggatttcataactacagataattggattgcaagtccttacgacttcaatgcagcattcgatcaagtatcagcaaatttaaatgaatttaaacaaacgtatgttactgaaagtactgctttagctaaaaaaactcaaaacttagaatcaacaattaatgatcctgtaaatggtttggctgcacaggctaaacaaatttccgaccggatgactaaatctgatgttgatagcgcaatatcaactgcgaccgaagcattgaaaacaagtatcggtggtaagtcttttgacaacatcgttatcgggggtaatgtcgaaaaaagtaaaacgggtggttatttacaagtatcatatcccttagcaaaaagtttaaatgcacctggtattactgttaccgtcagagcaaaagttacctttgataatggagggaacaatgcagccaatttgcgtgtatatattggcggaggtaatgtatttaatgcagatgcacctattttttcagctagtaaagatatctacgaatttaccttaactacaatttctagaacagacgcaactgttgttaatttttattgttttccaaattcttcagcaaatgctaatgccactactacagtgcattgggtagaagtttatgaaggtaataataaagcgttaaatgataaggtaagtacttcaactctaattaaggattactcttctaaagcagatactgctcaagcaataacttctgcaactgaaacccttgaagctaaatttcgtcaaaaatttggcgatttgtggactaatagttcagcaacactagatagtactcgctacaccaaaacagaaactaaccaagctattgctgaagagagcaaaattatcaaagctgctatttcttcaagtggtggtgacaacataattaaaaatggtgatttctcaagccctttaggcaccttaaattggcgtcaaaattctgctgtggcaggtaatctacttgaagtttataaagattcaaaaggtgctacttgggggcactttaaatctactgatacaactacatactttaaagggtttattgaaactctgacattggcagatggtttagagatgaatcagaagtacacattgtcatttaaagcaatgtcgttgacagctgcacagactcaaattttattaattatacaccgtcgagattcatcaggtcgtaataaccaaattggtactacatggaataacatttcgactgataaagaaacattatgtacttatacctttgatacaaatattattaatttacagcatattaacttaattttatattcgcaagtaggttttgctcctgactttttaattagagaagtgcaacttgaaaaaggtgagttagccactggttttagaaaaaatcctcgtgaactaattaaggatcttgaagctaatgcttctgcaattgaaggtactaaagctgatgttcaaaaaaacggtgaaaagattacttcacttgcagagaattatgcgactttaaaatctactgtagacaataataaaactgctgtagatggtaagtttcaggaaattaattcaactattagtgataatcaacagaacactacacagtctattaataacttggaatcaagttataaacaattaaatcaggaccttggtcaagttttcaattaccgtgtttattcatgtggctggaatggctttttcacagggattaaaaacttaaaaggtgaaatcaaatcagtagcttcagcacgtggtttttcagtccatgttttagcagctgatggttctatagcttcttcaactagatatgatacttatgcagctgtagcaaatgctacggcaatgagtaacgctatttctgcgattccaaatgacacctttgttatcgttacaaactacgacagtattggtgtaaacctagcaccagttaagaatgcattaatttcattaggtgccaatccattcacacttgatcaaataacgggtcgggatgcatacattttagttggtcagaaggggattggttcaggtcgtggtatagaattgcatgcaacaccagatactggaccaaatggggctaagcaaatcatgcttgcaatccaagtagttagtggtatcccgattggtctggcaaacaatagtggaaacttacaaaaggttttagaaaaccacgcacaaattcttcaagaaaaaattacaagatctgatgcgaaagaagtatttgctgaggaaatcaaagtttttaaagcacaacttgatactttacgttactcagaagagaactggattttacttggtgatgatactaaaaatttaagtatttctactggtacaaaccgaactgtagctgtttgggaactgcaatataaacacaaggaaattccaattgataaaggtgatccaatagttgcgagaatcaaatacacagcaactgcaggattagttggcgctacatgtagtattcaatttcatggtgcaacttatagtgttgggttaccttcgtttgttgtagctgcaagtggtgaaatagaacttactggtattttcccaaatgatttaaaagcctctgcttatgaagctattccactaggtttacggtttgataatgctccatctggtggaacatttactgtaactaatatgtttatcagccgaggtaattcagcgccaaattttaaaggcggatttagatcatctctaaaacaaaatgctcaatttgttgaagatacttttatcaaggctgatgttaataagggagttatagctcagcaaatccaacaatatgatgcaactgtacctggtggtttatcttctgtagtaaaaacaacaaaagctacagctgaccaaacatcaaaggatctagctacacttagaaatactgaaatttctcagcttcaaacaagtacaaataatcttggttccgcattagaaaacacaacaatgctggcgatgatgattactaatggaaaattgttgcagggagacgtaaatttcaaaaaaggtaacaatggtgtatctgtctataacaatgccggcaatgggaatgtgacagttactcgagtcgcgaaaagttctgataaccctactacctcaacccatgaaattgaaattaaaaccattggtgctgccagcccaacatggggtggatttgttcaactcgtttatggccgtgcaaatgctgtttttgttatcaagtatttaatcaagctaccagttggatataaattggtgaatgctggtaacgcaatggggacaggggcaattgatcgattcattggcaatactgagggtacaggcaaattcgaaacatatattcgaatgattaaatgtggtgctgtaggttctttctctaactcaggacatgtttatgtggcgggaggatctacaccaacagctactgcgcctttagtttggaccttagcccaaatcgagcaatatgacgttactgattacgcttcagctgacccgactttacaggactttgtttcttcagccacagactctatatcaacattaacgaacttcaaagaaacttgggctgccaaacttactgaaatgtcttcaaaattagacagtaaaaacggcgcttatattttgaatgcggatataacaaatactaatgttgagcgtgcaattgcagcatcttcacagaaaattacttctgaatataccaatgctatgagtgtgcagccattgagttcaggtgcagggaaaattttcgttaagcctttaacttggcgtcaagcaatcactacttcgggtacattggttattaagacaccaattacagttggtgcgtacatgaccaaggttaaaatttctggttataactacaataacaaagaagataatattttcgatctggatttggcattttatgcttatacgtcaacagtgccattttatccaaatatgacgtcacgttcttttggtattaccttagatgaaaataatgctacgactaaaggcctggctctagctttagatagcaataataaggtgtgtatcttaattaccaaaaaagatgcttggtcttacccagcaattacagttgagtcggccactattactcatacaaatccgccagattactttaaagatggctggacggcggccattgaaacggatttatcagtttataagtcagttacgccgtttacagtgacttcaatgatggaaaccactgcaggttcacaagccaaagtagatgttccaatgtctcaattaagtgatattgcagctgataataaactcacaccagttgagaaaaaacaggcgaagttggtttgggatacactttatcaaactgatgcaagcttgcgagctgaggcagtcacttatggtatatcttctactgcctatgcaacggcattcagtactttaaatacatatttagcagctttattcgcaaatatgaatgtaactagtacgattgaccgaaaccagttcattactaactttgcgaacgtgcacaacgcacgacaagcattagtacgtgcaatctcggagaaggctaaagaaatagctgatactgccaaggacatagcttctactacaaaagcaacattagagcgtgattacatgacgtctaccaagacgaatgaagcaatcgcatcttcaacagaaagaatgtctgcactgtattctgcaaatggtcaaaagatcatggcttcagtactcgaaacatggcaaaaagattggttagtaaaaactccaagtgggaataggcctgaacttagtttagttgcagatgcaacttgtcgtgggggatatgcactaagaattggtaataacgtaggtaatgatgaagcctggttaaattggttcacatctttgcctatcgatgacaataaatattaccgagttaagtatagattccgccgtgtaagtggtaccggagttgtttatgttggtgcgacctgtcaaaacgccaataaaacaaaatatattgctcaagataactctgaaatcaatgatatcggttcaagtcactatttagtcgcaggtaccgcaccagcgttgggaacttggataaccggtactgcttattttaaggggcgatctgctggtgcaagtgcaggtgctggcactctactaagccctaaaacatttgctaataaagctgctttctttacaccagtattcattggtaactattccggtaaagctggtgaagtggatctagactttatcgatattgaagatgctgacaacattgctgattttgaaaatttcaaaaccacatatacaactgatgtgggagcatatgctggtgcattacaaactttggtttctgtttacggccaaaatgctatcaagcttaaatcacaagctgatttgatcgatggtgtgaaaggtaagtacgtaatgggaatggataacaacggtgttttctctggtttatccatggtaagtgaacaaaataatggaactgtccgaacttctataggtttccaagctgatagaatttttttcacaacaggtacttcttctactaaatatatgccgttcataattcaagacaatcaggtcattatgaatagtgatgtatttattaaaaatttgaccgcagcaaacttcaaagcgaagtctttaacagctgaactgtttaaagtcgataaattgagcgcgattgctggtgagttgggaactttaacgacctataaggatcctactaagcctaatggcgcgagaatggtgttaagcggaagtttaattacggtatacgatgataataatgttgtcagggttaaattagggctgtggtag

SEQ ID NO: 45753 - DNA, 291 bp, Acinetobacter baumannii
atgccacaaggcttacaagtatttgatgagtctaagaatatattattagatgctactactcgaattactagacttattggtagggtggaaggtggtagtcctcccggtatctcaggttcagtaacaatacctactgacagtattggtaatggtaatatattttttattatcgatttattacccggctatggaagtaatcttgcagagatgacctacaataaattaactatttcaggtaatacaattaactatgcaggtctagttactggattctattatggggtttattaa

SEQ ID NO: 45754 - DNA, 1236 bp, Acinetobacter baumannii
atgcttgattttcatacagccatggcttcaggcggctttgctactttaagtgatataagttacggtttctcaatagaaacatctcttaattggactgtatttcttacctctatattaaaaacaaccaatctaattgatttaatagctttggaaactatagataaaaaaataaaaaaactattcaaagaatatgttcagaatagtagtttagatatattttctgagtttaataaagttatttcagaactgaaaatttatagtcaaaaaactaatttcttctatttcattatccaaggattaaactgcgataaaatatattcatttgaaaatataactcttggaaattttaatgaaaaaaactcaaacaacatttctttctcagaaaaaataaataaaaatataaaactagtcatagatgagcgaaaaagaaatgggacatttaatcccaaagatatatttttaaaagagctaaaaaatacaataaaaaaatataaaaataaaacagttattgagatttctaatcttggcgacccattaatggccaaagaaaaaagtaaaaatgatgctaaagagttaataaatcaaattattttcatcactcatatatcaaaaagttataaattccacattcaagtacatacttatgaagttaaagatagaattcaaccattatgcgtaaattatgacgaattaagtactagcgcattaagtgatgaaattatttacaatgtcgattttagcttttcacaaaggaataatatagatagtctaagtaatattggttctaaatttaaagaattatgctttcctatactaactaatagctttaacaatgacttattagagaaattgcgtgtttctataaattggtatagtgcatccattaattcggaaagtttaaatgagagctttttattctgtgctattggaatggaatcattattaactacaggtagagactccattacaaaagtattagctgaaaacactgcttttttaatagctaaagatgacattgaaagtagaaaactagtttacaacactatgtgcaatttatatgcaaaacgtagtggtattgcacatggtggaaacataaatattgaaaccaaagagttaaagcaaataagatactacttagctatgagtataataaaaataatatcaaaaataaaagccgatgaaattaactcaaataaagatttaattactttcctagataatcagaaatttggttaa

SEQ ID NO: 45755 - DNA, 579 bp, Acinetobacter baumannii
atgtctaaaaagattttaatgttggtcggtgactatgcagaagactatgaaactatggttcctttccagttcttaactggtttgggttataccgtgcatgcggtttgcccaaataaaaaaaacggcgatcatattgcgacggctattcatgattttgaaggtgagcaaacttatagcgaaaaacgtggccacaacttcgcgattaactatgatttcgatgccgttaataccgaagactatgtaggtttagtcatcccaggtggtcgtgcgccagagtatttacgcatgaatgaacgtgttgtcgaaattgtacgtgaattcgatagagtgaaaaaaccaattgcagccgtatgccacggtgctcagttactcgctgcagcagacattttaaaagaccgcctctgctcggcttatccagcatgtgcggctgaagtaaaattggcaggtggacaatacgcagatattgctgtgactgaagcagttacagatggtcatttggtgactgctccagcttggcctgcacatccagcttggttagcacaatttgtgaaagttttaggcgctaagattagtatctaa

SEQ ID NO: 45756 - DNA, 1197 bp, Acinetobacter baumannii
atgttcaaatcattttttccatcaccacgatatttctttatatctgcggttatttggctcgcgctaaatatggtgctctggtatacagggggagatcactggggacagtatcttggctttcctcaggggtatgcagatgctgagttgcctattggggtaagtcgcttctggtcgcctgcttttttatggttttacctctggtttttagtctccacagcactgtttgctagcttttggaaaattatatcgaataacccatggcagcgttggtctatctggggctcggcttttattttatttaatatctggtttagtgttcaggtcagtgttgccattaatgcatggtatgtaccattttgggatttaatccaacaaatgctttcaagtggagggggagatctctctgcactttatagtgaaactctagtctttctttacattgcaatggttgctgtgactttagctgtgattaatgctttttttacaagtcactatgtatttcgttggcgtacggcaatgaatgaatattacacggagcattgggaaaagcttcgccatattgagggtgcttcacagcgtgtacaagaagataccatgcgctttgcaacaattttggaagacttaggggttgagctggtcaaagcagttattacattaattgctttcttaccaattttatttcagctttctaaacatgttccagttttaccaattgtcggcgagctagaacactccttggtatgggccgcaattgtatggtcaatttttggtactgtcctactcatggtggttggtattaaattacccggtctacaatttaataaccaaaaagtagaagcagcttaccgtaaagaattggtttatggtgaggatcatgcagatcgtgcaaaacctgctactttacgtgagttatttagtaatgtacgtaagaactatttcagactttacttccactatgcctattttaatatgacagcgatttggtatggacagcttgatattctctataatttggttgttcttttcccatcgattgctgctggtaaactcacattaggtttaattcaacaaattgcgaatgtatttggacgcgtacgtgaatcatttcaatatttaattacttcttggaagacgattattgaactactttcaatttataagcgtttaaaagctttcgaatcgatattacataagtaa

SEQ ID NO: 45757 - DNA, 450 bp, Acinetobacter baumannii
atggcaacaggtacagtaaaattacatcgagtgtttaaggcaccagctgaacgagtttatcgtgcttttcttgacccagatgctttagttaaatggatggcacctcacggttttaccgcgaaggttcatagttttgatgcaaaagtagggggctcatacaaaatgagctttaccaatttctcaaccgggtcaacgcattcatttggaggtacttatgttgaactcgttcccaatgaattaattcgttataacgaccaatttgacgacacaaatttacctggcacgatgcaggtcaccattacattaaaaacagtattggtcggcacagaaatacacattacccaagaaggaatacctgaagttattcctgtggaagcatgctatttaggctggcaagagtctttatctttattgaagttgttagtagaagccgacattccagatcaataa

SEQ ID NO: 45758 - DNA, 723 bp, Acinetobacter baumannii
atgagtctgctcgctttctcctcatatgcattaaacggtgtagatgcacaaaagtttttacaaggtcaagtgactgtagatactgaacgtttagctgaaaatgaaacacgctatacagccatttgtgatcttaaaggccgcatccattttggcttgtggctaaaaaagaataatgcagaaagttttgaaattattgtcactcaagatcaagctgaagaattcgcgaagcacattaaaaaatatggtgctttttcaaaaatgaccttaagtgaacaaggtgctgtattcccaaaagttgtgaatggccatactgagttcagctctacagaaactgatatttccgaatggcaaaaacaagccatcatgacaggtcaagcatggattgctcaagcgactgaacatgagtttcagccacaagaattacgtttacatcaacgcgaaggcgtcaattacgataaaggctgttacttaggtcaagaaattgtggcgcgcctttggtttaaggcaaaaccaaaacactggttgcatttagttcaaggtacgggtgattcacctgctccagcaactcaattgcacaatgacgtagaagtggttaatagtacccaaactactgacggttatattgccttagttgttgcgaaacctgccgcccttcaagagttaggtcttcaagttttagatttaccagaagctttaagtggtgatgttgctagaccacaataa

SEQ ID NO: 45759 - DNA, 825 bp, Acinetobacter baumannii
atgaagaaattacttatcgccagtctaattgccatttcaagttcatcaatctttgcagcagacacgacggcttctgcagctaaaaacgatgtatttaaacaggctgagcagctatacgcagcaaaaaattatcctgctgcctttcaagaagtccaacgtcttgcacaaacaggaaatgctcaagccatctataacttaggctatatgacacaaatgggccaaggtactgccaaagataatgccaaagctctgaaatattatgaagatgcctcaaataaaggttatgctcaagcgagttacacgcttgcacaactttatgagactggtgaattaggtgttgccaaagatagcaacaaattcagtcaatatattcaaaaggcatcagctcaaggttctgatgatgcaactgtcaaaatagcgactattttatttgcgcagaaaaaacctcaatctcaccaaattgctttacaaaagctagcgcctttgattagaaaaggaaactaccctgctattcaggtcaaagcgctttatgatattagccaaggggttgaaaataaaaatcctttaatgaaacgccaaggcattgaagctttgcaaacaattgctcaaaagggttatgcgcctgcatctatggctttagcaaccatgatggcgaatggcaatatcattcctcagaacctgcctcaagcaaaacagatctttactgagcttgctaagcaaaatgttcctaatgctagagaatctttagcttcggtcgaaaaaattattgctgagaagaataaacaagctgccgccgctcctatgcagccagctcctaaaaaatag

SEQ ID NO: 45760 - DNA, 1110 bp, Acinetobacter baumannii
atggcaaaattatttgaaacggttaatttcgattcactacaactggtcaatagaattgtaattgccccaatgtgccaatattcggcaacagatgaaggcgaaattacctattggcatgaacagcaatgggcaaattacgcgttgtctggagctgggctatgtattgtggaagctacagctgtacaggcggaaggtcgaattagttatgcagatcttggcctttggaatgatcagcaacgtgaccagatcaaaactttattgggaaaagttaaaacactttctcctatgccatttggaattcagttagctcatgctggacgtaaggcatctactgaaaagccttggttgggtaaaggccaaattgcaaaagatcagccacatggttggcaaacagttgctccaagtacaagtactttttcggttcatgatgcagcgccacatgctttaaccattgccgagattaaacaaattcaacaagactttgcagctgcggccaaacgtgcagttgaagcgggctttgagttaattgaggtacatgctgctcatggttacttgctacaccaattcttatcgccaattgcaaatcaacgtactgatgaatatggtggctctttagaaaaccgtatgcgtatgacgctagaggttcttcaggcaattaaacttgctgttcccgaaggttatccggtaggggtacgtttatctgcaacagattggatggatggcaatgagcagtgggatattgagtctacggttggtttatcaaaagccttagagcagttaggcgcggcctatattcatgtctctagtggcggtttacatgagcatcaaaatattactattggagcaggttaccaagttcctttcgcggaacaggttaaaaaacatgtagctattcctgtgattgctgtaggtcttattactgacccacaacaagctgaacaaattttagaaaaccagcaagctgatgccattggtcttgcgcgtgcaatgttatatgacccacgttggccatggcatgctgctgctacattgggtgcaaaagtcaaaattgctccccaatatttgcgttgccaaccacatggcttaaaacagctttttgattctttttag

SEQ ID NO: 45761 - DNA, 1260 bp, Acinetobacter baumannii
gtgacatggtctaagccgattaatgacaaaaatgaactctatgccatggcatatttaggcaatcgtcaagtcacacaatatcaatctattcctaagtccacccaagatgcgagcataaaccatgccggtggagtcattgattttgaacgtaattattatggcgctgatttccgttggacgggtaaagagttacttccaaataccacgctaagtgtcggtgtggcacttgatgcaatggatgaagatcgtaaaggttttgaaaactttaatttagtaaatggtcaaccttcttatggtgtcaaaggtaatttacgtcgtgatgaagacaatactttatggaatatcgatccatatttacaagcttcatggcagttcttacctacatggcgtttagacacgggtgttcgctatagcaatgtccactacaaatctgaagataactatttaagtaatggtgatgatagtggtaagacggattacgataaagttttaccgtcggtcgctttaagttggcaaattttacctgaacttatggcctatgtaagttatgccaaaggttttgaaacaccaacttttactgaaatggcatatcgacctgatggtcaaagtggttttaattttgatttaacagcttcaacaagcgatacctatgaaacaggtttaaagtcacaaaaccaattaggtgattttactttggcggttttccagactaaaactaaagatgacattgtttcggccggtaactcaaatggccgatcaacgttccgtaatgcagataaaaccttacgtgaaggtgtagaatttgcatggaataaaaagttatggcgagacttaatagcgaccgcaagctactcgtatttagatgcaacctttgatgctgacattccagcgttaggaaatattgctcagatttcctcaggaaatgccataccgggtattgccaaaaaccaagcttatgcctctttggcatggcagccatcgcacggtctatatggtggtgtagatgtacagtatatggacaaagtatacgtgaatgataccaacagtgacgcagcaccgagctacagtgtaacctcagcaaatgttggttatgcatgggtaatgggcgattggaaagtcaatagctttgctcgtgtagataacctctttgataaaaaatatgtaggttcagtgattgtaaatgacggtaatagccgctatttcgaacctgctgatggacgtaactggagtgcaggtttacgtgtaattaaacaattctag

SEQ ID NO: 45762 - DNA, 1650 bp, Acinetobacter baumannii
gtgtttaaacacagtatattcctgcgaatatatgcggggctggtaattcttgttgttttggtagctgtttttgggtatttactggtacaaattatcaactaccaacgcgcacaagaataccgagaatctttaactgatggtatttcttatgtcattagtgaaggagtcgctcgacaacctgggaagcagcaaaaaatagattggatttctgacgcatctgatttgctcgaacttccaatttattataccgatgcaagtaaggttgagctgtctcggaccgagaaaaagcggatagaagcacaaaaatctgtagttcgttacgatgcaagcaatagcattgcatatgtcattattggcttacgtgacgacccacaacattacttatctataaaagtcgacaaaattactgaacgccaaatgaaggctcttcctatttttgtgctcgactatttaatgttttatccggggcaggaacaagaatatcttgccaagattcaaaagcatttctcatatccgatcaatattcaaaatattcaagatgtaaatctggattctgaacagattggacgtttgcgccaagaccaaagtgtcatgttgtacaaagatagcgcaacagtgcgcggtacaaccatttcgattgtgtctccaataccgaatcatcctgcgcaagtgttagtgctgggtccggttccaatgtttaactggatgcctttacagctttcggcgggtattaccttatttagcttattcttattaagtctaggtgtttacggtttgattttgccgttagagcgcaaaatccgacaggtgcgttatgcattaaaccgtatgaaatcgggtgatttgtcactgcgtgttcctattgagggaagcgatgaaatggcaaacttggcttcaagttataacaatatgtctgaccatattcagcgtttgattgaggctcaacgtgagttaatgagagcagtatctcatgaactcagaacacctgtggcacgtattcgctttggtacagaaatgttagccgaagaagatgattacaatcatcgtatgcatcaggtcgacatgattgataaagatattgaagcgctcaataccttaattgatgaaatcatgacttatgcaaaactagagcagggtacaccttcactagattttgcagaaattgtactcttcgaagtgttggatcaggttgcagttgaaactgaggctttaaaaacacagaaagaaattgaacttattccaccgcctttatatgtgaaagtagatgcagagcgtcgttaccttcaccgtgtcgtgcaaaatctagtaggtaatgcagttcgttattgtgataacaaagttcggattacgggcggtattcataatgatggcatggcttttgtctgtgtcgaagacgacggaccgggtattcctgagcaagaccgcaagcgtgtatttgaagcctttgcccgtttagatgatagccgtacacgtgcatctggcggttatggtttgggtctctctatcgtaagtcgtattgcttactggtttggtggggaaattaaggtagatgaaagtccaagtttgggaggcgcacgctttattatgacttggccagcacatcgctttaaacaaccgccattaaagaccaataaaaaagcacctgcataa

SEQ ID NO: 45763 - DNA, 2340 bp, Acinetobacter baumannii
atgagtcattcatttaaagttgcagctagaaccttacgccatttaggaggagaattaataacttctgatgaaatggctcttaatgaattaattaaaaatgcttttgatgcgggatcaaagagagtaaaagtatttattaactaccctatgaatttagcagtactctcaaaaacgctagaagatttcacatctctgaaaataaataaaaacaaagccttagagctaatagagatcaataccaagctctatatcaacccactcaacacggcccccctctctacttttctaacttatattgaccaagtattaaataccattaatgagcaaaataaacctaatatactctctgaaattaaagataatttttacaatataaagatatgtgatactggtcatggaatgaccgaatcagaactcgaatcagtttttttaacaattggtaccccttctaagttatcacagaaatcaaatggagatcgtattcttttaggagaaaaaggaataggccgattatctatgatgaagctaggaaataaggcaactgtaataactaaaacaattgatgatcaaatatgtaattcaatatcttttaattggcaagattttgacaaccctgatttgtatcttgatgaaatcaccattgaaactcaaaaaattaattatccagaaacatttataactggcacacaaattcatatcaccgaactattatctgattggagcttaaaaaaaacagaaatatttgtaaaagaatatattcaaagactaagaagcccttttagagaagggaagtctgattttccaatagatattttattaaatgataccagattaaatataacccctatcccaagctggttaaaagaacaatcaagcctacaggcagaatatatatttgagccttctcagatcaattcagctcttcatggaagtttgatatggaaagattcatcagcaccagatattagaagttggtctattgatgatctatctagaatactaaacacttcaagttcacaattaaatcttttaggaccgcttaaaataaagtttctctggtttaatcgtaaagatctaattggcaccatagaaagaagtctcaaaaatattaaagaagagttaaatttatgggtaggcggatttagtatttatagagatggttttagaataggatttacgggtggattaaatgatgattggctaaaaatggatagcaaggcacttaaaagtcaaggttatactttcaatcgctatcaaactgttggtgaaatatctattagtaaaataaaaaatccaaatttaaaagatacagcaagtagacagtcattagttaataataatgaatttgaactactacaagacctcatatcagaaataattattaaagatacaaaaagtcgaatcgaagatagaaaaaaaatattagaaattgttgcaactgatgcattcataaaatctttagataaatctgatgaatcatataaaaaggctagtgaagccttaaatacattatcaaaaaatggaagccaggaggataaagatattattgacatggcccaaaatgttatgaaaaatcaaaatgagcttattaatcaattgaatgcaaaaatggaaaaggctttcgaaaccaatacggacatattggaattagcaaatttgggacaaatggtagatattattgctcatgaattggctcgtataacagagaatacatcaaatcttttaattcgattaaaaaatagcgaagacaataaagaagaaacatcaaatataatgaatgaattgcgtaaacaaataattgcaactgagaaaagaattagaagtattgatgtattaagcccagcagtaagacaaagaaaagaaagttatgatattacagcgcagtttaaaacaatacttgaaggatacgcacctaaacttcaaagacataatattaattataaaataactgttgatgactcctctgaactaaaaccagtacaggttacgatggttagaggattagtagcacaaattatggaaaacttactgaccaattcagtatattggcttgaccaagggttaaaaattggcgaaaaagaaaaattaattgaactcaatattgagagcgatactaaaattatatatatccgagataatggcccaggggttgacccagcttatcatctagatattttcaagccctattttacaaatagaagagggggtaaaggccttggattatatatagccgcagaaattgcaaaatatcacgaatcaaaattatatttgtctaatgaaattgaacaagatggaaagttaagaactttcatcattgaattaccgaagagttctatttga

SEQ ID NO: 45764 - DNA, 1914 bp, Acinetobacter baumannii
atgaaaccaacctcacaaccaagcaaaaagaaaatccttatcattgatgatgaaattgagggtatttctctcaaaaaagctcttacaactgctaaaacattctttgaagctttaagagatcctgatagtgaaattcgggaggaaatggataactttctgaataagcatcaaaaccaatttcaaaataaattggaaactgatggtactgttcatgaggctttttttaaagaagtaattctttctgatagctttaaaaatagcctatccacagtttcattaacttataaatctctttcaagcttatatcaggaaaatgaatggcttcttcgtatcaaagggctaattacaaaagcatttcctactgacgtctatgacgttaaatatttagaaaatgtggacaatattaatattgatgaattagatcagtttgatttattaatagttgattggtttcttgaaaatggttacagccaatctagtgatctacttcttaagctttcagaaaaagataaccttcccgcaattattttattaactagtcatgaaaatatattagagtcaaataccaaatctgacttttatataaaaaccagaattagtggtgctggtttaacgatattaattaaaaaagaaattagggcagaaagttttggctatattggattaagaatgctggctgagaaagccattaaacaaagaccaatagcaaatgcaagtaggcattatattaaacaatgggaaaacgttttagagtcagccaaacagaatactattaagtctttatggcagttagatacatttattatgaaaagtattcatacagatgctatttcagactcccaaccatatagcaatcattttcatgatttcatttcacgtgaacattcatggcatatggaaactaataccacactaaatacatatgcagaaaatttaggaaccgcacttaatgagcacaattacaatgatttattaacacatcattcaaatgaagactccataacactacatagagagttattacaacattattctttccaaggtggtgttaatacattcaaaatccatgacatcactaaagatgaacttcaacagaagattttagaaaaattaccatttggagctgtactagtacatggagacaattcaacctcagattcatacgaagctttcgtcaacatcactcaaccttgtgatctaagtggccttattcgtaaccaaccaaataattcattaatattcatgacattatcattaaaaaagagattagtaaaaaactctatgttttttgatacatcaacctatcatatttatggacttactttaaatgatactctctatgacatgattcctaaaaataaacaactagtaggtataaattttaatgaattttatcaaaaatttaataactataaattagttggagtcttacgtaatgacataactatgagtttacagcaaagtactgcagcctccattattagaccaagccaacctaggacaaacagaccatgttttggtttagccaaactatttcttatttcatgttcatcaacaggagaaaaaaagtgtattagtttccctaatgaaattgaattcttaggttcaacatataaattagataaaactaaaaatctaatacaaattataggaaataatttagcttcagctgctttttgggtatgccaagaactagaatttcaagacaattcagatgagtttaataacacttataggctctttcatgaaagtattgatatctcaaaaccatcaaacatttctcatcagactacagtaagaatgctaccagtggactcttttgatgatcattcacaagcaatacaaggtatccaagataaaatccataggaataagaatacaatttgcttaacttatgaaaaattccacgattaa

SEQ ID NO: 45765 - DNA, 843 bp, Acinetobacter baumannii
ttgactgaacatcatgttctaggattatcaggagggaaggatagtgcagctcttgcaatctatatgcgtcaaaattttcccgaactaaaaatacgctatttttttactgatacaggtaaagaacttcctgaagtttatgagtttctagcaaaacttgaaggttttttaggtcagaaaatcgaatatattaatggcgatcgtgattttgatttttggcttcgtcagtataataattttttgcctagtgcacagacccggtggtgtaccagacaattaaagctcacaccttttaaaaagtggattaagccatggctagatcagggagataaagtatatagctatgttgcaattcgtgcagatgaagatcatcgtcaaggtttagtgtctcaacataaaaacctagaagttaaattaccttttcgtgaacatgggattgataagccaggcgtttatgatttgctagagtcctctggtattggactgccagcttattatgagtggcgttctagaagtggttgtacgttttgtttctttcaacaaaaaattgaatgggcaagattaaaagaacgccatcctaaggcatttgaagacgcaaaggcatatgagaaaacagcaatagattcaggctctccatttacttggacgcgaggagaatctctaagtgatcttgaaaaacctgaacggttggcgcaaatttataaagattatgagctaagaaaacaaagggctatgcatcgaaaacctgttaatccactgcgcccccaaagaatagatactattgatattgatgatctatacttggaagacgagggggcaggggcttgtttggtttgccataaataa

SEQ ID NO: 45766 - DNA, 3309 bp, Acinetobacter baumannii
atgagtaagaaattatcagaattagtatcagtacaccgtaatttcttacgctcaattcgtttagatactgatctaggtcgagcagatgcaataagtggttacattttacagtctcctgcaaaacagttacttgatattacaggtagttatttactggagtcacaacagaaagcatttacttggacaggaccatatggtggtggaaagtcatctcttgctttaactttagcttcttgtgttaatgaaaagaaagatattagagatttgtcacgctctatattgggtgatgaaataaatgttggtattaagcaatatttctacacagatgaaccttggattgtattgccgatagtagggaaaaagacttcgattgaatcgcaaattcaggcgacgttaaactccatagatgaacaatataaatcactaattaatcaagaagattctgtcataaatcaattggttaagttggcagaggttttgccaaaaaaatctggggttttattattaattgatgaacttggaaaatttctagaatatgcagcatattctggagaagatataggattctatcaggaccttgctgaagcagcggcaagatgtaaaggaaatcttgttattatcgggattttgcatcaatcttttgagcaatatgcagctaagttaggaagtaacgttcaacaagagtgggcgaaagtacaaggccgttatattgatattcctttagttacaaatacggatgaaactctggagttaataggcaaggcgattcatgttgagactcaatatgaagaagcacgaaaagttgctgaaaatgtctccaaggttattcacaaaagaagaccaagcgctgtatcgaatctttcagttttattagaagcatgttggccacttcaccctgtaatggctgttatgttaggacctgcatcaaggaaaaaatttggtcagaatgaacgcagtatctttagctttttaacttcggtagagccgctaggattttctgaagtattacaaggaatggatggcgagatatttgactattattggcctcatcaattttgggactatctacggggtaatttcgaacaagcaatactagcttctgtagatggacatagatggtcaatcagtgtggatgctattgaaagagctgaggcgatcttttcaaatgttcatgtaaacttagttaaaacaattgctcttatcgaaatatttagaaatggatcaggactcgttgctgaggatcagttattgaattgctcagtgcctaacgcatctattactgaaattcatgatgccttaaatgatttagcaagagcatcaattttaatttttagaaaacatataggtgcttggggtgtttatgcaggaagtgattttgatattgaagctgcactaaatactgctacttcaaatgtgttggatgttgattataaagaattaaaaaatacccttgcatttacccctataacggctcgtagacattattggaatacaggggctatgaggtggttaaactgttctattatttctgaaagagaagtgaaaaagcatattgactctttccagactcaaggaagtgcttttggtgagttcctacttgtaattcctgatattattgttaaagataaagatgaaataggcaagaatgagcaattagtttcaaaagcttttgctaaaggagtcttaattggtttccctaaaaatggagataatatccaagggttagcgaaggaactcgcaagcttagagtttattagaaataatagcctcaaattgcattctgatagtattgctatgagagaagtgttagcaagaattcaactcgtcaagcaaactttgaatgatgagttaaaatatgcttttaataattgtttatggcagtggggtaagcagacgtttactggcagtctgtccaaaatagcatcagacttggctgatcaaatttttaatttatcacctaaagttagtagtgaacttgtcaatagaaatactctttcagctagtgcagttaaagcccagaaagatcttttaagagcactacttgcgaatgacaatattgaaaacttaggttttgagaatatgtctgcagctgccagcctttatagaacaactattaaggccttcaatattcatcgttatcaaaatgatacttggcagatatgtgcacctgaagcagaatttgatccatgtaatattgttggggtatggaatggaataaaagatttcataagaaaagcaaagggtgtagtcaatctctctgaaatttttgatttattatctaaagctccttttggtgtaaagaaaggtttacagccaattttagtttgggctttttttatctcatataaacagtatattgccgtttatacagatgggatgtttaccccagatttaaatgaaacatcaattgatgaatggttacagtcacctaaaagaatcagttggaggtttgtagagcttaaaactagtgagaaaaagatgttgaagctcttagctaattctttatcatcacagttaagctatccagttaaggttgaaccattagactcagctagagccttagtatcaatagtttttgggctcccagcttggactcgtaaaactaattcactatctaaagaagcgaaagttattcgagatatgcttttacatgcttcagatccccataaggtactatttactgatttacctgctgtatttgagtctactaatgcagagttaatagttgaacgtacctcagaagtcatcaatgaacttatttctatctttgaaattagattacgtaaaatagagaaaaatttactcactgctttagatcaacaaaatattaatttagatttactgcatctgcgagcaaaaaatatatctgggattggtgctgagtttagattagaggcttttattactcgtatggcatcttatagtggatatactcatgagttagaaggcttattaatgttggcacttggtaagccaagtgatacatggacagaccatgatatagatgcgggcgagcttcaacttattgcatgggcaactgaatttagacgtcttgaggtttttgctagtatccgtgagagagaaccaactagacaggctatagggattgttttgggtggtaagcaaactataacaggctcttttgatgtttctgaacatgatgctaatgatattgaaggtctatctaagcagttaattaaggcattagaaaacggacaatataaaaaagaagtgttcctagctgctttagttgatgcaggttctaaagtcatacaagagctacagcatataaatggaggtgaggcttga

SEQ ID NO: 45767 - DNA, 918 bp, Acinetobacter baumannii
atgaagcctatgttttcagggcatgaaacttttcctttacgtcaattgtggttaaaaaaggcatatcaccaagtttttaagttttatgaagctgatagtgattatgctcctaaaaccgttttttcagctcctgacgctattgagcgatttggtgttggtaagaatatggttgcggctattaaacattgggcattagcttgtgatgttattagagaacatacggataagaatggattcgaaattggagaaattggatatttactctttgatgagaaaagtggcgtcgatcaatatttagaaagtgaagctactctttggttattacattggttactagccggaagggcaagacgtacagcaactatttattctatttataattttattcaaaatcagacctttactgagttggaggtgaagaagctcatttccgatctagctctatctaatcagaaaggcaggtctgatgtcacgttatcaactgatataacgacaagtatgaagtgttatttttcatcgcatgacacagaggacaatattgaacctttacttgcaggaatcggtttactatcagaaattagtaaagggcaataccgttttaataggggaaatcaatattcattgcctgatcaggtttttgcatttgcattactagatttttgggaacaatgggaattgattactaatacttctcaaaaaactttgtcatttaatttaattgctcatgactacggatctcctggacgagtattcaagttagatgaaagtgccgttggcgatcgtctttcaagaatttcagagattactaataattatttgcagtggactgatagttctggaattcgtcaggtgagtagaattggtacagaaacttggggatctgtaaaaatgcgaattttaagaggtgcgtatgagtaa

SEQ ID NO: 45768 - DNA, 228 bp, Acinetobacter baumannii
atgatgagaacatctcaagaagtaagaagtgaacttcagaaacgaggtctatctattgcggactgggctcgtcagaatggattcactccagaattagtccatcaagttttaaattcaaacaaaatccctgtccgtggtaaaagccaccagattgcagtcaaacttggtttaaaagatggaattatagaacctgattttactttcgaaaaaatgaaggagacgcagtga

SEQ ID NO: 45769 - DNA, 702 bp, Acinetobacter baumannii
atgaatatttttacaactgatgcatgggacaatttcccagactcattacatccgcagattgttgatgcattcaataaaaaacctgatcttgatggcgtcctgcatggtcaacgacatattagtcaaggcagtgtaggaaaaagaacaggactattttctagttataagaataacggaatgattccttatgaaagccaactagaattagcccatgcaatacaacttgagcgaaatccgtctgttaaatactatcgcacccaagccttaaaaattccaataagccacaatcagtttctttatccagactttctcatcaaatatacaaatgaagaaattgctttccatgaagttaaacattcaaaaagatttctagatcagaaagatatcgaacgttatcaacgtttgaaaattctcttagctccaagcggtattacttttgacattgtcgatcgtcatgatttgtattctgacgcggaagcaaaagtattgctgcattacaatcggcgaagtcatgcaagaaactggtctagttttgaaattcaatttgctctatctctgctgacacgtagtacatcactagttaaaaaccaattaatgagtatattaaaaaacaatggtttgcccttggagttgggggaatttctcatctttcataaatatataaagcttaatacgccaaataataaacaaggaggaatctaa

SEQ ID NO: 45770 - DNA, 1887 bp, Acinetobacter baumannii
atgactattcctgattttattcctcaagtgggtctacgtttttcttttaaagatacaaattttgaagtgacctatgtacacaacaatgtagttcgtttttccgcagtggatggtggaaaaacaagcaacatcccgattaatagcttctctgaaagatataaaactggagagattcaatgtacctcttccccccataagctattactcaatggtcaattacttgataaaactagacgagctgaaaattatataaaagttattattaccacgttagatgactacttttctcataaaaaaattggagctgtaattcctgaaattgctaaaaagatagatgatccgttccctcctagcacctcaacagtgatccgttggattcgtagatatatagaaaatgactataatttgctaaatatttataaggtaaaaatcggcaatagattcttcagattttcaccagagatggaacaaattatatccaacacaatagagcaaattattaaagataaaaacatagctctgacccataaaaatattcagatatatatctatcagaaaatgttggaacacgatattcaagaaaacccaccatcaagacgaactattcaacgtaggcttaaacaatatgatccgtataaacttattaaagcaactgaaggaacaagaatagcaaatcaaacacttaaagcagcaggacgaaagatgaaaagtccattcattttagcaattgtagaaatagatacccatattctagacattatcattattgattcaacaaccaatctcccccttggccgtccttacctaagctgtgcgattgatgtacacacccgagctattgttggttattacatcagtatgcttcctcctagcgcaacaaccaccttagctttattaaagaatatgcttctacgaccatctcagaatttacctggaggtattccctccttaattgttccagataatggagtcgagtttaaaaatacggcactaagccatatctgcaatcatttgaaaatcacaatacagcctgcacaaaataggaacccagataataaaccacatattgaacgttttttcggtacgcttacatttggactaattcaacaattacaaggtacaacattttctaatcccgaagctcgcggcgactatgactcaagaaaacatgcaagtgttaccctagaaaatttgaaatcatatgttgatgaatggattcataatatatatcactgctcaatccactcaatgacgggacgagcaccaatgctattttgggaagatgcttctcaaagttgtccaccattaaccatatcaactgatgaagtagatattattgcccgtcgcccaatcagtagaaaaattcataaaggacaagtcaaatttgaatatttgacctacttttcgcatgcgttagcaacccttgaagcaaatggcttaactgacgttattgttatgattgatgagctcaatttagagcacgtatatatcaaacactcatcaattgatgaagtaatacgagcggactcaacagagcctgattacaccaagaatctctctctgcaagaacatcttgaaattcgcaaggaacttaaactggtatctcaagcagataagcaaagattaggaaaacatcgcgtatggtacgctcgatggaagttatacgaacgcattcaaaaagatgcttgttctaaaaacaagaagttaaagcagttaaaactagagcttcctcaaacacttaagaacctcttagaccaagatatccatacagtgtcccaaccaatagacccgtcagcttcaacatttatctcctcttctgaaatggatcttctaaatcaatcaaaccttgatgatgattttggaacattggagtttgatgatgaataa

SEQ ID NO: 45771 - DNA, 951 bp, Acinetobacter baumannii
atgaataagttagatgcacttgagttgagtaagaagcttaacaacatggttattacttcctcagagtttaccaaagcttatgacggcattacatcttgttcagcacagacgaaagcttatcagaaacctattggcagcttacttattgcagagggtggtcttggcaaaatgacactttcacaatcaatcctgaaaaagaatccttgttatgaaaaacaagaagatggctacacaaaaagagtagtccctgtgttctatatacaaatcccatcgccagcaacagttaaatctgttgctggcatgatgctaaaagccttgaatgatccagcacctctttctggaacaacagcacagatgacagaacgtttgtgctatctcttaaagctctgtgaaacggaactgatcctgatggatgaattccatcatttatttgatatgcaaaaggtatcaaggaagatgaatattgatgtctgtaattggatcaaaacagtgacagactcaaccaatataagttcctgcttaattggattgcctgaatttgcacctttattgcaaatagatagccagcttgcgcgacgctttccactgacatttaagttatctcggttaaatatcggttcaactcaatcaccaggaaccctttacgggttcctatcacaagtagaacaaaatattgaaaaaagactcacattaaaatttttaccgcgattaattgatccattattcgttctacagatttacgcttcaaccaaaggataccatcactacattatttcactgatcagagaagcaatgttattcgcccttcttgcagacagtgacgttattactcaacagcatttttctttggcgtgggataaaggcattacctcatataccaatatgaccacacagaatccttttcatatggacacgtcaaaactagtacaacgaatgaagggtgatcactga

SEQ ID NO: 45772 - DNA, 2007 bp, Acinetobacter baumannii
atgcaagagaagcctttaataccagcaatcccaacaccatttcctgatgaaaccgctggaagttttctcatccgtctcatcaagctgaatgggcatatccatagctcaactttttatcgatctagaatagatctcaaatacaaagagacactgagctcaataaccacacatgattatctcttccttaacatactcaagaaatttcagcttcctgattatttaaaagagttatcgctcaaaaggcattgttctaccttacgtgggaatgtaatctggaaaaataaactagtaatatcaaattattttttttcaaacgatgtcgaacgattttgtccactttgcttaaaagaaataccctattggagaaaagtttggctagttaaaccatactatgcatgtttgaagcaccaaattcgcttacacacgacttgccctagatgccaatcaacgctcagtagtttgcgttccgaaatctatatttgctcaaagtgcctaggtgatataaggaattgcgaaattgaggcagtatcagatgaacaaattaaacatatccgatggtttttagaatttatagaaactgaagaacaagaaaaattcaatttattaaaaatcttctggtccacacttaaaaaattttcagcacatgatccagtcccaccttcaatagaactattgcttgaaataacctatttattctttatggattgtgattcctctatagaaaggatggttgactggatatctcaaaggtctcatcaagtccatccaagaattcagctagttccattccttattgtagataccaggtattttggacaatatactaaaaagattcttgagcaattgcctgtatccactgaattggccccagaacatttattccatttattaactattaaggaaagctgccaaatcttagatatatgctactcaacgattcaaaggtggatagaaaacaataagttacagtatgtagtctcaaaggatattcctaaaaaccgtaaattcctttcgagccgcgatatagagtatttccttgttcagaaggcacttcacccttctcccaaaaaactgaaacatccaccaagaaaagatgggcaaaggctcactattactaatgtggctgctaaactgaatgttcattatgaaaacattcgttacttgattaggactcgctatttaaaagcagaaaaactgttggtcaggtttagatgtgcttattttattaattctaaagacttagaggaattcaatgaaaaatacatcttggttggcagcttagcaaaaaagctaaaagttatccctcaaaatcttactgaaaagctcgccagtattgatattcatccaattagtggaccacatatcgatggagaatttaacaacatatttttgcaagaatccgtaagacatttaactaaaaaagatattgaaaaaataattaactatccaactcttacaggtcgttatcctagctttgaggagcaacttcctaaaccgccaccaacttacctttctttaaatgaagcagcaaagaaactccatatcagtccaaataaaactgccagattagtcgaaaaaggcgtccttgaaaaagatacatcacataatttaagtatttcaatcagtattcaatctttaaacatgctaatcgcaaacctgcataatcctaaattcatatctgtaaaacaggcacttatacaactaaattgttctgcaaactggtttcatgagtattgggttgaaacaggttttattcatattcatgattttctatactggcattttgttgaaagaaatgagcttaataaagtactaaggttaaagaaaagttatcttacgggcaccgaagcaagcactcttcttggcatgcacaaatctcatgtgacaaacttagagtcccaaggtttaattgaacctgtttatttcggaacaccaaaaataattaagttatttaaacgagaagatgtcataaaattaaaggagttaggatatggggcaatcaaataa

SEQ ID NO: 45773 - DNA, 1713 bp, Acinetobacter baumannii
atgaaacaggaaactgcacttaaactgctaaaagcaggtgaaaatgtttttttaaccggttcggctggtgcagggaaaacctatacactcaatcagtacatccattacctaaaagcgcgtaaagtacctgtagcgattacagcgtctaccggtattgctgcaacgcatatgaatggcatgaccattcatacatgggctggtattggcatcaaagatcatctaactgacgatgacttgaaacgcatgaaagagcgtaaatatctcaaggaacaccttgaaaacgcgcaagttcttgtgattgatgaaatctcaatgctccatgcgaagcaacttaatctggtcaatcaggttttaaaatattttaaagaaagtgatgaagcattcggtggcattcaagtgattgtagctggtgatttcttccagttgccacccgtaggccgtaatggtgaagccaatcgtgacaagttctgttttatgtctgatgcatgggtcgaagccaaatttcgggtatgttatttaacagaacaacaccgccaagatgatgaaattctgaatcagatattaaatgcgattcgtgcgcaaagtattcaaaccgagcatttgcaagctttgcatcaatcccgtactcatgacattggcgaaacctttactcgtctttatacgcataacatggatgtcgacaatatcaattatcagcacttaaacgaaattgataatgaagggcatcaatttaatgccgttttagacggtaatgaaaaattattagaaactttaaagtcttcagttcgtgctccggaagaactcacacttaaaaaacatgccaaagtgatgtttgtaaaaaacaactttgatatgggttatatcaacggaagtttaggtgaggtgatcggttttgaagaagatgacgaaaatgggttattgccaaaagtaaaattaactgacggtacaactttgctggtagcacctgaaacatggtcaattgaaaatgaagcaggaaaagtcattgcaagtttccagcaaattccacttcgtttggcgtgggcgattaccattcataaaagccaaggtatgactttggaagctgctgaaattaacctgatgcatacctttgaaaaagggcaaggttatgttgcgctctcacgtttgaagtctttaacagggttaaaattattaggttttaatgaacaagctttggagttagatagtctggcggtaaaagctgatcgccgttttcaagaactttctaaagaagccgaagataattttgctgacgtcgatttaacggctcaacataaagcctttattcgtcattgtggtggaaccttaaatgaaactgaaatttcaagaaatgagaaaaaactagcgagaggcgagaagcaaaattacgcctcagcgactttggacgaaactcgtgcattgtttgaagaaggctacgaaattgaagatattgcacatgaacgtggtctaacacctgcaaccattattaatcacttggctcgactgcataaagaacaaaagctagatatttcggttgcccatcctggtgaagaagtggtcgaagaagtgcgtaaaatttataagaagttgaaaaaacgccaaaatccggatcatttttctgatgatggttcgatcaaactaagaccaattgttgaagcaaccagccctcgaatgggatatgatcaggttcgattagctttattatttattgaataa

SEQ ID NO: 45774 - DNA, 870 bp, Acinetobacter baumannii
atgaacagacataaatgtatggctgtatatactcaaaagctgcaactggtttgcgattatattcaaagacatttagatgaagacctagatgtcgatcggttgagccagattgcggccttatctaagtttcattttcatcgtatttttgccattcacgttggtttaaatgtgatgaagtttatccaactttctcgtttaaagcgggcctcttttcaattggcttttgaacccgatctcaaaattattgagattgccttgcaagcagggtttgacagtcccgaggcatttactcgtgcatttaagcgttcatttgatcaaactcctcgggcttttagagataaaccagactgggaatcttggcaccagaagtttgtttttacgattccaaaaagtgagctaaaaatgaatgtaaatattgttgagcgacctgctgaaaagattgcctatctatcacatttaggaagtcccgataaagttttggaaactgctgcgcagtttattgcttggcgtaaagaaactggcttatcgcctgtaactaagtctaaaacttatggtattccttttgctgaccccgatcagacaccagctgacgagtttcggtttgatatagcaggttcaattgaaaaggcggtacctgaaaatagttacggcgtacaaacaggtgaaattcctgcggggcgttatgcaaccgtaagacattttggtagccatgaccagattaaagatagcgtctattacatctttagaaactggttacctgagcaaccagaagaagcaggggattatccggttttctttcactatcacaactttgtgcatgaagtgaacgagtgcgaccttattaccgacatttacttacttttaaagtga

SEQ ID NO: 45775 - DNA, 1158 bp, Acinetobacter baumannii
atggccttacaaattctacaaaaacagctagatgaaagtagccattgccctctctgccaagcgtcgatgtactgggtagatgccgaacaatttgagcaagacgttcaatttcatgaatgtagccattgccaacaccgtgtatttaaagacacaaaaatgacttgtcattgtgaaacatgcactaaacaacggaaaaaacttttacaacaaactcgtttacaagaacaacgccagtttaagtcaaaagaccaacctcagcgcagtctggaacaactaagttttttacataaactttttttactcagcctacttgatgactatgctcgtgatgacattgcacatgatgaatacattcattgggaccagataaaatatcagccgattacccctaactggatgttccagaaccatctcattaaacagcttcataaagatgggattttaaatgcacaagatcaaaccgatgaaccacagtgcttttatttaaatattcgtctagatggttatagcgacccgagtttatttagtgtagctcagcaactacgccactggttctatgaaaacctaagtcttggtattccatttcgtagtgccgatgaagtgaaagacgtgctgtttcaggtgctctatcaagaaattattcagttctctcagttctattgccgaacttggggtatccaaattgcaggaagctctaattttcaagccttttgctaccgtttaatggactcattggcgattggtcaaatttattatcttattcagactgcacttgaatatctttataaacaaaaggcactacagccacgaaatgaaaagtttattaataccaatctattaaagaaaactttagagcaatatcgggaacgagctttgactgaaaagtgggaaacttcgatgttgccccgcccttacaatattccttacagtaaaatgagccatatattatttaaccgctttttaggttatgacgaacagatatttgtacaacctgtatggaaagcatggcgaaaaatcgaacctcgtttaaacttttactcggttaaacgttgtatgtactgtggttcaaatgatctaagtgttgactatgatgcagcagattatgtgtcgttgatttgccaaaattgcaaacatcaagatcactattttacccgttaa

SEQ ID NO: 45776 - DNA, 2607 bp, Acinetobacter baumannii
atgaatattgcggcgcagcctccagttcaggcagatcaaacagtttatttaaaagattatcaaaaacctgcgttcttggttgaatcaattaatcttgatattcaagtctatgacgataaaacaattgttgattcaacattggtcatgaagcgtcaaactgctggagacttagtgctactgggccgtgatcttgagttgcaatctattcagctcaatggccaagatcttactcctgcacaatattcactcgatagtgaacaactggtgatcactgatgcaccagatgaagtcattttacaaactcaagtgattattcaccctgaaaccaacactcagcttgaaggtttatataaagctggcgacttatttgtaacgcaaaatgagcctgaaggtttccgtaaaattacgttctatccagaccgtccagacgtactttcagtttttactacacgtgtagaagcagacaaaaaatatccggttttacttgcgaatggtaacttgcttgaaacaggtgaagttggtgaaaaccgtcactttgcgatctggcaagatccaactaaaaagccaagctatttgtttgcttgtgtgattggtgatttagctgtattgaaagaccgctatacgacttcggaaggacgtgatgttgctttagaaatctatgccattgagaaagacattccaaaatgccatatcgcaatggaagctttaaaacattctatgcgctgggatgaagagcactatggccgtgcctatgatctcgacaactatatgattgttgcggtgagccagttcaacatgggtgccatggaaaataaaggtttaaatatctttaacacctcatgcgtacttgccgatgaagaatacacaactgacgcagcgattatgcgtgtacagtctgtgattgcccatgaatatttccataactggacagggaaccgtattacttgtcgtgactggttccagttgtgcttaaaagaaggcttaacggtattccgtgatcaatctttctcggaagatttacaatctgctgcggttcaacgtattgacgatgtcgctgttcttaaatcgcatcaattcccagaagatgcaggtccattgtcgcaccctccacgcccagaccactttgtcgaaattaataacttctatacagcgactgtttatgaaaaaggtgcggaaattaaccgcatgatgtcgacattactgggtaaagaaaaattccgtcagggaacggatgaatatttccgtcgtcatgatggacaagccgtaactgttgaagactgggttgctgcactctctgcgggttcaggtgttgatttatctgcattcttaacttggtataaccaaccaggcacaccaaagcttgaagcgaaaggtgaatatgatgcagcagcgcaaacttatcgtctaagctttaaacaaagcctaaaagcgcatccgaaatatccaaacttaaaagctgtcccaattcctgtagcgttggcattatttaatgctaaaacaggtgaacaatatacgctccaaaacgaaagcctatttgtaaatggtgttaaagatggtgtgtacttatttgatcaagatgaagcaactattgagtttacaggggtaactgagcaacctgttgtttcactactacgtaatttctctgcacctgtaaatctggtatttgattacagtgatgaagaattagcattcttaattcaacatgaaacaaatggttttaaccaatggcaagcaacacaaaccttgcttgaacgtattttgttagaagatcactctgcggatacctatattcaagctattcaaagtacattgcctgaattagttggtcgtgatccacttttagcatcgcgtttgtttgatgtaccgactgaaggttatttgggtagccgtattgatcaaaactatgcaccagccgatattcatgtaaaacgtgaagccttactcaatcgtttggcacaagagttgggttcgttctggaaagatacgtaccttacattggaccctgacttgcaaaaagaattttctttagcgatgggtgtacgtgcattaaagaacattatgctcatgatgatggcgcgtcagggtgatcaaagtgcatttgaattggcttacgatcaatatcaaagcacagggaatatgtctgaacgtttaggcgcgctgcgtgtactagtgtggcaaagtgcgcctcaagcacaagaagccctagctgatttctataaccgctttaaagacgaagcattgtctttggaccaatggtttatgatacaggcagcaaacccaaatgccacagttgagacaattgaatatctaactcagcatcctgattatgacttaaccacaccaaaccgtattcgcgccgtgagtggtggtttgtcaaataaccctgaaaatacatggggctttggtgtagctcactttattaatcttgcagaatatctggacgagaaaaacccgattttaggttcacgcttattacaggtgttatctcgctggtatacacttgccgaacctcagcgcactcaagtgcaacaggctttacaagcgttgcagcctaaagtgaaatctaaaaacgtttctgaaactttaaatagtatgctgagcgtttaa

SEQ ID NO: 45777 - DNA, 1224 bp, Acinetobacter baumannii
atgaatgcaccagtaaatgttcagcaagaacttatgccagtgccagcgtctatgcgtgagatagatcgtaagcgctatttatggatgattagtccggctctacctgtaattggtttaggtattttagctggataccattttggtccacgcccattaaagaaagtatttgctttaggtggcccacttttattacacgttgtgattcctgcaattgatacaattattggtaaagatgcgcgtaatccaaccgatgaagaaattaaacttcttgagaaagatccatattattcgcgtttggtaaaaagttttattccattacagtatgcggcaaatatttatgcatgttatttaacaagccttaaagatacttcatttattgacaaaattttgcttggtatttccatgggtgccattaatggtattgcgattaatacagcccatgaattaagtcataaacatgatcgtatagaccatattttatctcatcttgctttagtgcctacaggttacaaccatttccgtattgagcatccatatggccatcataagcgtgcagctactcctgaagatccggcatcttcacgtatgggtgaaacattctatgaattttggccacgtactgttatcggttcttttaaatcagcaattgaaattgagaaaaatcgtttaaaacgtaaaggtaaagagttttggtcactcgataatgaattgctgcaaggctggggtatgagtgctgctttccatgcttctatggtaggaatttttggtaaaggtacgattccttatttagcaacacaagcattttacgggattagtctattcgaaattattaactatattgaacattatggcttattgcgtcagaaaaaagaaaatggtcaatatgaacgtacaatgccagagcatagctggaataataacaatgtagtgaccaacttattcttatatcagttacagcgtcactcagatcatcatgcttatccaactcgtccattccaagcgttacgtcattttgatgaagcaccagagttgccaagcggctatgcaagtatgctactaccagcaatgattccttcatggtggtttaaaatgatggataagcgtgtatttgatcactacaaaggggatttaaacaaagcaaatatttcaccaaaacgtcgtgcaaaaatcttcaaaaaatttggtgtagtcgataagtccttagaagctacacaggctgaataa

SEQ ID NO: 45778 - DNA, 966 bp, Acinetobacter baumannii
atgattgatcacgtaaacatggatgcactaagtaaattttttgatgatatccacttaaataagtctgaatatatttatataaaagcacaaggtgaatgggcttttaaaacacaagatcaatctgctttactggcttatatcgttttaacgggttctgtatatatccaattaaatgtgtcagagaaaataacagcaagagctggagatattattttaattccttctggaaaagcgcatcatgctacagactcaaaagctactgcgagtaaacttgtagatccagtcgatattaccccattatttaatggacatcgccacgatccaattgagttaggctcatcaacatctgaaaataccctattactctgcttgcgctgtcaagtcgatacttatatggcagggccacttattaatgcattaccctctattatgcatattcaacatgagaaccaagccactcctcctgaatggttgcaaataggtctctactttttagcggtcgaaacacaaaaaatccaaccaggtcatgacaaaattattgatcacttagtcagtattcttttaattgaatgtattcgtgatcatattcaacaaatgtcagatcaacaaaattggttaggtgccctcacacatcctgaattaagtaatgctttatccgcaattcatagtcaacctgaaataagctggactgttgaatcattagctgaacaatgctgcatgtcacgatctaagtttgccaatctttttaatagtattattggtgaaccacctcttacttatttacagcattatcgcttccgcttagctagccaatatctacgcacaagtaatttatcaatacaacaaatttcaaataaagtgggctattcttccgaaaccgcatttagtcaggcatttaaaagagtatttgatttatcacctaaacaatatagacaaaattatattggtactaatctcgatgaataa

SEQ ID NO: 45779 - DNA, 1155 bp, Acinetobacter baumannii
atggctaagccagctccagcaacagatgccgagcttaaacaagcttatgcaaagtttgtagaaactcagcaaaaagatgctaaacgcatagtgaaacatatccttattacgacagacgctcgtgatgatgccgcagctcaaaaacttgctaaagatgtatatgcaaaaattcagggtggactttcatttgctcaagcagcagctcagttctctgaagatccaacttctaaaacgaaaggtggattagttgaagcatatgcacctggtgttttttctgatgcatttgataaaactgttctaagcttgaaaaatggtcaaatttctcagccagtaaaaacacaatatggctatcatattattgaagcggagactcaggcgaaccaaattccttcatttgaagctgagaaaccacgtttaattgcagaagttgaaaagaataaagttgcttctgtttattcagataccgtaaatagtttgaacgaaacgattgttggtaatgattctttagatgctgttgtacagcaggttaaaggtacaaaaatcgaatcattaaatggtgtaactttagctactcaaaatccatatttaagtgatcctaacgtaaaaattaaattgtttaatgatgatgtgaaaaatggcgatcgtaatgcttcatctaatattcaattagcgaacggagatactgtttgggttaaagtacgtgactatcatgcggctggtgttaaaccacttgcccaagcaatgaatgaagtaaaagctaaagtaattgatgagaaagcacgtaaagcagctcaagcgaaaatcgctacaatgctgacagaattcaaaactcagccagctgaacaagttgtcgcgaaaaataaagttgcttttgaatcagcgggtgtatttactcgttcacaaggtttaaaacgtgcaattgagcgtgcagcatttagtgttcctgcgccaaaaccaggtatgtggtctgtaactatcgcgaacttaccaaatgagttagtggttgtggctgtttctaatgtaaattcagctgctgttaacgctatgcctgctgatcagttgcaacaattaaaacagctttaccgccaatctcgtggtcaacagatacttgaagattacagcgaatacttaaagtcacacgctaaaatcaaataa

SEQ ID NO: 45780 - DNA, 708 bp, Acinetobacter baumannii
  misc_feature (689)..(698): n is a, c, g, or t
atggaatcgtttcgtacagtcattaagggttggctcggcaaagtccttttagttttgtttttgacccctttagcgcttgtaggtattgaaggatattttaataggggaaacaaggcagatgtcgcaaaaactgtaaatggacaggacatatcaaaaaaagaccttgaaactttaacgcaaaggtataaagaacaatatttagctgctgtaaagggtgatgaaagtttacttaatttaccggtaattcaagccaaagctcttgatatattggtatcccgtaatttgctcattcaacaagctgaaaaattaggtatttctttaagcaatgctcaaatcgagcaaatgttagctcagcagccaagtttgcaagaaaatggccagttttcacaaaaattatatgaaaattatttgcgttcgattggcatgacaagtgaaggtttaattgctagcttacgtcaagatcacgctttaaaaatgttgacttcaacttttgcagattattctttagtgagtaaagttgatttaatgcaaattgcgaatttgcaaactgaacagcgtacattgcatttggctagtattaagttagacccttataaagctggtttaactgcatcggaccaagaggctactgattactacaacaaacatcagaatgagtttaaacagcctgcttctgttgatgtagattnnnnnnnnnnccgtctttaa

SEQ ID NO: 45781 - DNA, 2670 bp, Acinetobacter baumannii
atgaaaaaaaaatacaatgttcgatctcaggcaacccccaagattggcaaaacaattcttaaattaagcacccttagtttaagcatgatgtgtcttaccatggcacaagcagcagaaacggaacaatcaagtaccgatgaaaaaccaacaaaagtcgtaaaagttgccgttacaggttcttcaattaaaggggttgcggcacaaagtgcttcgccaattaccgtggtgaaagttgatgaaatcttaaaacaaggggtaacaacaactgaagaggctttggcaaagatcagcgcaaaccagtctaattttgttactgccagcaacgtaggtacaagtaaaacagctggctcggcagcaaaccttagagccttgggtgccaataagacacttgttttacttaatggccgtcgattagctgcaaatgcatatgacagtggcgttaccaacttaaatattattccactcgcaatgttagaccgtattgaggttttacgagatggcgcctcttccatttatggtaccgatgcaattggcggggtaattaacttcattactaaaaagcagtttacaggacttaatctgactgccggctatcaaaaaccagaacaaaaaggcggcgagcagcaagactacagcatttttgggggttttggtgatttagacgaaaatggctataacgtttttggtgttgtggactatcgcaaaggcgatgatgtcatggccaaagaccgtaaagttagtcggcgtggaggaatattacccgaattaggtgtcaatagaaccagtagtggttcattccctgccaatgtcccaggtttaggtaacccttacgcatccactggttgtggtaataatcctcttaatagtaacgatgatggaacttgtcgatacaacagccaagccgtgattggaattgttcctaaaacagaagacatctcagctatgggccgagcaacttttaaattaaatgataattttaacgcgattgcagaatatttatatgcaagaagtgaagtcactacttcagttgcaccagatgttttttttgatctgacgcttgaccctagtagtaaatattatccaggtaaaggtatcactccagctttagctggcgctacgggaactatccctctatatctacgttcacaatcgggtaatcgtgtaagtaatagtattaaccaatcacatagattatttgcgggtatcgagggtgaaactcatggttgggatattaactccggggttacctatgctcatagtagtgcatcggatgctatcgtaagtggctatttaaattttgataaaacacaagaagctttaaacaatggtattttaaacccattcggaccacaaaaccctgaagatgccaatgtatggaatgagttaggagttgaaggtaaatacttaaaagctaacctagatacaactactgtcgatttcacggcaagccgacctatatttaaattaccagctggagacgtggcttttgcagttggagcaagctatcgttatgaagattggacttcaaaagtcgttactgatgttgcccgagtggcacctagcacaggtgttgatcctgatgagccagtaaatactggcgatcgtaatattaaatcggtatttaccgaatttcatatcccccttcataaaactttagaagctcaaatcgctgctcgttatgatgactacaacgattttggtgatacttttaatccgaaatttgcacttcgttgggaacctattaaacagttaatgttccgtacaacttatagcacaggtttcagagcaccaacactttgggaagttaatggtgcaaattcgataactaatacaggtgcatcatataatgatcctgtgctttgccctggtggagttgtacaatcaggaggaaaaaaagaacgcgattgtaatatgcaattcgacagacaaaatggaggtaataaaactctagatccagaagaatcaaaatcttttaccgctggcttagtgtttgaaccaattaaaaatttagcttttactctcgattacttcaatatcgaagtcgacaagcaaattgctacactttcagaaactgctatttttaatgacccagtgaaatatgcagacaaatttgtacgtaatcctgatggctcattagattatattattacaacccaacaaaatttaggtggaattaaaacttctggttttgacgtcggcttaagttgggtttctccaatgactgctacaggtcgattcggtttcaatattgatggtacatatataacagattacaaatatcaagccgaaccaaatggagaatggataggtgttgcagggtcatatagcggcttagactatcaatccattattctgcggtggaaacatactgcaaacctaaattggaattatgaaaactgggctttaaacctacaacaaaacttctctcgtgggtaccaagatcaaaactctaacggccaaaaccatagagtcagcgactatacaacatacaatatttcaggcacttataaaggctttaaaaatctagaagttacagcaggtattaagaatatctttgatgaagaccctcctgcttctaatgtaattgataacttccaaatggggtatgacccacgttacgcagatcctttaggacgtacttactttgtacgaggtacatataagttctaa

SEQ ID NO: 45782 - DNA, 444 bp, Acinetobacter baumannii
atgcgtaatgtaattactatacaaaaagaatttaatgctcctcttagtgatgtctttaacctgctttctaaacatgcagcttacaacactgcatttgctccactacaagttgtgcgtgttaaagattcggcagatcctgaaagacctgatggagtgggttctgttcgtcgtatggggtttggcgtgattaaaccacttaaagaagaaatcacgcatctcgaagaaaacaaacgtattgaatataaactgattgataatcctctagtgaaacaccatttaggtcgaatcgagttctcagaaattactccttatattactttggttacgtatcgtatcgaattaaccgcaaaagctcctgttgtaagtaaattaattcttgcacagctaaaactagcgattacactaggcttttcgagattagctaaagcatttgcttcttcgtga

SEQ ID NO: 45783 - DNA, 1113 bp, Acinetobacter baumannii
atggcaaaaagatataaagttgccacgattgcaggcgatggcattggtttagaagttctaccagaaggtattaaggttgtaaaggcagcagcagagaagtacggcattgatcttcagttagatgctttcgattgggcaagctgtgattactaccttgagcacggcaaaatgatgccagatgactggtttgaaactttgcagggctacgatgcaatttattttggcgctgtaggctggccagataaagtacctgaccatatttcgctttggggttcgctgctccagttccgtcgtggttttgaccaatatgtgaatttacgtccagtgcgcttaatgccgggtgtgaaatgtccattggtaggtaaaaaaccgggcgatatcgacttctacgtggttcgtgaaaatagtgaaggtgaatactcagcgattggcggtaaagcttttgaaggaacagaccgcgagtttgttttacaagaagccgtatttacacgtcatggcgtagaccgaattttgcgttatgcatttgagtttgcaaatcagcgagatgcgaaaaaaattaccgcagcgaccaagtcaaatggtattgcagtgagcatgccgtactgggatgagcgcgttgatgcgatggcaaaacagtatccacaaattcaagctgataaacagcatgttgatattttagcggctcgttttgttttacaacctgaacgctttgatgtggttgtggcatcaaatttatttggcgatattctttccgatttaggtcctgcatgtacgggaaccattggtttagccgcatcggcaaatttaaacccagaaagaaaatttccatcactgtttgaacctgtccatggttcggcaccagatatttacggtaaacaaattgccaacccaatcgctgcgatttggtcgggtgccatgatgttcgaattctttggtgaagaagacgagcgctgtatccaagcgggtcaagatattatgcaggcgattgaaaatgtattaattaatggtccaaaaacagccgatatcggcggtcaggcaaaaacttatgaggtaggagatgcaattgcatcatgtgtagcccaaactaaaatggacgtattcgctatggaataa

SEQ ID NO: 45784 - DNA, 849 bp, Acinetobacter baumannii
atgaaaatgttcactaaacttgctttagtttcttctttagctatcagtgcaaatgcaatggcaatgcaatcaatggatgatgctgcgctcagtgctgctacaggtcaagatggtattaatattggtatcgctctaggttcaggcggtattactatcgataaactatatctacacgataatgatggtttagcaacatcaactggtattacgggtgcttcaggtactgctggtgcaatcgcaattagtggtgtcactgtaactcaaaaaggtacaggtaatcttttagatttagcaattgacacaaatggtgcttctggttcaaatggcgctttcttaaacgttgctgcaacagtaggtgcggttgatgtacatgtaggttcaattggtgtaggtacttctggtacgttaaatcaaacaaccgctgtacgtggtattactgaaacagctccaactgaaattatttctggcttagatttatctttgggccaaatttctgcaaatgttcagttaggttcaactccgcaaggcgcgatgattaaagtgaactctagtttgcaaggtggtttaacactatctaacttcggtattaatgatgctgcaggtggcggtaaaattgtcctagacaaagtaatggttcgtggtgctggtaatacaactggtgacttggatgtaaatgcagatatttctgtagttcctacaggtttacgtatccaaaataacagtacgcaaggtatgaatgtttatgcacaaggcgtacacctaggtgcagcgggtaatgcttcaattggtgatttggaaattcaaggtttaaatgtgggtaaatctacaattactatctctggtcattaa

SEQ ID NO: 45785 - DNA, 402 bp, Acinetobacter baumannii
atgtattactttgcgacagaagcctttgaaatagaaaaaaagccgccgggaactgtttattatacagagactgccgattcgcgtaatttatcatttcatcgaaatcatattgaaccagttactataaaaccagctgttgaagaccagtttcgtggtattgttcggcaagcctacgattatagttgtggatctgctgcgcttacgactttattaaacggctatgttggaacaagtttaactgaacagcaaacaatgagtggtttgctgcagtatggcgaatatcaacgtattattgagcgacgaagtttctcattacttgatatgaaacgctttgtcacagcaattggtttagaaagcggtggttatcgaggtgagttttctgatttagtcaaactggggtag

SEQ ID NO: 45786 - DNA, 393 bp, Acinetobacter baumannii
gtgcctatttcatatgctggttttaaacattttgtcgtatataaagcttataaagatggaagagtatacgtagctgaccctgctttagggaatatcagttttgatgaggggcgttttaaagaaatttgggataataatactttatttgttatttctgttcctgcatcacagcgtaaagatttattggcgttaaaagatgcagatatgcgccatgtggaagatgcaacggttaatagatatgcttttgttgatgtgcaatatccagcgtttaattatgaccgtttagcaaacaaagcatcaactatgaggcgtgtcttggataacgataatcattctgcgacttatggacagccgatagaaacctatatgcggctttattacaagcgtaaatag

SEQ ID NO: 45787 - DNA, 1182 bp, Acinetobacter baumannii
atgaataatcgatggataaagatgagtgtgttggctttaagtatgagtgccattacagggacaatttatgccgaagatcaagtgcaatcaacgcaagtatccgattctaatcagtctgtagaagcaaatgaaaactctggtgcttcagatactgctagttctagtgaggctacaacagatagtactacacaaacatctaatgtctctgaaactaataatgtagttccagcatctaatagtgaggcacatcaagcagcaagtgcactacagaaaaaagaaggtgatgctagccaggagacaaatttacaagaggtatttacttcaaatgagcgccaatattctttgattaagaagggtgtaatttcttcttattatgatcttgactacacttattatcgtgatactcgtattgatttagccttatcggataattcctctcagctcaaccgtttacgtgttgaggaagatgcaaaccatacattaacaaatagttttactttgcaatatggggtattagataacttaactttatccgcaactcttccttttgtagcaaagtctgaaattattcgtgatacaacaactgcaggattgggagatatttcatttggtgcacgttgggagccgtttcctttaaaacaaggtcgtttacctttggttctttttggtagcctgtcaacgaagactggcgatagtccttatgagattggtttagatgaattgtcaacgggtaaaggttattactcagttggtgtgggtgcaagtacccgtaaatatattgatccagtcgttctctttgcttctgcttctgccaattacggctttaaagaaagtggccttaatcaagcccgaggttcgcgtacattaacttcatttgatccagggattagcggtggcttttcttttggtttcgcttactcatttaactatgatgtgtctttaaccatgtcatatcagcaaagtttcaatatggatgccgaattccagtttgaaaatggagaaagctataaatcacctgatcaaagtagtgcgatgttgtcttttgctttaggtgttcgggtttcacctgaaacgattgttaacggtaccgttggtattggtttaaccgaagatgcgccagatatttcacttggtttgtcattcccgttagatattttaggttttaataaaaaacaaaaataa

SEQ ID NO: 45788 - DNA, 1665 bp, Acinetobacter baumannii
gtgaaatatcctaaattatgtcctttaacggcggcaattgttatctccggtttttctagctttgccaatgctcaattaggacaaaacttagctgttgatatccgctcactatcgatggggaatgctgtaactgcagaccctccaggtattagtgcagtccattttaaccctgcagctttagcaaaaattgatgggctgcaaacagatgtgcaggggattcttgctaacttcgatattcaacgtgagttctccgctccacctggttataacatttttggttattccgatgacccacttgtttgtaatgatggtcctgaggtttcagctaatatttgtacagattttaaaggatcagtacatggtgatgttgaatatgcaagtttatatgtaccaattcttaaaaagatggttgatcttggggcgggttatccactagttgcccctacagccggaattgcctataagccaccaggatcaaaagtcacctatgctacagctatgtatgcaccattagtcgcaggtttcggagctgaaaatggtaatccaggcaactacatgggacagcaagttgcagttgagcggatcacttatttatcgccatcttttggttatcaggtaaatgatcatttatctattggtgcttccgtagggatgtcctataacgcaatcgcactgaaaactgatctacgttttcctaatgaaatgattggtgttttacgtatggtcgatgatgtggtgtgcgcacccttcaaagataataacgatatgattactgatttgttgttattaggaatttgtaatgctaaagaaggaatgaacccatttaataaaatgggtgccttacaagtttctttagaacaatcattaagtccaagctataacttgggattgctatgggaaccaacagacgattttggttttggtatggtatatcaaagtgcagccaagatgcgtctaaaaggtaaatatatgattgataatgccaaagcacctcaagagctagtacgtggcctgaattcttctgcaacaggccaaattttagctgctattcttggcttacccggttatgttcctgatattgagtccggtttggttgcaatggatcttgaatacccagcacattttcaagcgggtattaaatataaaatattgccagatttacaattaaatttagatgttggatggactgattattcggcatggaataaatttaaatttgagtttgaccgccaaatcaccttattaaaagttgctaaacttttatctaatgacgttactgataattctttagcattaccattaaaatttacatcgccgtggagttgggggattggccttgaatattcagcaactgatcgtttgaaattacgagctggttatgagcctcgtgccagttcaatacctaatgacaaacgcaataccatggttccaattaataacgcacaattatttggtcttggtgtaggttatcgttttgatgcagatacagatctagatctttcagtagggttccttcgtagtcgtgacaacatcccagcttgtacgagtactttatcgaataaatgtggtgtcgataatattttattaaacccttattctggcttagatgtaaaaacgaatacaaaagttacagtacttggtttgagctatagaacaaaatggtaa

SEQ ID NO: 45789 - DNA, 1296 bp, Acinetobacter baumannii
atggtaaaacaatataaagggatatttcgacctaaagtcgctatcacaactttatgcgttgcgatagccagtatttctgtatcttatgcagacggtttttatacaattattgggccagatgggcggcctatgattgtaccgagtaaaagaattgatcagaaaaaacaacctatccctaaaatagaggaaagaaaaccacaaactcagcagaatccactaatagtagattctgtacaaaaaacatctaaagaaaaagaacaaattaaaaattcaccgaaaaaactggaacaacatgtccaagaaaaattaaatactgcaccgactgcaccgactgcaccgactgcaccgactgcaccgactgcaccgactgcaccgactgcaccgactgcaccgactgcaccgactgcaccgcaaaaaactcagaaaaatacaaaaactgtttcagtagtcagtgatgatttaaaaacatccccagaaaaaaataaaattattgagagcggaaatgccccttcagtatctaataatgaatggcaaaaaaagttagttctcgttcctccaccaataaagagtacatctcaagctgcaccatcctccgattcttcactcgataaatctaaatttacaactattgatggcgtagagtatgtaaataatgaatatcttgaagatcaagaatttaaccttgaaggtaaaaagcggttttaccttatgcctgatggtttggggcgcactgaatcagtagagcggaaaaagggtgtaagtcgatcaactttagatcagcttttcaatcgacaaactcaagaccaagactctactgttgttttagcaccaacgtatatgcgtttgtcttcacaagagctagaagcagcttttgaacaagataagtgctttattaaagattataaaaaatcaattaaaacgcttagcataaataaggaagtaaacttatggccacggaagccattgaaagaaaagtttgaatatgagttggtacagttaaatccttctgttcagcatttaaaagttatatcttttgcttctagtaatgagaagcctctatattattggccactcgttgtatttttggatgataaaggctgtattttggaaggagtgagcgggtttaaaagcaaatcttatccttcgactatgttacagcatgcatcgattcaaggagttttaaaagtaccgccttcagcacattatattatgatgacgcctttatcttctgccgtggatgttacagaaaaagagttaacaaatcagggacaaattcaaatttcggtattacgttaa

SEQ ID NO: 45790 - DNA, 1950 bp, Acinetobacter baumannii
atgaataaaaaaattttatggccttttgctcttaccacaattgcattgatgttaaatggttgtggtggaggaagttcgacaattaatgaagatccaaattctggtactaataacggaaacttaacttctggcagttgtacaccaactactagtgataatggtgcagaagattcaacttgtttgcaatttgctttagattatccaatagcgggtatcaattttgattgtagttctgccacaaattttcattatgcgactaaaatttcaggaaatgctgtaataggatcctgtaaggttggtgatacagcacgtttttatattcaaagtaaagataataaaaaggtttttttaggaaatgttaatcttgatacgattgggaaatttactgccgttaatggtaagtctaaagagatcaatccgatatatttaagagtgttggatttagcaagtggtattacaggtaaagcaccaacaacattagataaaaatgatgaaacaattaaagtggcgattgctttaataaaaatcttccaaagcattggtgtagaaaatggtgataatctcatcggtgatatacaacccactcaacttacagatataaagaaagatcaacttactaaaatttctcagagcgtaactgctacagagttccaaaacggagcttatgcaagtattttgaaaccgtggttagatgtaaatcaaatttctgatgatgatgcatataaacttttagtacaaacgactaatttaagtaatgctggtgttttccaatcattcaatttatttattaactcaacaatccttcaaaattatcaagtgtttaatggttgcaatagaagtactcaggaagaatgcttgaataatacaattaacttacgtcattcaacagatgatctttatttattatcggaccgtcaaggttatacgttgggctatggtttacagtggaagggaagtgccattgtaatagataacaaagtacaaaatccgtatttgttaactacaaaagttaaaccagctaaactcaatgtaaatgcacaaaataattggttaaatcctgttagtcgagaaattcagtcaactacaccactccgtttgagtttttcaaataatccaaacgaagatctacagatttatcaaggaaaattctttaatgattatggagtggcgggtacagaagcattctataagtatttgacgaagctaagtacaggtaatccacaacactatggtctctggcgccaaaatgttgatggtgataactacaatggggtattgagtattattaaaagtaatcctattagttatctagagagaaatgtttttaaaacatcagggaatgtaaagacaggagaaaaatatattttccctctttacgctactttaacatttaatttctcagataccactatccaacctgtaaatttaggtattgtgattgatgagcatggtgatattcgtactgatatcaaacctaattcgacaacaacggatatgtctggtcaatgtgctacggtatcagatgcaagtttaattgataacaatggtatgcaacaatatcgaattggtaccacagcagcgacatttaatgatcctttaaatggtgatcaatctgtttatgttcgtatgattttatctaatccaaaatttgcaaatattgatggtgtgatggttggggtaacttttgtaggcgtttctccggggcctgcgaaattgaatctatttaatttattggcaaataaggtggatagtacaagcattaattttgataataatacggcttggtttaatcaacatgcggcagctcaagaaagctataatatgcttaaggatgtgcctgctccaaccgctgcggataaagctttggctcaacgtaaatttggtacagtaacaattaaacttgccgatcaatctattccagcttgtaaagcaattaaaactaagtcttaa

SEQ ID NO: 45791 - DNA, 1389 bp, Acinetobacter baumannii
ttgaaatttaatgcattaaacttaaatggtaatactcctaaatgtgatataccgacagaagtaatttctacaggcaatacgaatattgatataaaaaatgaagtttttagtaatttattagaacctttaaaagaagctaatgaaaataatggttttttaccaatttactatcctaaaaataatttttcagcgacagatttaattgatgttgatttggaaaataagggtacatgccaaactcaggaccaacgtggattatcgagattagtaagtaatacgtactattatcaaactctagaaaagagtaaaaatagttgtgatattggttcagttgaattaatgaagcttacagcaggtgacctagaaggtttaagtaatatttcatttacaacattattagaaacctatcaaaaaagttacgacttatatgatagtttgctcaaagatccaacaactccatcaaattttattgtttattataaagtccgtttagctgaatttaaggatttacttgataaatttaagaatgacagcgcgcatataaatacaaaatatcgagctatttatattgatttaaaaaactatggttttccactaccaactgaagattcaaatcatgtattaaagttttttaatacgacggattatagtgttaaagcagagccattaggtgtggggcagaaagtagaagatttaacttcagatactgagactaagaaaaatcaaagatgcgaatggaatcctacggtacagcaaattcttttttatcgtgttgatgatgatattacttcgagtacgacatatgagttttgtaaatatacaattaccactaaaacaggtgtagagcttagtagtggcctaattaaggcgaaatttggaaatataactcctgtttcaggggatggcacgataacattcaaatatttagctaatgaaattatcccattaaatttacttaaatatgcaaatgatgatggtgatggtcctgttggtacgcttgttactaaaccgaataaacctccattttgggtaaatgacaaaggtgtagagttaccaatttatttaccaagtaaaaactcaaaagatggaatttttacagtagtaaaagcagatcgcgaaggtccatgccctggtaaagatagtaaaaatacatgttatggtggcaatatctatattcaagcgaaaaatgtatttaatacctttaatgatacactaacatattatgtatatgatgcagatggaactatctcagctaaggccggaacaattaacttagtaagtacagcaactacaactgatgattcacgtggtggtgggggtggaagtattggaattctttctatcgcatcactactaagtttaattgcttatagacgttatcgtaagtga

SEQ ID NO: 45792 - DNA, 240 bp, Acinetobacter baumannii
gtgcctgcaacgctactcattagtgaaaatgatccatggttagacttttttgatgctttacagcttgcgaaatcttggcaattaaccccgattaaccttggacaagtcggtcatattaatgttgcttcaggcttcggtccgtttcctgacttactgaatcatctacttcctgaagactcgatgtgtagccactcatctattgatccggtaaagacacatttctctttgaaatttgcttaa

SEQ ID NO: 45793 - DNA, 3999 bp, Acinetobacter baumannii
atgaaccagtttgtaacgaacacgaaaaatgtaattcgtggaaagtatcatccggaatttttgcagaatgaagtcttagccgatatttttgctcatactgcacaaactcttcctgataaaacggctttaattgaagcagataaaacgctgagttatggtgagctgtatcagcaagccttaattatggctcaacatctggctttaaaaggggtaaagccaggtcatattgtagggctatggctgccgcgtggtattgagcttttaaaagctcaactggccatttgtttaagcggtgcagcttggcttccttttgatatggatacgcccgcggaccgtattgcggtatgtcttgaagatgctgaagcggtaggaatgattactacagatgaatggtatgaacatttagctgaagtgccgcaaacaaaatggaccaacaccgagctgcaaaaaccattaagcgaaagtgtaagtttagcgaaaaccactccagatcaacctgcctatattatttatacctcgggttcgacaggtaaacccaaaggaattgtgattactcaaaaaaatatttgtcactttttacgtagtgaaaatagtattttgggtattcaagagcaagacaaggtctatcaaggcttttcagtcgcttttgatatgtcgtttgaagagatttggctttcttatttggtaggtgcaacgttgtggattgcaccgaagtcacttgtcagtgaccctgagcggttatgccaaaccttaaagcaggaacaaattacagtactgcatgctgttccaacgttacttgccttatttcctgaagacgtacctaatttaagaattattaatttaggtggggaaatgtgtccggactcactggttgaccgctgggcattacctcatcatcaaatgtttaacacctatggaccaaccgaaaccacggtttctgcaagtcttgagttattagaacgcggtaaacccgtcaccattggcaagcccttaccaaactacggtatgttggtcattaactctgaaagagagttgctggagcaaggtgaaacaggggagttatgtatttttggtccaagtgtggcacaaggctatttaggacgtcctgatttaaccgcagataagtttattgaaaacccttgggcaatgagtgtagaggaagaattactctaccgtactggggatttggctaaaattgatgagtttggtcaagtacactgtttaggtcgtgccgatgaccaagttaaaatccgtggtttccgtgtagagcttggcgagatcgaagctgcgctttgcgatattgatggaattggtacggcagccgttattcttcgtcctgaagacggcattgatcaacttattgcgtttattgcgccagaaattgatgcaaagcaagctatagaaattaaagaactacggcataacttgagtcagcgattaccgccttatatggtgccaaatcgttttgagattattgaagaagttccacgtctattatccgggaaaattgaccgtaaagctttaaaagcaagaccgctcacaagtgtggtagatcgcagtgaatctgaccagccacagaacccggccgaagaaatcctatttgaaattttgaatcgcttgttcccgaacatgccgattaaactcgattcagatttcttcgatgatttaggcgggcattcactactcgctgctgttttaatttcaaatctgcgtgagcatgcggaatatagccatctgaccattcaaaacttatatcaagcgagaagagtaggcgcgattgctgcactcatgttagagcagcctgaacctactttatttgatagccaaattggacaagataaccctcgtaatcagacctataaatggttatgtggtattgcacagcttgtaactattccggttttaatctcgattaatattttgcagtggttagcgccattctttacctatcactactttaccggtggaactcgcgacagtattccgtatgcgattgcgttgtctttattggtgtatgtcagtgtcattatgagcagttttgtactgtcgattacggtaaaacgactattaatgttaggaattggcgcagggcgttatccattatggggattaacctatttccgttggtggctagcagaccgtattagtaatatttcacctgtctatctcttgtcgggttcgactttacttaacttatatttgaaagcacttggtgcaaaaatcggtcacgacgttaccattagttctgtacatattcgtatgccatctttactgactattgaagatggcgtgagtatcggttctcaggtgaatttagaaaatgccaaagttgaacatggccacttggtattaggttcaattcaccttaaacaagacagttatgtaggttcgtatgctgtattagaagaaaatacagtgttagaaaaacaggcccatgtaaatgccttaacttcaattgaatatgacacggttgtacctgagggcgaaatttgggatggaacacctgctcagaaaatagggcatatagatgagcaagctaaattgccagagcgtcctaaactatcgtttatacgtaaaattgctgaatatggatactatggcgttagcgcattaattattgcctgtcttttctttattccaatttttccaagcttccttttggtcgactggttagatgtaaatgtatttaatattaacccgaacaaccatttgcaaatcgcgctttattatttcattttagcgattccggctagtgcaatgatgatgatgattactgcggtgatttcttcaggtttacgtaaaattgcattgccgcgtcttgaaaccggaacctatgcggttcatggcagcacatattatcgtaaatggtttgcggcccaaattttagaaacgagcttacaaaccttacatggcttgtttgccaccatttatgcgcctacatggttccgtatgcttggagcaaaagtaggtaaaaataccgaaatttctaccgcaaccggcgtcattccagaaatgctgactttgggtgaagagagctttattgccgatgctgtaatgctgggtgatgaagagattaaaggcggttggatgtctttaaaagcaaccaaaatcggtaaccgtagttttgtgggaaatagtgcttatattgctgatgggacagtgttaccagacaatgttttaattggcgtgcaatcaaaaacaccagataaccgtgaaatgtatgatggacaaacttggtttggttctccggcgttgctgttacctgcacgtgaagctgctgaaaaatatcctgaccatttaacctttaaaccaagtattaagcgccgtttaatgcgcgggtttattgaagggcttcgtattgtattgccggccgcacttgcgattggggtgggttatatgatcgtgctagacgttattgatgtgattaataactacaatattgagacgggtctggttgcattaacgctcgcaggactgctttatggtgttggctgtttccttattgttgcgctattaaagtggattttgattggtcgctatcaaccgcgttcgacacctatgtggaccatgtttgtatggttaagtgaagggattaccagcctatatgaatcagttgcgattcctaacttcttaaactacttaagaggaacaccaatgttgccattcttcttgcgtattttaggggttcgtattggtaaagacgtttatatggatacagctgatattaccgagttcgactgtgtcagcattggtgaccgtgccgagtttaatagcttctcgggcccacaaactcacttgtttgaagaccgtattatgaaaattgggcaagtaaatgttggcaatgatgtagtggtcaatgcgcgcagtattattttatataacgcaaacgtgagcaatcatgcagtgttagggccattaacactggtcatgaaaggtgaaaatattccggctaaatctgcatggattggttcaccggctgtgccttgggttcacaaataa

SEQ ID NO: 45794 - DNA, 1086 bp, Acinetobacter baumannii
atgaatacagatgttgttgagttaaaaaccattaatgaagttggtttaccattagatcctgagacattttctagagtaatcctagattttttagggcgtaaagaaaatttatcttataaaagtcatgataattttattataaatcttgaagatatatctcaatttaatcatattttaaatagtaaaatttcttatcaaaaaaatattattcttgaacatttttcaattaactttggatattcagatggtacctttcgagaaataaatggcagtgaggctttgagtaaatttctggaaacaaggtcgattgatacaactagtataaatttaaattggaaaattattattaagtttgatcacagtcctactatagaaacgcaagagattgatttattatttatttcttctatagagaaaaaaattaatgatgaggatttttcatatatagagctttctataaaccacactaatcagtcatgggccttggatattttaagtgcatttaaggataaaattaatgagattgctataaaaccttcaatattaaaagaaaaatataataaaataacagataacttattttttgcaactatagtgcctatgttttttattgtgttaggtttaggtttaactatccctgttgcacagaatgaaacgcaaagacttagacaagatttagttcaatataatttgaaacagaactataaagatgatttatcaaaagttgttgggcttttaaatattacaactcttgaaagatctgaattaaaagaattaggtactaaaaataaggaaatagaaaagataattgaaaaaaatcaaaaaaatgttgcattacacttaactcttatagttttactttttataattccttttgttgttcgtaaatatattaaatatagtattaattattttaatcataaaagctttattttagtaaataattattctcaaagaaaattgcagaaatataaagatgataaaagtaagataacctatataggatttactgtctttgtaacttcaataacattttctatattggcatccgtaatttttaaggtattagatgctcttgttttttaa

SEQ ID NO: 45795 - DNA, 909 bp, Acinetobacter baumannii
atgccatcccaaaccaacttggcttcaacttatgtcttgcttgtatttatctgggcaacgacacctttagccattgtatggagcgtatctgacttacatgtcatgtgggctttactgttacggttttatatagctttgcctctgtcggttattgttttacttgttctaaaaacttcttttccaactcataagcaagctttacatagttattttgcagggtcttttagtttaatcggctcgcaaatttttacctatgctgcgacccaatatttaagttctggcatgattgccttgatgtttggtctagcgcccattatggctgggttgattggacgttttgcttttggtcagcatctttttaaattgcagtggctaggtatggctgttgctgtttgtggactagcgatcatttgtttaaatggttcaaatcaacatgtgcatccatttggcattgtcttaatgttggtcagcgtttttgtttattcattttctatattttgggtaaagaaagtgaatgccaaaattcagccaatggctcaggcgactggttcgatcttggtttcttcaattttggcaagctgccttattccatttatttggcaatatgcaccgactcatttaccacaagctaaatctttatttgcattaatttatacagttctgatggcttcacttgtggctatgttctgttatttcaaacttgttcagaatataaaaccgaccactttatcgttaacgacagtcattacaccaatgctagcaatgatcattggagctgttttaaatcatgaacaattgtcgattatggttttcgtgggagctttcattatcttatttggtctatttctatatttttataaagacattcaagcaaatcgtaattttgctcaacatattaagtctaagtag

SEQ ID NO: 45796 - DNA, 1404 bp, Acinetobacter baumannii
atgcctattcatacggaacatgatccacgtctgaaatctacactcaaaacccgccacattagcatgttagctttaggtggtgtgattggtgctggcttatttgtcggttccagttcagtaatagctgcagcaggtccagcagccttcatctgctacgctattacaggaattatggtaggtttaattatgagaatgctaggagaaatggcggcagctcgcccttccactggctcatttgtagatttctctagattagctttcggcaatctcgcaggcttttcaactggatggctttattggtatttctgggtagttgtcgttggctttgaagctgtcgttggtggtcaaattattaatcagtggttaccagatattcctgtttgggttatctcacttggcctgctaatcttgatgacctccctcaacttattatcagtaagttcttttggtgaagcagaatattggtttgcgggcattaaagtagcagctattgttgtattcttggttatcgttggtgcatatgtatttaaagtatggccaaattcaacagcctctttttctaatttaactcagcatggcggtttcttgccccatggcacattagcgctattctctggtgtagtttcagtaattttctcaatgagtggagtagaagttgctactatcgctgctgctgaatccgataatccttcacaaaacattcgtcgtgccgtaaatactgtaatggcgcggatcttagtctttttcgttttatcgacactgttcattgttgttgcacaaccttggactaatataattccagggaaatcacctttcgtagcaacacttgaaaaaattggtattcctggtgctggtacaatgctgacagtagtaattcttgttgctgtattatctgtactgaacgcaggtttatacactgcatctcgtttactgcatgtattaagttcaaataatgaagctccaagttggttagctagaaaaaataagcgtggtgtaccagtttggggtgtactcacctctactttggtcgggtatggatgtgttgtaattgcggcattgtggccagacactgcattccaatttttacttgactcctctggtgctctattcttatttatctatttgatgatttgcttatcacagttaaagttacgtaaaaaatgggtacaggaaggaactctaacctttaagatgtggttgcacccttggttaccgttatttgtaactctctgcatcgtcgctgttttagttagtatggggatcaatccagctacacgacttagcttattacagtccttaattgcaatctttgttattgtaattgcatacggcgctatgaaaattgttagccctaataaggcatcacatgtcccacaagttaatcccttaagacatactaaataa

SEQ ID NO: 45797 - DNA, 1497 bp, Acinetobacter baumannii
atgagccagatcgttggacattttatcaatggcgaagtagttgtagatgaaagtaatactcaaccagtattcaacccatcaacaggtgagatcagtaaacaagtaagtttaggtggagctaaaacaattgatgaagcagtcgcttcagctaaagcagcgtttccatcttggagtaaaacacctccactaaaacgtgctcgcatcatgtttaaatttaaagagttattagaacaaaatactgctgaaatttgccgtttaattggtgaagagcatggaaaaattattcatgatgcagcaggcgagttacaacgtggtattgagaatgtcgaatatgcatgtggcgcacctgagttattgaaaggtgagcatagtcgtaatgtcggccctaatattgattcttggagtgagtttcatcccctaggtgtagtggctggtattacaccattcaactttcctgtaatggtgccgttatggatgttcccaatggcaattgtatgtggaaacacttttgtcctaaaaccttctgagcgggatcctagcgcgactttatatattgctcagttgttaaaagaagctggtttacctgatggtgtacttaacgtagtaaatggtggcaaagaagctgttgacgctattttggttaataaagacattcaggcagtaagttttgttggttctactccaattgctgaatatatctacagaactgctacagccaatggtaaacgttgtcaagcgcttggtggtgcgaaaaaccacgcaattgttctcccggatgcagatttagacaatgtagtgaattccttactaggagctgcttttggttcttctggtgagagatgtatggctctatctgtcgcagttgctgttggtgatgaaattgctgacagaatgattgcagctttaaaagaggcaatggcaaatttaaaagttggtattcattcagataaacaaaatgatttcggacctgtaattactgcagaacataaaactaaagttattggacatatcaaaagtgcagaacagcaaggagctactatttgtgtagatggctcaaatctcgtccatgcagattatgaaaatggtttttatgtcggggctacattgatcgatggtgttaccaaagacatgagtagttatcaggcagagattttcggtcctgtactgcaggttatgcgtgttaagacaatgcaggaagcaatggatctaatcaatgaacatgagtatgggaatggtacctgtatttatactagagatggggaagctgctcgttattttgcagataacatacaagttggtatggttggtattaatattccactgcctgtaccagtagcttatcaaagtttcggtggttggaagcgttcattatttggtgatttatttatgtatggtccagatggcgtacgtttcttcactcgccgtaagactatcactcagcgttggccaactgcacaaatccgagagggtgctcaattttcaatgcctaccttatag

SEQ ID NO: 45798 - DNA, 351 bp, Acinetobacter baumannii
atgacaactatgactattgttaagcgcgatgaaattgaaaacggcaatttacctgctgcaggtttgcgtgctggcgctgatagtggaaaccctcagttaggagttcaaactcttgcacctaatgctcaagggaatttagggatttgggagtgtcaaccaggagggtggcctgttatcgacagaaaggatactgagttttgctacatcatatctggtaaagcaactctaactgatgacaagacaggtgaggctatttctgtaagtgaaggcgatttgataattttgcctgttggctggacaggtcgttgggatgtaactgaaacagttcgaaaaatattcacaatttattaa

SEQ ID NO: 45799 - DNA, 1389 bp, Acinetobacter baumannii
atgaatgaagcacttagggatgagctcatcaaattaccaaatattccatattggtatgaaagaactgatgaaagaccatcgttaaatactgagattgatgctgatgtagtcattatcggagctggttacacaggcttgtggactgcgtattacttacttaaaacgtcaccttctcttagagttgtgattctagagcgtgaatatgccggatttggagcatcaggtcgtaatggaggttgggcttctgccatatttccaatttcattatctaaagtagcaaaaaattcatctcatcaaagtgcgctatttttacagcaagtaatgaatgagacagtagatgaaattggtcaaattcttcaattggaaggtattgatgccaattattctaaagatggctttttatccatagctcgaacacaggctcaactacagcgtgcaaaatcttcagttaaggcttcgaaagattttggtctacctgatcaatggtattttcttgatgccaaagctacaaaatcaaagattaatgtagctaatgcattgggtgcaatttatacaccgcattgcgctgtaattcatccaggtaagcttgttagaggattggctaaaactgtagaaaaattaggagctaaaatttatgagaaaagtgctgtaacgaaaataaactcgggccaagttacgaccttaaatggaaaagttaaagcccctattattgtaaaggctacagaaagttattcatgtcaattagatggatacaaacgttcaattattcctttgtattcattagtgctagccacagaaccaattcctgtatctgtaagaaatgatcttaagctaaaccataggttagcttttaatgatatgaggcatttgcgtgtatatgcgcaaatgactgctgatgggagattgatttttggtgggcgcggtgctccttatcattatggttcaacaatttcacccgagtttgatctagttgataacgttcatgaaagtatccgtagcactattaatgattttttcccaacgttaagaagtttaaaaataactcatcgatggggtggagcacttggcgtcgcccgtgattggtcaccatctgtaggttttgatccgaatactggcattgcttggggtggtcattatgtaggtgatggtgtcgcgatgagtaacctttcgggacgaattctcaaaaatttaattctaaatattcaagaaccaattaataagctaccaatcgtaaatcatgcttctcctttatgggaacctgagcctttacgttggatgggaattaattttggtttatctgcaacggcgttcgcagataaagaagaaaacatgactaatcgtccttctactgttgcatctgcactagaagcattgactggcgctcattaa

SEQ ID NO: 45800 - DNA, 1443 bp, Acinetobacter baumannii
atgattaccattgatgaattggtgaaaaacaataatttaggcctaacttttaagtctggtagatcaggaggtaaacgtatagttaaatgggctcatgctgtagatttaccagatccttggcattggatatcacctggcaccctcgtaatgaccactggtggtggtttaccaactgaaccctttgaacagattgaatggttacgtcagctcgctgaagctcaagctagtgcccttgttattgcccctagagattttgcaccttctataactcaagagatgctagatgaagcaactgatttaggatttccaatattaggggctagttttgatttagagtttttaagattagcccgtttggtaattgagagcgttttgcaagctcaaagagaccgttttgacgcaggaaataagctatttcaagtctatactgatgcgttatgggaaagttcacaattagatgaacgattacagattatcgggcaaaagttatctttaaatttacaaatcttagataatgaaacactcacccctatttttaattttagtactccggtacaaaaagataatgttccctatagtgtgaaaataccgggtagaacccaaactactctaaatattattaataaagagtcacgtttttttgatgagacatttttaccccgcatattagctggcttacttagtattgagctagaacgtgaaatgatagaccgtgacggaattcgagaagaaggtgaggctttattcgatgatttgttaaatggggaaattgaatttggcgctgcaaaaattatgttagaaagacgtggcttactaggtaaattagtcactatagccattgatccatcaaacaaaggatctcgccaatacacagacattcaccatatacctgaattttataaaatttatccattattttctcgtgatgaaaatagaatatttgcagtacttcctgacgatagtaatttattaaatgcgcttattaattattttggaaaaggaacaaaaataggtataagtagtccaattacagcaatgcttggtttcaaagaaagtatttttcagtcatgtttagctttaggaagaatcaaagaaagccaaaccgacctaattcactacaaccacctagatctagaactagccttaggtcctaaaactgttgcagaagcaagagctgttgttggtcattattttggccgtattctagaatatgaacaaactaactccctaccattgctcaaaaccctagctgtatttttaaaatatgatggcaattggaaggtaaccgcttctaaattagatattcatcggcagacactagtctatagattgaaagttatagaagaattaactggcataaagcccacaacaagcttaggtattacacggttttggatagctttagaagcagcaaaaaccataggattgttacaggattcttaa

SEQ ID NO: 45801 - DNA, 555 bp, Acinetobacter baumannii
atgccacattcagatctctcatttcgtgctttaagtgtgcttcatacctctcgatatctttttaataaatatggctttcacaaagtcggggttgaccgaattattgaatcttcaaaaacgcctaaagccactttttataattattttcactcaaaagaacgcctcattgaaatgagtctcacttttcaaaaagatggccttaaacacgaggtgctttccattattaatgttcaaaaagatttaaccgtaattgaaaaatttcgcaaaatttattatttacatgccgacttagatggactttaccatttgccatttaaagctatttttgaaattgcgaaaacacatccaaaggcgtatcaggtagtcgttgaatatcgaaattggcttattaatgaaatctataatttgcttttaaccaccaatgccaatgctgcaaaacaagatgcacatatgttcttatttgtgattgatggggcgatggttcaacttttagaccccaataagcaagatgaaagggagaggttacttgagtattttttgctggggtttatttaa

SEQ ID NO: 45802 - DNA, 513 bp, Acinetobacter baumannii
atgcaacctattcgagttatttataaccaagcatatgaattattaagtactaaacataatactttaggtcagcctaatttgaatgaaccgattttctctaaagaggagagagtggtcgtagatatttcaaatcctcatgctttacgccgtgctcttttggactatacagagcaagtaattcatcttgaaactcagaaccagtgtttagagcgaacgatcgacaccattactcaaacacctgcaggagtgaaatttcagcaagcatgcaagatcttaaatattaaaagacaagtattagctagctggctgcgacaaaatggttgggatcgtcatcttaataatatgcgtacttcaacatactatagtcaggcacgtgggtattgtgaaaccaaatatgaaaaggtgattcgggttcgtcctaacggtgaacagtatactttcactatgatagagttttttattcttcctaaggggatgacgattttagctaaagcttttggtaaggatacctaa

SEQ ID NO: 45803 - DNA, 762 bp, Acinetobacter baumannii
atgtcaaagatgcgagaattacagagtagagcaggaaacccggacctaagtcattggaagaataataagctattttcaatcgctgaagcagcattattaacatgtgggattgacccattagatcataatcataattttgaaaataatttagttgcagatttacagtttaaaaatgttgtaaattggagacatgctattttgcttattagagcatttaaagaagggatttgcacacatgagataaaatcaccatgtgtcctattgaatagggaggattatcatggtaacggatatacggaatcaaaagagcaatcagctttaggcataagtgatattggagatatatgtatttttggaacaagaatacatcgagataatttacatatatggcttaattataatgactattttgagcctattcagtcacatactatcagtgctcaaaactctacatatccgtcacatgagccaatacaacttaatagcattgtctcactaccagcacctatttatagaactcccgcattagatgctgtacaaggggttgttaataaattttgggttagttatgaccctgatggcaatcaaccaccaccaaaacaaatccaagttacggagtggattaaagctaactacccagatattcaggctgcagatatttgtaaatatatagataaaatttgccgtcaccccgaagcaaaaaaaggcgggaacactaaagtaaatcaacaaattaaaatcaaaggggttactacaaaataa

SEQ ID NO: 45804 - DNA, 141 bp, Acinetobacter baumannii
atgtctaataaaattaatcaaaccagaaaaatcacttcaggtttagtaaagtcacattataaaacgctgttagacgcgctaaatttaattttgaatatcattcgtcttttgcttgaaatcatcaatattttatttctatag

SEQ ID NO: 45805 - DNA, 480 bp, Acinetobacter baumannii
atggccaaaaactggatgttcaaaggttttcttggagatgctacaccggatgatgaaatacgtgcttgtataaatcaaggcaagtttatgatcgaaattgcagaaaaaataaaaaataatgagttgttaactgatagggaaagggagtgggctgtaggtattgtgaaggctagaggtaaggaccaaataataaatccaacaaaatatatttctaaagaagagagtggagctcctccagatcctaggagatatgaagctgttctaagatattattgctatctaaaaattctaaaggtccaaagaagagcgattgaattagtttgtcattcctatgaagatataacatcagataatttaaaaagttggataaagcaagaacgagaagctggacagccaattaaaaggcaaacagacgatatgattattaataattcagaaagcataatagttagttatgaaaaaattaaagggaaaaagtaa

SEQ ID NO: 45806 - DNA, 1746 bp, Acinetobacter baumannii
atgatgaataatgcgctttcggacatttttcacaatcaaaccgcacttactcgtgaacggttaagcttttgtgaagccaacattaaagatcttaatgagtgggtcactaccctttctattatgcaattgggtgatacttcaaaagcgctatttacagcaattttggaactgaatgagttaaattgtagtgaaaccttacgctttgacttaattcagacacttcacccaaccattaataatgtgttggcgagtttagaaaaaaacttctttaaccaaggtgtcattagtaccgaccgtaacgagcacattattgagctggccatgcttctgcgctgttattttgccagtatttatttaaatattgcgcaaacaagccacgaacagctacaaaagcagaagttttctttgttctcttttaaacaaaagaaaaacttacaaaccgcacgaattctggcgacattccacgcattgcagcagttgaccaatcttttatatcaacagcatatgctctatagcgaacctgtcaaaggtcaatggttaattgcccaccagctttatgaaacagcggttcaatacaaatatcatttaaccaatattaatcatattcaaggtgtacagcacccgttagccaatattacgcaggcttatgcacagcttattttattagatatttttaacaccaatcagattcgccagtcagaaattcaagccctgtttcaatgtagttttgattgggcacgcatgattcagatcttgccgaaagacactgcttcaacaaagtatgtggtggacccaactaaagatcatccgcctgtatataacaaaaaacaaagctcgaatttcaacccaagtatttttattagcacgcaagctttgcttgagcatgtcactgccaccatgcataaaaatgctcaatatatgtctaaaaatgaaaagatttatttaagtcccgcattaaagtttcacgttcaaacgattttgggcaccacagcacagcgccgtcatgagcgttatgaatataatgcagctttacaaatttgttttggcttaagtactgcacatttctatttgtctaaagccaaaaactttgaagaaacgctacaactaagtaataactataatttacaaagtgaatcgaaagtcttatccaatttagagaaaaaagaacaacaaacctcgtcttatcaacgcttaagccgtgagagtaaaaccatttatcaaactaccgtacttgatattagtgttaatggctatcgtattaaatggtccggcgaagcacctaaaaacttaagaactggcgaatatattttggtgaaggaaacgctacatggtcagtggcgtggcggtgtaattcgctggattaaacaatctacagaaaaaagtctggaactgggtttagaaattctttcacaagccatgttcccttgcgctgtacatattcaggcagagcgtcatacacgtaattatcaccctgcattattactacaaactcaaaacttagaagaaatacaaaacacgcttattttaccggggtctcaaatttttagagagcaacaaacaattcatttacgattggggacagaagaaatcaaagtgtatctactcaaagcacaactcattactcaaagttttattcaatttcaatttgagcttctgaatgagcagcaacagtacctgcttgatcagttcatgctgaaaaagaataacaccgtgaatagccaagatttatgggaagcattaaagtga

SEQ ID NO: 45807 - DNA, 789 bp, Acinetobacter baumannii
atgaaaatcgtcattctcaacaaaccatatgacgttctctcccagtttcgtaaagacgaagcacacatgacggtctctgactttgtagatgacccgactttgcgcatagcaggccgtcttgatatggactctgagggtttagttttcttaactgatcatggtggtttgaatcagttcattaccaaccctgcgaataaaaaatacaaaacgtatttagttcaagttgatggcgatgtaacagaagaagcactcgagcagcttcgtaagggtgtagagcttaatgatggtatgactttaccagctaaagcaattaaggtaagtgagcctgaatggttatgggaccgcgatcctcctgtacgttaccgtgccagcattccaacatcttggattgaaatctctatttgtgaaggtcgtaaccgccaagtccgtcgcatgacctctgcggtaggttttccgactttacgtctcattcgtacaaaaattggtacgattgacttagttcaattgggattacaaccgggcgaaaccaaagaaattgagcctctactctacccagactttaaagatgttccggctgaacaaccttatcgttcacgttcatatgtgaaaaaaccaggtggcactggcggtaagccaatggttcgcaagaacaaagatggttctgcaaaaaaatctggtacaaagcgtatttggcaaatggatgaaagtgaaaaaccgcgtcgtaagactaacggtacaacgcgtccaaataccaaagcaccacgtggtcgtagccgcaatagccgataa

SEQ ID NO: 45808 - DNA, 2238 bp, Acinetobacter baumannii
atggctggtgaaaagtcaaccatcatttacacactgactgacgaggcgccattattggcgacttattcgctactgccgatcattgagacctttactaagccagctggtatcgagattgttaaaagtgacatctctgtagctgcacgtgtgctcgcagaattcgctgactacctaagtgaagagcaaaaggtatccgacaaccttgctgagctaggtcgtcttacacaagatccagatactaacattatcaaactcccaaatattagtgcctctgttgcgcaattgacagcatgtattaaagaacttcaatctaaaggttatgcaattcctgactatccggaaaacccagcgactgaagaagaaaaaacaatcaaagctcgttatggcaaatgcctaggttcagcagtaaaccctgttcttcgtgaaggtaactctgaccgtcgtgctcctgctgccgttaaaaattacgctaagaaacaccctcactcaatgagcgagtggaaacaatggtcgcaaactcacgtttcacacatggaagaaggtgacttctaccacggtgaaaagtcaatgacacttgaccgtccacgcaatgtaaaaatggaacttatcacaaacagtggtaagagcattgttcttaagccaaaagttgcgcttcaagaaggcgaaatcattgactcaatgttcatgagcaaaaaagcgctttgcgacttctatgagaaacaacttgatgactgccgtgaagcaggaattttattctcattacacgtaaaagcgacaatgatgaaagtttcacacccgatcgttttcggtcactgtgtgaaaatctactataaagaagctttcgaaaaacacggtaagttgtttgacgaattaggtattaacgtaaataacggtatggctgggttatacgagaaaatcgaaactcttccaacctcattacgtgaagaaatcattgaagatttacatgcttgccaagaacaccgtcctgcacttgcgatggttgactcagcaaaaggtatcactaacttccattcacctaacgacatcatcgtagatgcttctatgcctgcaatgatccgtgctggtggtaaaatgtggggtgctgatggtaagcaatacgatgctaaggcagtaatgccagaatcaacatttgcccgtatttaccaagaaatgatcaatttctgtaaatggcatggtaactttgatccaaaaacaatgggtacagtaccaaacgttggtttgatggctcaaaaagctgaagaatacggttctcacgacaagacttttgaaattcctgaagcaggtattgcaaacattactgatcttgacactggtgaagtgttattgactcaaaatgttgaagaaggcgatatctggcgtatgtgtcaggtgaaagacgctccgattcgtgactgggtaaaacttgcagtaactcgtgcacgtaactcaggcatgcctgcgatcttctggcttgacccatatcgtccacacgaaaatgaattgatcaagaaagtacagaagtacttaaaagatcacgatacgactggtcttgatatccagatcatgtctcaagtacgtgcaatgcgttacacacttgagcgtgtagttcgtggcctcgatacaatttctgtaaccggtaacatcttacgcgactacttaactgacttgttcccaattatggaacttggtacttctgcgaaaatgttgtctatcgttccgcttatggcgggtggtggcatgtacgaaactggtgcgggtggttcagcacctaaacacgtacaacaacttgttgaagaaaaccacttacgttgggattcgcttggtgagttccttgcgcttgcagtttctctagaagaaatgggtattaaagaaaataatgctcgtgcgaagttacttgcgaagacacttgatgaagcgactggtaaattgcttgacaatgacaagtctccatcacgtcgtacaggcgaacttgacaaccgtggcagtcacttctacttgtcactttactgggcagaagcacttgctgcacagaacgaagatgctgagttgaaagctaaatttgctccacttgcaaaagcattagctgaaaacgaacagaagatcgttgctgagcttgctcaagtacaaggtaaaccagctgatatcggtggttactatgcagttgacccagcgaaagtaagcgctgtaatgcgtccaagtgctacatttaatgcagcgctttcaactgttcaggcttaa

SEQ ID NO: 45809 - DNA, 1137 bp, Acinetobacter baumannii
atgaagaaaatttttatttcaattgtatttggtactcgtccagagctcataaagttggctccggtaattttattagcaaaacaagactcacgatttcaggtagaagttatttttacaggacaacatgatgaattagttcgagatgcgatagatttctttggggttgaaattgatcatcgtcttaaaattatgaatgctggacaaagcctgaatcagcttttaattcatggcttaacgcaacttgaaaatatctatacagatagtcaaaaaagagatgcaattgttattcaaggtgatactacaaccgtattagctgctgggctagttgcattttcaatgaagattcctgttgcccatgtcgaagcgggtttacgttcttatgatttagatcatccatttcctgaagaaggcaaccgccagttagtttctcgtattaccaaatggcattttgcccctacagaacaatcaaagcgtaacttgttaaatgagcagattccaccttcattgattacagtgacagggaatacggtagtcgatgctgtgtatttaggaaggaaactcatagctgaaaagacgggtttgaaaaatcaacttgagccttacggaattgaattaaaacaaaatgataaagttgtacttataactgctcaccgccgtgagaattttggcgaaggaattcagaatatttgtaatgctgttgagtatttagcaaaacatcatcctgatttacattttatttggcctgtacatttaaatcctgctgtacataatgtagtgcacgataagtttaaaaatcatgctcaaattcatcttgtgaagccactcgattatccaagtttattggccgttatcgaccgctccacctttattttaacggactctggtggtttacaagaagaaagcccatcatttaataagcctgtcttaattttaagagacacgactgaacgcccggaagtggtagaggtgggagcaggggtattggttggaacaaatcagcagaaaattattgaagaggctgagaaacttttaacggattcgcagcattaccaaaaaatggctcatgttgaaaatccgtttggtgatggatgtgctgcccagcgaatattagatgaaattgccagaacttataactag

SEQ ID NO: 45810 - DNA, 1503 bp, Acinetobacter baumannii
atgagttatctatttttatcgtgtacagaggtttattttaaaaatttttatatctcgccttcttataattttgacctcggtgataacactgacctctctgtaatcgcaagctatcaacaccgtgaatatattcgtcagcaaggtttacctgtaattggtacattaaaagacaaccctaatggacctatagatcgtagtttatatattggcgatcctaatttcggtaaatatgaggcagatgtttatcgcactggttatacgtttaaacatacttttgataatggctggaactttaaccagaattttgccgtacaaaaaaccaaaatggatggcaaagcagtctttgctcgtacaggtagtaacttttgggcaaaagataaacaaggtgaaattgattatacgactatcagccgtagaaataacagccgacaccaagttattgataacttaagcttcgccattgataaccgtttaaataaacagtttgatctatatggcatgcagcacgacattaatattggagtcgatgcttttcaggaaaaaagtgattacaccaatgataaatatgatattggtgatttaaatatctataaccctatctatggtcagaacgtgacattgaagcaaaatgtacgtgatatcaatcgtctcaaatatctagggctctatttacgcgaccgtattcagcttaatgatcaattacttttaagcttatcaggacgtcaagattgggcacaaacccaaactacaagtttagtaactggcaatgcgagtaaacaatcagataatgcatttacgggcagtgcttctgtcatgtataccctcaatgatattgtggcaccttatgtgagctacgctacatcatttactccaaatagtggtactgacgtaaatagcaacccatttaagccagaaaaaggaaaacaggttgaggtcgggatgaaattacaaagtcccgatcaacgaattcaaggtgctatcgcttggtatgatctaaaacgtcagaatgttttggttactgatactgcgaatagtggctataaagtacaacgtggtgaacagttaactcgcggtattgaaactgaacttagtgcagaaattttagaaggtttaaaattaacggctgcatatacctacacaattgatgcagaaattagtaaagatgcaaatgcaagcaatgtagggaaagcgctcgacaatattcctgaacacgcttatagcttgtcagctcgttacaaatttgatccatcatcaaaacttggttggtatgtaggtggtggtttccgaggtgaaacttataaaaccgttgatggtttagatgtgcatgttccaggctatacagtattcgataccgaagcgggttatgatgctgagcgttggggtgcccaacttgcgatccgtaatctatttgataaagattactatgcaggtgctctcaacgaaaatttggtgactttaggtaatccacgtcaaattaactttactgtgaaatttaactattaa

SEQ ID NO: 45811 - DNA, 576 bp, Acinetobacter baumannii
atgcaagaatttctgatttctacctcgattgttgccctcgctgaaatgggcgataaaactcaattgttggcacttttattatctgcacgttttcgtaagccaatccctattttaatcgcgattcttttagcaactttaattaaccatggtatttctgctgtgcttgggcagtggattacaacggttttaagccctgcaatcttagtctgggtacttgcggttggtttcattggtatggcgttctggatgcttattccagatgagcttgatgatgaaacggcgagtattaataaatggcaaaagtttggcgtttttggcgcaacttttattttgtttttcttggcagaaattggtgataagacccaaattgcaacagtcgctttagctgcacgttatgacagcattttctgggtaatgttaggcacaactttaggaatgatgattgccaatgcacctgctgtatttattggcaataagttggctgaacgtttgtctattgcgctcattcataaaattggcgcagctattttcttcattgtaggtgtttctacgctcgtacagcattacttcttttaa

SEQ ID NO: 45812 - DNA, 2223 bp, Acinetobacter baumannii
atgctgaagcagatcattttgaaaggttcggcaaagtcgcgtcaaaccgttggcgcaacgctggatatggtgacatttcaaggtcgctgtagtgtccgtgcacgtcgtttaacaccaacaccggcggttacaacggtagtagatgaagtaaagtggcaggcgctttatggtgcttatcctttgcaaagcacagtgtatgaacatgaaacggtttttcgtgcgcgcacttatgcaaccactggagctttatctgttaagtcccgcaagatcaattttgatcttcagcggatgttaccgacttttaaaaacggcgcaatgacgacagagctatttccaacatcaagctttgctgatgcattggtttcaatggcactggatgacaagataggccgccgtacgatcgacgaaatagatctggaaaatatctatcggacttataacgatgtagttgattattttggtacaccacttgcggctgagttctgtactacgattgatgatacaaacctgtcttttgaagagctggtcaccaatctttgtgatgccgtgttttgtactgcatatcgtcaaaataataagctcaagctttattttgaacgtccaactgataactcggtaatgctatttaacttcaggaatattattcctgatagttacaagcatgatcttacctttggcgtgatggatgactacgatggactgatctatgaatacacggatccggccgacgatagtcgtatcaatatctatctaccggataaaggggccaagaaccccaaagaggtgaaatctgtaggtgtgcgtaacaagtggcaagctcattttaatgcgtaccggctttggaacaagcttcgcttccagcgcaaatccattacctttgatgcggcacctgagtcagaattactggttttacgtgaccggatcgctgtagctgattatcgcaatggtattcatcaaagcggtgaggtggtacagcaagaaggtttaattctcaccctaagccatgatgtcgatttcattgcaggcaagagttatgtgatttatttgcaaatgggggatggtaccgtggacctgattcccgttacgccgggttcagccaagaacaaagtagttttagggcgtttaccgaacggggccttaaagcttagtcccgatgactttgtgaatactatctacaccgtagttaatgacgataccaaaggctcactgccttatctggttgcaaaaagagaaccggctgaccagttctctaataccattactgcaattaattacgatgaacgttattacctcaatgacaaggactttattgatgtgccggttgatgattcaccgatttacattcgatatgaccagctggatattaatctggcacgtttatatcagatgcaaagaggggatttgccaacgactggagaaatcagttttgtagttgaagcaggtgcactagtttcaagttcaagttcttatcgaccggaaaccagatttgtctataaattcgactataactctagtcctgcaaaacgagagtatatcgttccagctgcatcagaattacctgctattgatactggtgagttcccacctgatctcgtggtaaatttgactattaaaggtgctgttgttggacgtggtggagatggcgggttgccacatttggcatttggtgcatggtctaccgatccggattataactttactaaaacccgccgtgacggttttcagggagcacccggtttattaaaccggcacagtaaactaaacctgattattgatggtggaactctggctcgaggcggctcaggtggtggagcaacaccaagcggtatttatacaggattatcgtatggagttcagggtattcccggtggagctggagcaccttttggtcgggttatgaccggacaacctattactaacgattcacaagactggcgttggtacttaaatggtgactttatggttgtcaaagtaaccgatgccgaagcttcggtacccggtaaaggttaccgaacccaaaatgatcgatatggatctccattgtctggtgatggtggaggttggggccagcgcggtaccaagtccaccaatgatggaacatggaactggcaataccatggcacaactgaaggccagccggggccgggtggacctgcaattgttggggtggcaccacttacaactcaattgatcaatggagggaaaattctacaaacactttaa

SEQ ID NO: 45813 - DNA, 390 bp, Acinetobacter baumannii
atggaaccagtttcaacaagcggtttaacagcaattttaaaattttatggtgcagcaattatggtgacgttagcggttgctttagttgcagcagttgtattgatgacacgtatgccacgatcacctcaagaatgggctgtaggacttatttgtacggttgtatcaagtttggctggcggctcattcattattgtgaagtgggggcttcatgaatgggttactgatgtatggggaatgattgcacttggtgggttcttctttgtttgtggtttacctggttgggctttagtccgttggatctttaatttcatagataaacaggaagggaaaacgattgttgaagtgattaaagagtttaagaaagccagaaaagacattgaaaacagctaa

SEQ ID NO: 45814 - DNA, 312 bp, Acinetobacter baumannii
gtggctgttttttccacatcattttcacatgctttagctcccaaaaatggagatgagccaacttattgtgagcagattgtttcggtccatggtttattaactagagcacaatttgaatgtggatatagtgaatataacaatgagttaatctcagattcagccaagtgttttcagcatgaacttggcgaagaatatggaaaaaaagtccttatatttggcatgaaagaatttgaccgaaatgtaaagaaagacgggaagaataagatttgtaatagtttattaaaagaatttccagagtatgtaaggaagtaa

SEQ ID NO: 45815 - DNA, 327 bp, Acinetobacter baumannii
atgaaaaagctactaccaattgcatttttactcacagcatcatttgtaactcactcagccgatactaatgataaacactgtagagatgtgaataaacttgctgaaaatgtcatgctctttaggcaggaaggggtttctgtggttagacaaatggagatgatagagagtatcaaaccaagcagggatttcaaaaggttaatggagatgatggtcgaggaagcctataaagaaccaaagtttggatcagaagagtataaggcggaagcaataactgaatttgcaaacaattggtacattcagtgcaagcaagcaaatcgaaataaatag

SEQ ID NO: 45816 - DNA, 492 bp, Acinetobacter baumannii
atgagaaagattattttattgggtcttatttgccttcctgtattcgcatatgcaaatagttgcgaggtggcaaaaagtaaaattaatataagcggtttagcattgggtaaatccattttatcactgaaagcagaacatcctaaaaatttgagcatagatcatgagactaataaggcaaatattaactatgttcactctaatgaatttgaggatgcttttagtggaacaccagctaccaatgcgggattcatttcttttgatgggaatacaaagttaattaatgcgtttagcgttagttttggtcacttagataattttagtgctaataattataaaaatgggttagtggcgttgtattcactaccaaaaacagggtggatagaatcaaagagtaatggggttaaagtttttaaatatgaatgtacggattattctttagagattaattacaatccagaaagaagtagttttatgatttttaaggaaatttag

SEQ ID NO: 45817 - DNA, 261 bp, Acinetobacter baumannii
atggctagaagctcagacgttgaatacaaaatgcgtatgacgcaagaactaaaagaaaaaatacttgaatcagcaaagttaaacagtcgatcaatgaatgccgacattgttgcccgtcttgaaaaaagctttgaaaatcaaaattatgaaaaaactgtagaactgatccctaccgaaactctaatgatggagttagctagccgtatgaaaggttacaccattactgtttcagaaaaatcagacattaaaaaagcaccctag

SEQ ID NO: 45818 - DNA, 900 bp, Acinetobacter baumannii
atgtctagtttagcattaagttttaatgaagtgaaattcaatcccgtgccacggcaagatggccagatttggctttcttcaggtgaattggcacaagcattaggatataaacaagagaacgcggtcagtaaaatttttaatcgtaattctgatgaatttacggaaaatatgacacaaattattgataatcctcggctacccaatttgggtatgcggatcttctcactacgtggctgccacctaatagcaatatttgctcgtactgctgtagcgaagcaattccgcaagtgggtacttgatgttttagataaagaagttggcacaccagttgccaaaacccacaaatccgaacgtgaacccctaaccaatgctgtaaatcttcttgtagctaaaactaagcatttgaattacagcgatgcttataaattagttcatcagcgtttcaatgttcagcatattgatgaaatcccatatgacatgattcctgttgcagtggaatatgttcatcatctgattgcgatgtacagtagtgcagagaagaaggctcaaggttctttatttgataatgaaacattgggtttggttaaggatctggtagatgcaattatttcccaaaactttgtgacaagcaaaatctatcgtgcaatacacatgcttagtaatgaacaaggtcactacttagctgaatatgcgtttaaaaccaatattgcagttctaaaactcactcgaacaatggatttaagaggacctcttaatagagaaatcattagtgatgatttaaaaaccataagctacacaacaggtaatcaacattatggcgaccgttggtttcacccactgatggagtcaagtcgattgatgggagtacttgaaatttcaggtagtctgattcgtcactaa

SEQ ID NO: 45819 - DNA, 546 bp, Acinetobacter baumannii
atgaacatcgaacaatatcttgatgagttgatcaaacgagaaggcgggtacgtaaataacccagcagaccgtggtggtgcaactaagtatggaattactgaagcagttgctcgagcaaatggattcaaaggtaatatgcgagatttacctctggatgtggccaaagcaatttatcgcaaaaactattggacagccccacgttttgatcaggtgaatatcatttcttctgctgtagctgaagagcttctagacactggtgtgaattgcggtaccggatttgcaaaacctcttttacaacgtgctttgaatctcctaaataacaatggtaaagcagggtggccagatttatcagtagatgggatatatggtccggcaactcttaatgcactcaaaacttatttggtcaaacgcgggaaagaaggagaaaaagttttagttcgagttctgaatattatgcaaggtcagcgttacattgaaatctgtgagcgcaatccaagccaagaacaatttttctatggctggattgctaatcgagtatcaatgtga

SEQ ID NO: 45820 - DNA, 681 bp, Acinetobacter baumannii
atgaacgatcaagttttccaattacaaattgttataaatggaggtttaacccccattcaatctaagccagaaacacttgataaattagtaaaagaatttgctataaatcatttgttgtttccaaaagaaataactgaacaattaattgagattaattctcaggatggttctcaaacaaaaaagataactaaatttattgatttggttagtagcaatcaaaaatgtacctaccaaattagaaatgattcacttgtatttttaaattcctttgagaaaatagaggaattagaaagtatatttgaaaagttttttaaatcgttttcggatctgaccccatatataaactataaacaatcaaaaagattggggctagttcttattagggaggattataatgaggttacattacgcgagtattgtacttcagaagaattagatcgaaatgttattgagaatagatcgagaaaagttactcgttttgctatggcggaactaaatgaaatggtaaatttatctgtttcaaaagattatgtaactcatgaatcaggagtttctcgaaatactctagcaagtgtttatgatgttaatacgttatctactaaggatgtttttagatttacaagtaaggatgtagtaaagtttataaatgcttcaaagaaatttattttagaatcaatgtaa

SEQ ID NO: 45821 - DNA, 648 bp, Acinetobacter baumannii
atgaactattcaaataatttatctaataatactatgtatgaaagtggtaatcataaaaagataatcactaagtacgagattgaaacaataaaaacggtttggcaaaccgataagatacagtcttttttaaaagattacttaaatacagacgtagttagtattactgaccccactgttatagaacaaaagataggggaagagagcttaaagcaaattaaaagagaatttgatatttttaagaataaatttgataattttctgagatatgaagatgtgccagtcgattatgtttcacctattgaaaatgaattaatcaacttttataaacatagtaaagttgaagttcaagaacaaattagccaatggattattgattcttttgataacacaaaggttcttcttaatattttaaaaattttaggtaatattgctcctgattttattgatcatcaatttttaactaattttcttatcgttcttaatcataaagatactgaaatcaaagaatatgcattaagaattcaagagaaattaatgcttccatcatataataatgtactgaagcactctaagttaactccaaaatggattgatgactatagaaaagaattggttgaattgtatgaagaagataataaaggtagttaa

SEQ ID NO: 45822 - DNA, 594 bp, Acinetobacter baumannii
atgactatttttgtaagaaagataagtaaagcaaaatggccttctgaagaggaaattgcagaaaaagcactggattcagaaattataccttttgtcagagccgatgccttaactacttgtttaaaaacttctcaaaatactttatctgtttgggcagttgaaaattgtactgatgctgaaatagagaaagctattcttgctttgattaccaatacgaaattagaaagacttaatcgaattcaaattgtttatttttcaaaagaagatgtagatagtttagggttgccgattgcagtaacggaaggagatacaattattgaatctttgtctaaattacataatgatttagttgatttaaattatgaaaaattgggaaaagtatctcaattgattatttcttccttacgatctgaaagtgtcagaacttataatgaaagaaaattaaaagatatgcttttaaaggctattaatgaaggtatagttgaccaaaaattattacatccttcactacaatctaaattaggtttgccagttttagatcaaaatggtaatgcacttattaaacaggaaaacggcgaatttgtaaaagtttaa

SEQ ID NO: 45823 - DNA, 150 bp, Acinetobacter baumannii
atgcaggctatggatggtatccatagtaagtttggaaagaaaaaattaggtgtcggaccatgttttgttcctggtcggaactggtcgatgagtagagataaacttagcaggaatccttttaagtgggatgaattattaactataaaataa

SEQ ID NO: 45824 - DNA, 1707 bp, Acinetobacter baumannii
atgtcaggattacgttcagaacatatcagtaatcgactgtttttcttcatgttggtcattattttgtccttactgtttatggcggttccgcttattgtcagcagttatcaagaatatttaaaaactaaacaagctttggttgaaattaaaagcttaagatcaattgctgaagttgcaaataaagtctctaaagaacgtgcgcccgcaaataaattaatgtcgagtaacgctgccgactttttaaaaaatcaaaaaaacttaaaagaatatcgcctctctgttgatcgccaacttaatgaaactattcatattttaaaagaagaaggttataccgatttagcaaataccttagatactaaatttagagatgatttaaaacaggcgcgtgctgtagttgactattatgttgcaactcctgaacaagcgagaagctctatacaattcgataatgcaattttggctatgtttggagcttgggatagccgccgagaagttttacaaaatttgatgctacagttaaaaagtaaagatagccaaattaacaattattttactttgattgtggttttgactgatatgcgggatcaagctggtcgtaccgcatctaatgttattgcgcctgtgacctttaaagaaactatacctaatgataatcgggcgcggtctttgcagactcagcagcaagcacgctacttatgggcacttgtagacacactacagtcagagcaagctaaaactccggaatatcatcgcctttactcaagggttaaaactgaatttttagataaaggcgtacctattgtgggtcagcttttagatgaaagccaaaagcaccaagcctatcatttaaatggaacagagctgacagaccaaatcgttgataaatttaccacggttattgatttgcaaaagtttttacttaataaaagcgtcttaattgcatctcaagaaaactatttagcaaaaaagaagtttttccttactttactcatttcaagcatatccttagcagcagcgttacttacactaatttatgcaaagagaagggtgtttgagcctcttattcaggcccgtaccttaattcttgatttatctcatagcacagattacccaatagatgagttgaaacctaaaaaaggcgaatttatttcgttgttcgaagctattgatcgtttacaaagaatgctcaagcagcgagatgcttttgaattccagcttaaaaatattgctaatacagatccattaacgggtgtatccaatcgtttggctttatctgagtatttaaaaattgttgagagttaccctcaacaattttctcaaacttgtttgatgattattgatattgatcgctttaaacacgtgaatgatcaatatggtcatattgtgggtgaccaagtgattcggcgtattgcagatcaattaaaagcaaatgtacgggcttctgatttaattgttcgttatggtggtgatgagtttttaattttgttagaacaagtgcagtttttagatgcacgtctcttggccgaaaaaattcgtattgcgatttctttagaggaaattgatctatctggtacacaagaaaaattgcatgtatcggtcagtattgggtttgcgattggagcgacaagctggatggagttattagagaacgctgatcgttcactcttaagagctaaagctcggggacgaaatgtagtagagggataa

SEQ ID NO: 45825 - DNA, 1209 bp, Acinetobacter baumannii
atggatgaagcaacaatcaaaagtatggctgccgaattggctaaaggtctaaaaacaccagaagacttaaaccaaatgacagcagtctttaaaaaattcatgattgaaactgcactcaatactgaactttcagaccatctcggttatgaaaagcatcagcccaagaaaggctcaaatagccgtaatgggtttagttctaaaaccattacaactcaagatggacaactggctttagatattccccgtgatcgagaaggttcatttgagccacaaattatcaaaaagcaccaaacacgcatcaccagtatggatgaccaaatcctctcactgtatgcaaaaggaatgactaatagggaaattgtagccttcttcaaagaaatgtacgatgccgatgtgtcagcatctctcatcagcaaagttaccgatgctgtgattgagcaagtgactgagtggcaaaatagagccttagatagcctttatcctgttgtctatcttgactgtattgttgtcaaagtccgtcagcactccaatgtgattaacaagtccgtataccttgctttaggcatcaatatggatgggcaaaaagaattactgggtatgtggattgctcagacagaaggtgccaaattctggctgtcagtcatgacagagctaaaaaatcgaggagtacaggacattcttgttgcctgtgtagatggattaaaaggcttccctgacgcgatagcctctgtttaccctcatactgatattcaactgtgtatcgtgcatgttgtacgcaatagcctgagatttgtaagctggaaagactacaaagctgttacgtcgggtctgaaagcgatttatcaggcaagtacagaggaaaatgctttaaaatccctagacatcttctgtgatcaatggaatcaccagtatcccaaaattggagaatcctggcgggccaattgggaaaatatccgaacgatctttagctatccagccgaaatacgtcatgcaatttatacaacaaatgcgattgagtcgttgaatagcgtaatacgccattcaacgaagaaaaggaaaatcttttcatctgatgactcagtaaagaaggtcatttacttagcaacatcaaatgctgcgaagaaatggacgatgccaattcaaaattggcgtttagcaatgaattggtttacgattcagttcgatgatcgattaaaagatcatttataa

SEQ ID NO: 45826 - DNA, 414 bp, Acinetobacter baumannii
atgaatattgaattagacccgattgatctaaaaattattgcattgctcaagcaagattctcgcttaacaaataaagaaattgggcagcgtgttcatcggacagggcaggcagtaggtgctcgaattgctcagttaatggatgcaggtgttattaaaaattacaccattgccgtgcaatacaggcataaacaatttattcatttgcatttaaatgaacagcgctcctttgaagaaattgaaaatttagtaaagcaatatgaacaaatcgatgagtgctttaaggttatgggtaatgcttgttatatgatcgttagtcatttcgaaccagcagaactcaatgcttttattgaagtcctctcaaaatggtgtcgttactcagttgaaactgttattcgagaagtagagaaagcttaa

SEQ ID NO: 45827 - DNA, 1059 bp, Acinetobacter baumannii
atggctgaactcaatactcccttaatagttggtgattttgaaattaaaaatcgactggtaatggccccattaacacgtgcgcgtagtggcgaaagccgtgttccaaacgatttaatggtgcaatattatcagcaacgtgcaaatgctggtctcattctcactgaagcaacagtgattggttcaaaaaccgtaggttatgcagatactccgggactatggtcacaagagcaagcacaagcatggaataagattattgaagcagttcatgctcaaggttcaaaaattgtagttcaactgtggcatgtgggtcgtatttcacatccagagcttttagatggcgatattcctgttgcaccgagtgcgattcaacctgcgggtgaagtaagtttattacgccctaaacgtccatatgtaacgccacgtgcgctttcaattgaagaaattcaggaaattgttgctcaatataagcattcagctgaattggctaaagcagcaggttttgatggcgttgagctacatgcagcaaatggttatttaattgaccagttccttcaaagtaatactaaccagcgtgatgatgagtatggtggtccggttgaaaaccgcgctcgcttgttattagaagtagttgatgcctttattgaagtgtggggcgctggccgagtaggtgtgcatattgcaccgcgtggcgactcgcatgatatgggtgatgaaaacccgctagcgacatttggttatgtggttgaacaactcagccaacgtaatgtggctttcattttctctcgtgaatatgaagcagctgatagtattagcccacaattacgtaaaaaatttaatggtgtatggattgccaatgaaaatctgacaccagagtcagcaaaacgtatcttgcgtgaaggtcaggcagatgctgtatcttttggtaaagcatatatcgctaacccagatctattacagcgtttagaacaaggcttaccattaaatgaacttcaaccaacgactttatatgctaaaggcgctgaaggatatacagactatccggctttagaagcttcataa

SEQ ID NO: 45828 - DNA, 132 bp, Acinetobacter baumannii
atgaatatcgaaaaaaatagatatgaatatcgtcaaaatacgatattatgtttccgaaatgctgaacaaagctttgttcgtttacaagacgtgttgagcctatggatattgatgcaattagcaaagccctag

SEQ ID NO: 45829 - DNA, 609 bp, Acinetobacter baumannii
atggctgatttcttttttaattattatcttatgccatttcatttaagtgttgtggctttgatattgctcagcgtggtagaaactattggtatgtatgttggtttacgaccaagccagctattaaaaaaaattgcgccagtttggcttaccaattcccctttgctcaatgttaaattttctaaagctctaatttttgtttttttactcatcaatttcagttttgccggttattttttacagctttctttctttgctatacagcattactttatcacgccgttttacttaatcatccctgcactggtcatcgcgattttctttaccgtatttatgattcactgccttgatcaagtcattaaacccaagcttacacataccaactataaccttttagggcgtctagcaactatttccagtggtagtgcaagacctggtttttcagcacaagctcgtgtacgtgatgagtttggacaactgcactatgtccaggttgaacctgagtatggtgagttagaactatattcacaagtcattcttatcaaagtgcataaaagccattatgttgccaagaaaatttctgtttcgaatgaccttttcgcgcctgattaa

SEQ ID NO: 45830 - DNA, 159 bp, Acinetobacter baumannii
atgagtattggtgattttggtttagcaaatcaatttagactacgtagtaatgatgtcgtttatgtggatgcaaccggtttaactcgttggcaacgtattgtcaaccaaatcattcctttctcaaatgctttatataacatagaccgtttgggacaataa

SEQ ID NO: 45831 - DNA, 429 bp, Acinetobacter baumannii
atgtatttgctccaccgtaatagcttttatttccccaaccgctctactttaatacgattgtcatttcccacgcttgacgacaagaaaagcgaatactatcctttgcctgctggcctacattgccagtcgactttgacaggtcggatagccaacgcacacgaaaaagtctctcttttttgtgggcatccctgcgtgccccctctgcggtggaacgggagggggacaccttcgggtgtgctgatcttttggctatcagtctgtcaaccttctctcgtttcaccaccattatttgacagtaatgtggtgaaacttctttatagccaaaggagttcgctcatgcgtactatttcttctcatttattggcctttgccaaaatctctctatttataccgtttaaatactctataaattggtttaaccgactctag

SEQ ID NO: 45832 - DNA, 303 bp, Acinetobacter baumannii
atgccttttgtgttacctctaatttggtatattccatattacttgtttttcaatttagtctttctcattcctatgtcactattaatttttattttccaattaatattagtttttttctttggagacaataaagttacaactaatatttgtatgacattagcttttttagttcttatggttgaattctggctaatttatagagcatcctatataaaaacttttgaacaacgaaatttttttcaagctgcaaaagattcattaattgagcttagattaggtttgaagatgattttaaaaaaataa

SEQ ID NO: 45833 - DNA, 351 bp, Acinetobacter baumannii
atggaaaaacaatttgccgatgagaaaatgaaaaaatacttgcgattaatgcgtttacgtagaaactttgtactctcagtatttttagttccatcagttgttattgttgtattgatgctagcaagagtagatgaaaagtacttatctatttattttccgatagtaatgattcctatcatattatttttgatgtttaagctgctagctaacggtatatgcccttggtgtaaatgtggttttttcatgaatgatctaggttcttttgttaatgggctaagttttatcttcagaaaacaatgctctcattgcgggaagccagaaaaattatcaaaaaatgaagatgactcttaa

SEQ ID NO: 45834 - DNA, 531 bp, Acinetobacter baumannii
atgaattttaatgatttattaaagaaaattgatgaatgtaatgaaataatttatggtgaaagattccttattaatcaggataattctgttaatgatgatctatttaaaagctatttaagttgtattcctgaaaatgattttaatattgatctaggaggaaatataaatgattttttaggaaaagattcgttagaaaatattcaatatatgtttgaagatatatttgatggggaaagtactacagtattcttaacacagcatgatgtaaatgtcgtatacattaatcataatagtggcgagataggagcatgtatttcaggcgatgaattacatatcattgctaaaaatttatttgattttttttcgcaaattaatgttatacaaaatttaattattgacttatatgactctaaccctagaggtgaaaatggaggatataagacaggtttcttagaagaactaaagaaaacccttataaaagaaaatgtagtattggatgtagactattttttagaatttttttatggttaa

SEQ ID NO: 45835 - DNA, 4908 bp, Acinetobacter baumannii
atgtctggaaaaacagaagttgttaagccgttaacagaagttgcgattaaagatgttagccattcaaaacaaaaaatagatagttggttacagagccatacgcatcaaattgtgacattagacttagtggcaagtgtaatgggaacagttccaattattggaaatgtgatggctgccatcgatgtggtttccgacatttgctatatctatgataaaggttttcaaaatgccgatattatggattggaccacaatgggtattgaccttattggggttgcacctattcctggaacaacagcaattcgtacttctgctcgtccagctttatttttagttcgtcaagaagttaaacgtgtgggtaaagctgctttaggtgaagcagttattgttgtgatctctaatcatttaaatgatcaagttgcaggggatatagaaaaattctgcaaaacagggttaaacaaactaaattcaattttagctacttgtggtgcaacggtccaaaatgccacaacacaaattaatggtggaattgttcgagttgtaactaagggtcaaatatttacaaacgctgggtcaaatgcgagccgcgctcaacagcaagcagctggcgttattaaaggaataaaaagtggtgacttaacaagagctggaaaaaatctagtttatatgaccgaaaactggggaaaagctcttataaaaactggagcaaactccaatgctaaagttgctagttccttagtaccagcacatctaaagcagccgatattaaatgtaggtgcaacgattaataaaattggtatcactgccaatactaaaattaaaggtttgggtaatacagcacagccacaaacaataggatggctatttgatgtattgagaatgagtgcatctaaatttaggaaaaagaaatcagcacaagttaagccaactcaaacaacacaagttaagcatgacaagaaaaataataaattagaaaaatctaatgatgagcatgcagcgactcataatgcgaatgcctgtaaaaattgtaaaggtggaacgacacactctattacattcgcgttgggtactgaatttttaaatcatatcgatgcacaaattcatccattattgatagagcaattttctagaacatatgtatcaaacttatatcagtatgatcaatctattttcggggcgcgatggattacacctttcacaactaaaatagttcgttgctcaagttacaatgtgcatcatccaaaagagccaattgagcaagacggttgggagtatattggcagtgatggccgtccagttcgcttaccagagctgaaagttgggcagagttattatgatgaagtagagactttcacttatacagttatctcacctgaaattagagcaatttcatatggtgtttcagaaactcgcttctatcaaaaatataagaatgagtttcgtttagcctccatagaacgccaaaatggatttagtattgggctacgttatgatcatgaattagaaaatagtgatagctatttatcagatattatatttaaacagcaacaacaaatattggcacatgtagcattacagattaatgatgcgcagaaagttgttgcagcttggttggttgaagagggtcaactaattagacaactatcagcatatcaatataacgaacaagatgatttaattaaggcaactaatgagtttgctgcttcttatgaatatcaataccaagctcatttattaactcgttataccgatcttactcatcgtgggatgaacctaaagtgggatggagttttacctagttcaaaagcgattgaggaatgggctgatgattatagttccgctactaaattagattgggatgaaaatgttcgcgtaacttcagtcatggatatcgatggtaacgtgactgaatattattatggtattactggttatacctatcgaattatttatccagataatttgcaagaatggttctttagagatcaagcaaaaaatataacatcgcatattgccacagatggaacagaaacatcatatacctatgatgaacgtggcaatgtcttaagtatggtccaggccgatggttcgactttctattatgaatacgatgaaaaagataatctgatcggttttgttgacgctgaacaggggcgttggtttaaagaatacgatgcttcaggaaatataattaaagaaattgatccgctgaagcgcgaaacagtctatgcctataatgcaatggggttggtaacttccattactgatgcgaaaggaggtaagaagacacttaaatatgatgatcgagggaatttaatcagttatacagattgttcaggtaaagagaccaagtggcactatgatgaccgcgggcgcgtcaaatttattgaaaatgctttaaagcaaaaagttgaatatttctatacggaattaactactgaactaagacagcctatagcaaaagggttaccgttgaatgcttttggtcagcttgaaaaaattaaacacgctgatggcgctgaagagcatttcattcatgatgcagaaggtcgtttattagttcatattgacccaaaaggtcagcagacacgttatgaatacgacgcagctggtttaattaccaagcgtactgacccattaaatcaaactttaaaatatcaatgggaccgtctaagtcgcttaaaacgtttaattaatgaaaatggcgcaagttatgaatttgtctatgatgctgcgggtcgattagtaaaagaaattgattttgatggcaaagaaactgtttatgcatacgatgaatataatggtcgtttaaccacaagtattgaagttgcttctacttatggtcaagatttcaaagaccgtgcggcacctaaagaccgtattcagcaatttatttttgacagtatgggacgtttagaacaacgtactgcaggatatggctatcaaggacaagagcttgaagaaaaacaaacagaagaattttcttatgatggcttaggtaatctagttcaggctaaaaatgccgaaactaacttgcagtggttttatgatgcagcaggtaatttaattaaagagcatcatcaagatgttgtgacacagaaaactgctgtgtggaaacatgtctatgatgaattaaataatcgaactacaaccatccgaccagacggacagaaaatagattggctgtcttatggaagtggacatgtctatggcatggcattaaatggtgaagatgttgttagttttgagcgtgacgatttacatagagagacgttgcgacactatgcaaatggacttagccaacaacaaagttatgatgaagtcgggcgcttaactcagcaattaatgttgagtgggcatgacaaaggctatcaggcccaaactcaaaataatgctatccagcataccaaccaattgattgaacgcttatatcactacgataaaactggtgagttaacgctcattaaggatactcgtcgtggggctattcattataaatatgatcctgttgggcgtttattagaggcaactagtaaacttgggaaagagacttttaattttgacccggcaagtaatattttagagcgatataacagtaccaaagagcaatcttcacagcatatttctgatgaaaaaggttatggctataatcgcttagtcaataacatcgtacaggaatatcttgaccaacaatatcaatatgatgcttttgggcaactgattcgacaaaagtcatcacaaggtgatttaaatcttgagtgggatgtatttggacgtcttgttcgtagccgaaacaatcaatatacggcagaatatcgctatgatgctttaggccgacgtattcaaaaaagaagtaagcatcaccatacaggtcaagagcagaacattagttatggttgggatggtgatactttagcgtatgaatcgagtgctgatttaacaaaacactatttctacgaaaaagatagtttcgtgcctttgttacaagcggcgtatcatcaccccattgagctacatcaaacccaagactggtcagataaaacatatagtatttataaagaccctctttggaatacagtaaaacaaagtcaaggttttgatgatgtatggttctatcactgcgaccatttaggcacgccacaggaaatgagtgaccaaacaggtgccattatctggaaggctgaatataaagcttggggtgaatgtaagctagagcagactaactcagatttctttgaaaagtcagaaattattagcaataatatccgtttccaaggtcaatattttgatgaggaaacaggacttcattataaccgttatcgttattattcgccttatgttggacgttttatttccaaagatccgattggattattgggtggttttaatgtctatgcttatactgcgaaccccgtacaatgggttgatccatatggattagcaccatgtagtctagttagatataagccagataaggtaacacctcaagctggaagtcgacaagatgctattgatagagcttggtctcttgagaagcaactaatacaaacaacaggaacaggtactagggattggagtaaagctgaactggatacgattcttagaacgccaagtggtagtggtaaaggtcatctctcatctgttatgtcaaatcttggctatactggtcatcacattaacagtgttaaaaataatggagcattaggcgaaagttggaaaggagatccgcgaaatattgttttcttggaaaaccctaaacatccaaatagtagtcctatgccaaatgcatataatgagcattttcattcgaaacaaggtcatcgaggaagtacgactaatgtttccagaggaagattgattgatagacaagcaatgattaatcagtttaataaaggttgtagtatttaa

SEQ ID NO: 45836 - DNA, 954 bp, Acinetobacter baumannii
gtgattgcccatgcccaaaataggctgagcctttttgctgctcagagcgggctaaaagctgttgctgcacaaggtaaggtagaaatacaagcccagtcagatgctttagatgtacttgctaataaaggtatcaccatttcttcgacagaagactgtattgaaattagtagtcctaaagaaattgtaattactggtgcaagttcacaaattaccttaaatggttcgggaatctttccaaaaactggcgggaaatttcaggtcaatgctggacagcatgtgttccaaggcggcgcatcggcaagtgttcaatctagtttgccaccgccaccaaaacgtgtacaaggtgtacttgagttatttcatgaatatgcacatggtgagtttgtaaaaggtggaagttatagggttgtcgataacttcggaaaagaggttactggcaagctggatgataagggatttgcaaaagtttctggcttagcaacaggtgcagtaaaagtcttcttcgaatcagatcaccgtgatccttgggatactgcaagtgactttaaacgtccagttgagtggccaaataagaatgatgcggatagtgagcaatcagattcattaattgcacaaatgagtaaaacagcccagtccaaacttggtgaattatctaaacaattaaccaatcctacgaatattatgaaaaatattcaaactgcacaaagcataaaatctgaaggagcaaaggctttaatgccaatgttaaaaactcaggcgcagggattagtaactgatcaagtgaagagctttttaccaatttcagaagcaggtcaaaaaatagggaacaacattgaacttacatctattcaaaaaatgaatgatttcaataaatcaggctctattgatggcaatagtttggtcaataatacgcttcatcaatatttgcaaagcccttttaaaaagaattcatag

SEQ ID NO: 45837 - DNA, 1725 bp, Acinetobacter baumannii
atgacttaccctctatttgaaattaagctgctaaccgctcttgatcatgctcaatttgaagaggcaatttgggcatttgaaattgatggagacatttctacattattactgattgattatgcattagaacaattccatcaaaaaaaagttcaagctgatgaagtctatcgggttcctgaacaaaaaattaagaaaattggtgaacaaaatttaggtctagaaaaaaatgaatcatatacatttgctgagctcttacaattcttaatttttactcaggcaaatgatgttaaagatgccttaagcaatatgctgtttggctctattgagcaaacacaattaatcttgtttaaaagagcagaagattaccagttagctttaagagcacctaatcaattaaaaaatctatttttgttggtaaaacacatttatagctatccagccgagctgaaaaaacttttctttattagaacactttcttttaaaaataaagtatatcaaccgattacgcctttgcttgctcatccggtactcacttcggttttatatatctcacatacctttagacagatttatatcacttattccgaacataaccggagcattggttttttctcttttctggatgatattcaccgtctggagcatatggttccttactaccattattttcaagaagggcatgtcgaggccaaaaaatattcttctcaaacaggcattatcaatattcttggagatacctattttggtgaaatgtataccgaaaagcgtaagtctagagggcaaacagatgccttacagcaatatgggtatcattattcatttgaaaaaatacagccctttttaggtaaaaatgacatcaacatcgctaactttgaagcagtattttctttagaaaatcaatcgccgttaaaagataaaaagccatttgttctaaaagcagatgctaaaaaaacattagaagaatttaagagtattcatctaaattatttggttttagcaaataaccatttgaaagattacggtgagcaaggattagcctatacattacatcagttggatcaggcgagtatttcttatattggcgctggactgaaccaaaaagatgctcacaattactttgaaatcacttttgagactaagcactatgcgatttttaatggttattggcatagagacacggcttatctggattatgacttttatgcgttaggatcaagaagtggagtagcttgcttaaatggcgttttacttgaacaaataatgcgttataagcaggctcatccagaacgcaaaattattgttatttgtcattggggtgtcgactttaagcctattacaaaagaccaaactaaactcgcgactattcttactcaagcaggagcggatctgatcgttggtcatggtgctcatactattcaaccaatccagatcatcaatcaaaagcctgttgtttttaatataggcaatgcagtctttaatagtgacggtgaatatgaacagcaaaatgctttgccatttggctgtatagctagacttgatttagcaaaagatatcattcgcctttaccccatttacaccaataatttacaaacattttggcagccttatcctgtagatgctgaagacttctcaaaggccagtatttatatgacatctttactgacccctgagaattacatggcatcccaagataaattagggagatatcttgaagttaaattttaa

SEQ ID NO: 45838 - DNA, 717 bp, Acinetobacter baumannii
atgaaaaaaatattgctgttgatcagtggaactttactgtgtgtttcttgtactactcgtccccctctgctttcagaaagaggtccaagtatatctgcagatggtcggcctattgttcccgtcacttttgtttttactaccaatactcctcaggctacaaaatttgataattatcaacaaatgcgtaaggaaattaagattttaaataaatattatgtagatgataaaaataataagattttcaaatttaaattacaccgttatatcccttatgaagagttctcaaagttacattgtgatttgaaacagcaaattaatcagccttatcccatttctactgaaactattcctgccagtgtaaatacatgttttcctaagcgcactgcaagtaaagaagtcattgtctttatttatgatgcctactcaacaaaatggaaatttgaagatgtaacaagcagagcatttcgtaataatggcaaaccttttattttattagattggaaccgtctaaattataatattcaggctggtagtgtgcatgagatggggcatgtatttggtctaaaacatgtttgtgcaccgaaggctacaaaacgtactccaaccaatattatgacaagtgccgaatgtaaattaggcagtggtggcttaagaaatttagggtttactccagtacaactgcaaaccattttatcgacttacaaccaatatccttaa

SEQ ID NO: 45839 - DNA, 633 bp, Acinetobacter baumannii
atggatactcctctaattaacacaccagtccgccattggtgtgaatttgagtttatttccaaaactgtgaaaaatccaaatatccatattaaagggaattactcttactactcggcatattgggatcaaggttttgaacgctgtgtagtgcgatatctacatgacaagccttctactccagacaagccaattgatcagctctatattggtaattttgtttgttttggcgctgaatgcgtgattatgatgggtggtaaccaacttcatcggccagactggatatcgacattcccctttgacacccgaagttttttagccgctggtgacactataattgcagatggctgctggattggaagtcgtgcaatgattatgcaaggtgtaaaaatcggtgaaggtgctgttgttgcaactggagctgtggtcactaaagatgtccccccttatacaattgttggtggcgtacctgcaaaaattattaaataccgttttcctcaggagcaaatagaaaaactacttgctttaaaaatttatgatttagatgaaaaacaagttttaaaaatgcgggaatatttacaaacggatgatatagatgcattaacagcacatcttaaaaaattacagagcgaataa

SEQ ID NO: 45840 - DNA, 849 bp, Acinetobacter baumannii
atgaagttaatagacatgctaaataatatagatactttattactaagcaattctactaatgaaagtcactataaagttgctttagaagaagttagtaaactgttagaaaatattcaggaacaaggagatgaagatttatctaactttttgtggaagttgaaaactatacttataattaaagatagatatattaaaactttctttttattgaaagataagaagcattatgaagcttgggttctattagaaaggatagaaatagacatttctttcctagagaaaaatgtagacgaagattttataaaaaaatataagttggatttctacaaagagattgttgagagttggcaatcgttatttccttacaaaattttctttagtattggtgcaacaataaagcagtatacatgttcaatatgtgggcatgttattcggccaaggaataaatgtattcataaaaaaggtaaattatataatggtaaattgtgtgtgcatgtagcagatgggggctgtgagctgaaagaaatttctatggtaaaaaatcctgtccaaaaatcatgtataccaatgctagattatgattatagcgcagttgattttatatcagaaagattacaatctccttttgattattggaagccatttaaaaccaaaaaattaattgatcgttctgaatttaatactgttgacgaaaatgatatgtgtccatgtaaagaatctaaaaaaatattcaaagaatgctgttttaataaagaaaaaattgaatttccacatattcatatacattttagtaaatcacccccttctaatttggctacaagcttaattaaaataggtaggaaattgtaa

SEQ ID NO: 45841 - DNA, 564 bp, Acinetobacter baumannii
ttgcaattaagtattcaatccactggtgttgaagtgaccgaagtgattaatcaacaacagcaaaatgaatggttgcaagctttagcaacaagtccttatggggttgcaagtatgagtcaggttctaccagatgtaattgaaacctcaaataacattggggtggtgagactaaatcgagaaggtggaaaagctgtcttaatggttcgttcaatggtgaaccaagaagctcaagattttgcagaaaaaattcaggcacattttagccagtttaatatcggctctacacttacgccgttagtgtcgggttggacaccaaatccagattcggctgctctaaagtgcttacaacaagcctatcaaaatgcatttaatattgagccaaatctaaaagtaattcatgcaggcttagaatgtgggattattgctgaacattacccacatttacagatggtttcgtttggaccggatattcaaggtgcacatgcaccgggtgaacgagtcaaagttgatactgtagagaaatgctggaagctactggtaaccgctttggcatctgtagagtaa

SEQ ID NO: 45842 - DNA, 957 bp, Acinetobacter baumannii
atgcttcattttacctttttaggcacatcatcaggtgtacccacgctttcacgcaatgtttcaggattagctgttcgtaacagtaaaaataaggactggattttagttgatactggtgagggtacacagcatcgtattcagcaagctagactctcactacaaaacttaattgccatttgtattacacacgttcacggcgatcattgttatggcctagttggtttactggcaagtgcaggcatgaatgcccgtacaaaaccattaatcgtgattgcgcccaaagaaattcaacaatggtttgaaatcactgctcaacttacagacttacatttgccttattcaataaaatttattgatgttaatgaagcaactcggccacagcagctcaccgatgaactctttattcaagcacatccactaagtcatcgtgttccgagttttgcatttagtatttatataaaatccacccagaagaagatagatattcaagctttaactcagcttggcgtacctaaaggcgatatttgggggcatttaaaacgaggctacgatgttgagtttgaggggcgaattttaaaatctcaagactttatcaaaattcaaaaacagcagattcatgcaattataggtggtgataatgatcggccagaattattagccgatacttgtaaggatgctcaattacttattcatgaagcaacttatttgcaaacagtcttagataaagtaggtaaaggaccaatgcacagctcagcaaaaatggtggctgaatttgctgagcagcaatctctagacaatttaattctgacacactttagccctagacatcaggataaaactgggcagcaagctattaccgaagaagttcgccagttttataaaggtcatttttatttagcgaatgattttgatgagtttactttaagtgaaacaggacaacttttaaaaatcgagtaa

SEQ ID NO: 45843 - DNA, 966 bp, Acinetobacter baumannii
atgaaaaaggttgtggtttttagccaaattgatgaggaaattttgtcacggttacagcagcattaccatgttgtcgtattgaaccctaaactgggtgatattaatgaacagatacgacaagaagtagtagatgctgatggcatgattggggctggtcgtttgctcaatgaaagtaatctttctcctgcccaaaaattaaaaattatttcttctgtgactgtaggttatgacaattatgatgttggttatttaaatcagaaaaaaatctggttagcaaacacacctcatgttctaactgaaacgacagcagatcttgcttttactttgttattaagtgcagccagaaaagttccttttctagatcactggactaaacaaggtgagtggaaaagaacagttgggccacagcagtttggtctcgatgtttttggaaaaacattaggtattattgggcttggtaatattggtgctgcaatcgcacgtcgtggcttttatggatttaacatgaatattgtttaccataatcgccgcgagaaacctgagttggcggaacctttaaaagctcaatatctgggattggaagaattattacaacaatctgattttgtagtgacagctgttgatttaaatgcggaatctaaagctttaatgggtaaggctcaatttgagcttatgcaaaagcatgccatatttattaatattgcgcgtggctcagttgtcgatgagcaagccctaattgaagcattgcaaaatgaagttatttttgcggctggtttagatgtctatgagaaagaacctctgcaagaatctgcacttttcaatttgccgaacgttgtcactttgcctcacgtaggttctgctacagctgaaacacgtaagaaaatggcaaatttagcttataaaaacttggtggaagcactagaggacaagacgcctagatatttagtgaatcctaattttgtgtaa

SEQ ID NO: 45844 - DNA, 1104 bp, Acinetobacter baumannii
atgaaaaaacaattgccaaaaatttctacaacaagtaaagcgcttgctaaaagtttattacttgcacaaggcgttttagaccaagcaaaaaaatattcaactcttccttttactcaaactcatatcatccgtccacgaattgacgaaaaatattatagctggacacactacggtatctttttcccacttttaccagagccgcatcgttacttaaatattatgattttaatcggtacgcccggtgcacttgcttttgaccatgatgacatcatcactggaaacccgagaaaaaccgctactttcttttcaagcacagctgctctggaacaagctttactgaaggcctatatcatttctgaagatacaaaaattaataaagatggaaccttaatagaactaggtcaggaaatttcaattcaaggaaaatttccacacatccatattaatggacattatgatgggtttgatttcgactttgatatcgatatcacttcacatgtttcatggtttataaaaacaccaatctatgatcattttagtttattggcaaagtttaaaggttttttaaactatcaagcaaaacgcattgaaacccaaggactttgtacttacgaatatgcacgagcagtgggtcctcactccattacaaataaacttattcctgatgcatataaactgccacttgatttttttacttatcaaattatcaatttaaacgaggccactcaacttcttcttaccaaagccgatattgcaggacaaacagctgcatacaccctgcatattagacatctggaccagccagctgaaatttacacagatgtaagctttgatattatttcgcatcaagttgatgacttcgtttcacctagtgggcaaaaaatgcgacttccaaaatatttttcatggatcgctcgaaatgatgcaaagcaaattatcttaaacattcaggcagaaattgactgcccattccgctatggtcatgggcgaggttatgcaagtagctatatatttactggtcattattttggcaatgaagttcaaggccgtggatacatcgaatatattgatatcgaaaatccacaagcctttgaagatgaataa

SEQ ID NO: 45845 - DNA, 918 bp, Acinetobacter baumannii
atgaaacctaaaaaattaaatcaagtcactgattttgatataaaacttctaaaaatatttaaaacggtttgcgactgtcacagctttacatctgccgaaagtattttaggtattagccgctctgccattagtttgcatatgagtgatttagaaaatcgtttgggcattcggctatgtcagcgaggccgtgccggatttgccctgaccgacgaagggcgggaaattttagaatatattgaagtgctcacagcagcgattgaagacttccgttctaaagtcaaccaaatgcataaccgccttaagggtgagtttaatatcggcattattaacaaccttgtaactatgcctagaggctatatcaccaacaccttgactcaacttgccgaagaacatgccgaagttattattaatattagtatgagtactttgtcagatattgaatgccgcgtactcgataaccgtttacatgcaggtgttatcccccttgttacacctttgtccggtctagactattttgatttatatagtgaaagttcatttttatattgtggcaaaaatcatcctttatttaaccaatgtagcaacattcatttaaatgaattaaaaaaatggcaagctattcttcctaattatgccattacctcggaagcggccaagttgcatcagcttttagattgtaaagcgaccgcaagtgaccgcgaaggtattgcctttctcattttaaccggaaaatttttaggttttttacccgaccactatgcaaaaaaatgggttgaagacggtgttatgcagcctgttttaaaagacaaaatgcactacagcacccctatatgcttaattactcataagggtaaaaatcacaataatattttaaaaacctttatggaaatgcttgagaagcgaatagctaacaattaa

SEQ ID NO: 45846 - DNA, 1698 bp, Acinetobacter baumannii
atgatatcaggtcacccaagtaaacatcccctttatatcccttatgcaggctatacacttttagagttaccccttttgaataaagggtccgctttcactcaagaggaaagaagtaactttaacttacacgggttacttccacatattattgaaactatcgaagagcaaagccaacgctcttatcagcaatattgtgctttcaatgatgatattaataagcacatctatttacgtaatatccaagataccaacgaaactctgttctaccacttaattgaaaatcatcttgaagagatgatgccaattatttacacgccaactgtgggtgaggcatgtcaacgtttctctgatatctatcgccgtcatcgtggtgttttcatttcatatccagatcgtgatgtgattgatgatattttgcaaaacgttaataaaaataatgtcaaagtcatcgtgattacagatggtgaacgtattttaggtcttggtgaccaaggcattggtggcatgggtattccaattgggaaactttcgctgtataccgcatgtggtggtattagccctgcttacacattgccaatcacaatcgatgtagggacgaataaccctcaattattaaatgacccgatctacatgggatggcgtcaaccacgtattagtggtgatgagtattatgactttgtagatatggtgattgaagctgtaaagcgtcgttggccaaaagcgctcatccagtttgaagatttcgcacaaaaaaatgcgatgccacttttagaaaaatatcgcgataaaatttgttgtttcaatgatgatattcaaggaacagcagcggtttctgttggtagtttaattgctgcaagccgtgcagcaggtaaacaattaaaagaccaaacaattgctttcttaggtgcaggttcagctggttgtggtattgcagagcaaatcgttgcacaaatggtttcagaaggtctaaccgatgctgaagcacgtgctcgtgtttacatggtagatcgttttggtttgattactgaaaatcagccaaacctattagacttccaacgtaagttagctcaaaaagctgaagtagtagaccaatggggcaatattgaagaagtgatttcactgcttgatgttgttaaaaatgccaagcctacagtattaatcggtgtttctggtcagccgggcctatttactgaagaaatcattaagaccatggctgccaattgtgaacgaccaattgtgatgccgttatctaacccgacttcgcgtgtagaagcagtaccggcggatattgtggaatggactgaaggtaaagcattaattgcaacgggtagcccatttgcacctgtaaatcatcacggcaagctttataatatttcacagtgcaataactcatatatcttccctggtattggtttgggtgtagtagcatcaggtgctaaacgcgttacagaaaacatgcttatggcatcaagtagtgctttggcagactgttcaccgttgctgaaagatccacaagctgacttattgccacctttaggcgaaattcaacaagtgtctaaagtaattgcatttgaagtggcaaaagctgcaatggcagatggtgtggctgtaactattagtgatgatttgcttaagcagaagattgatcaatcgttctggaaaccagaataccgtaaatataaacgtattcctttctaa

SEQ ID NO: 45847 - DNA, 1215 bp, Acinetobacter baumannii
atggaccaatctactacctctaaagcacgacccatgacttccacacaagggagctggtttgctattttggctgttgccatcgcagcctttgccttggtaacgagtgaatttttacctgttggtgtcttaaatagcgttgcagccgatttacacatttctgtaggtacagcaggtcttattattacagtacccggcattatggcagcgattgcagcccctctattacccgtttcagtaaagcaactcgaccgtcgttatgtgcttattttactgactgctattatggtgattgccaataccattacggcttttgcagaaaactttcatgttttattattgagccgtttgattttagggatttcaattggtggcttctgggcaacagcaattgccttaagcggtaagctcgcacctgcaaatttacctatcgccaaagcaactgctgtagtaatggctggtgtaactttcgccactgtactaggtgtaccgattggaacatggttaagtgagttttatgggtggcgcagtgcctttggaattacagctgctatcggtcttgttgtattagtgcttcagcttattttcttaccaaaacttttaccagagtcagcaatacatattcgtgatttacctgcattattacgcacacctaaagcacgtagcggcatgcttattgttttattaattgggcttgctcacttctgtgcatacagttatttagcccctttctttaaaaatgtagccgggtttaatggcacaactattagctcattattattgctttacggaatagccggtatttttggaaatgcatttgcagggtacagtggtaatttaaatgttcgatataccttagctttcgttggaacatgttttgccattgtattctttggcttcccaatctttgctatccatgagtttggtgccattgtccttacagcattatggggcttcgcatttggtgccttccctacctctgccaatatttggatgtttgtacacgcacctcatgctgtagaaaaaggtatgccgctttttgttggtatgttccaagtcatgattgctacaggatcattattaggtggttatgtagttgatcattttaatgaaaatactttaatttatggggtattaagcttcgttgccttagctttaattagtacatttaccttagccaaaggtttaaacaatcccaaagcaacatgtgaaaattag

SEQ ID NO: 45848 - DNA, 1152 bp, Acinetobacter baumannii
atgcgatttaaaaaaatttcttgtctacttttatccccgctttttatttttagtacctcaatttatgcgggcaatacaccaaaagaccaagaaattaaaaaactggtagatcaaaactttaaaccgttattagaaaaatatgatgtgccaggtatggctgtgggtgttattcaaaataataaaaagtatgaaatgtattatggtcttcaatctgttcaagataaaaaagccgtaaatagcagtactatttttgagctaggttctgtcagtaaattatttaccgcgacagcaggtggatatgcaaaaaataaaggaaaaatctcttttgacgatacgcctggtaagtattggaaagaactaaaaaatacaccgattgaccaagttaacttacttcaactcgcgacgtatacaagtggtaaccttgccttgcaatttccagatgaagtaaaaacagatcagcaagttttaacattttttaaagactggaaacctaaaaactcaatcggtgaatatcgacaatattcaaacccaagcattggtttatttggaaaagttgtagctttgtctatgaataaacctttcgaccaagtcttagaaaaaacaatttttccggcccttggcttaaaacatagctatgtaaatgtacctaagacccagatgcaaaactatgcttttggctataaccaagaaaatcagccgattcgagttaaccccggcccactcgatgccccagcatatggcgtcaaatcgacactacccgacatgttgagttttattcatgccaacctaaatccacaaaaatatccagcagatattcaacgggcaattaatgaaacacatcagggtcgctatcaagtaaataccatgtatcaggcactcggttgggaagagttttcttatccggcaacgttacaaactttattagacagtaattcagaacagattgtgatgaaacctaataaagtgactgctatttcaaaggaaccttcagttaagatgtaccataaaactggctcaactaccggtttcggaacatatgtggtgtttattcctaaagaaaatattggtttagtcatgttaaccaataaacgtattccaaatgaagagcgcattaaggcagcttatgctgtgctgaatgcaataaagaaataa

SEQ ID NO: 45849 - DNA, 489 bp, Acinetobacter baumannii
atgaaaaagatatttttagctgctttagcaacaattggtttacaagcctgtactacaccttatcaagaaatgggggcttctggtggcgttgaagccactattattgatgataatgtctttcaagtacgcgcatctgtaaacggatatacccataaatcgatagcaaaccagtacgcattacgtaaagctgctgaagtatctaaatcgctagggtgtagttatttctcagctattaacaatacaagccagagttacaatcaaaatatttctaaagttgatgctggccttaagactaccccaaatggtgtctattatgtctcaagtgctggtacacaatataagttaattaaaccatccagaaacaatacctatgtttgctttaatgaaaagccaaacactgttttgcctggtttaatttacaacgttaagtatgttctgggttctccaatgcctacaggtaaattcaaagttccgaatagctggcgttaa

SEQ ID NO: 45850 - DNA, 1374 bp, Acinetobacter baumannii
atggctcaacacattaaatttactaaatcggtaatagactctattcctttgtctgaagagaaacaaatcttttacagagatacagtaactataggatttggcttatgtgtgggcaaaactaaaagctattttgctgaaaagaaaatgcctaatggcaagtctaaacgtaaagttattggaaaacatggcgtctatacattagaacaagccagaactgaagctaaacggcttcttatcttgatggatgaaggtgtagatccagttaagcaaaagcgtgatttacgagcttcagcaattcaaaatgatgccttacaaaagctagtccctacccttagtgaagcttaccaatactataaattgcgtaaaaagctggcggaaacatctttaattgcctatgacggatgcatagaaaactactttagtgattggaaagatttaaaacttgaccaaatcaccagtgcaatgattattgatcgtcatctgaagctttcgaaagcaagcccttcccgagctaatcttgcatcaaaatttttacatgctctctttaaccatacgattagcaggtataaggatgagtccgggaataaaattctaaatataaaaaacccggttgttatcgttaaagaagaaaaagctttcaataaaattaaacgtagaaaaggccatgttcgtgcagatcagcgcgaagcatgggcattggctgtggccactacttattggatgggtgaacaaaataacgattttagagcgtacacaaaccaagactttttattcttacttgctctaactggttttagacgtagtgaagcagaatctgttgaatggaaaaatgtagatcttcaatttggtaccatcaaaattattaatacgaaaaaccatgaggatcttttgctacctatgggtgataccctttggcacattatgcgtgaacgaaaaaaacgtgccggtgataacaaatatgtctttaccgatagaaatggtgtttcccatatttcagaccgccgagcagcacgtgacaaagtaactgagaattctggtatcgaatttacgttccatgatttacgccgcacctttggcactatcgcgaacagcttggccataggaagctatacgattaaaaggctaattaaccataccactgacgatgatgataacgatgtgactgatggatatattcaagtttctttcgatgatttaaagaaagctatgaatatgattgaagacgtgattatttctgaaccagtaaaagcattaatcaaaagtcgcttatatttcgagaaaaatgaatcgagaaatcaggctcaagaattaattaaccaccacattcaagtgttagataactttaaaatggcaggccaaattctagatttttag

SEQ ID NO: 45851 - DNA, 1323 bp, Acinetobacter baumannii
atgaaattgcctcaagctgattttcaacatcgtagagaccgtctggcagaaaaaatgggtcctaacagtattgcaattattgcaacgcgtgaggagatgtaccgtaatcgtgatgcggattataaattccgtgccgatagtagttttttctatttgacgggctttgctgagcctgaagcagttgcagttattgaaacctttgaggatgtaactgactatagttatagtcttttttgtcgtgaacgtaaccgcgagatggaaatctggaatggttaccgtgctggaattgatggcgcgattgaagactatgatgcagacgaggcttatgcaattgatctgcttgatgaagaaattattgaaaaattattaaataaagagcgtctttattatcgaatcggacacaatgctgcgtttgatgcacgagtgagccagtggattaaaaaagcagatgctgagcatcggcatcaaagtgctccagctcaactggtacagctcgaccgtattgtcgatgaaatgcggttaatcaagtcaccacaagaacttgagctgatgcaaattgcttcaacaattagtgctcaggcacatactcgtgcaatgcaaactgttcgccctggcatgatggaatatgcactagaagccgagctcaattatatatttgggcaaaacggctgtgtgccttcttacaacagtattgttggtggtggggctaatgcctgtattttgcactatgttgaaaataaccaacctcttaaagacggtgatttagtcttaattgatgctgcatgtgaatatgagttctatgcatcagatattacccgtacttttccggtcaatggtaaatttagtgctgagcaaaaagcattatatgaagttgttttggcttctcaatatgcggcaattgatgcagtacgcattggtaattcgtaccgtgagcctcatgaagtagcagttaaaattttaaccgaaggcttagtggatttaggtctgctcaacggggatattaacgaacttatcgaaaccgaagcataccgtcaattttatatgcatggtacaggtcattggttaggaatggatgtacatgatgtcgggtcttacaaaaaaggtgaagactggcgtcaatatgaagaaggtatggtcgttaccgttgaaccaggcctatacattgcaccagacgatgaaagtgtagataaaaaatggcgtggtattggtattcgtattgaagatgatgtggtcgcaacctcgaaaggaccacgagttttaactgctgatgtggttaaaaatattgcagatattgaacatttaatggcgcaagctaaatcataa

SEQ ID NO: 45852 - DNA, 3216 bp, Acinetobacter baumannii
atgtataaaccaaccacatttgtgtggcagccatctgcagcatcattattcaaaattacagtccttagctctgctttagctgcgttgggtattacaacaggctgttcttcgactccgcaatctgcaaaaacctcgaaaacaaaacaggtgagtggagcaggctatcttgatgcaagcagtctggactctttagaagacttactttcagcaacagatatgcgtgctgtagagggtgaccgtttacttattttaaaacacggtgatgtctggaagcgtatggccgtaggcttcaaaatggacctcaatcattgggatccacgtattgaagcgcagcgtagttggtttatctcacgtcagccctaccttgaccgcttaagtgctcgcgcaagtcgttatttatatcatactgttaaagaagcagaacgccgtggtcttccaaccgaacttgcattattaccagtgattgaaagttcatatgacccagctgcaacaagtagtgcggcggcggcgggtttatggcaatttattcctagtactggtcgtatttatggtttacaacaaacgggtatgtacgacggacgccgtgatgttgtggaatctacacgtgctgcctatgagtttttaggaagcttatataaccagttcggttcatgggaattagctttggctgcttataacgctggtccgggtcgtattcaacaggcgattaaccgaaatcaggctgctggtttgccaacagactattggtcactaaaattaccgcaagaaaccatgaactatgttccgcgtttcttggctgttgcacaaattattaaaaacccacgcgcttatggggtttcgttacctccgattgcaaacagaccccatttccgtgaagttaccttatctgcaccattatctttaaatgaaatcgcgtcggtgacgggtcttagtcgtgctgagttatatgcattaaacccaggctatcgtggtgaaacagtagaccctgcaagtccaatgcgtattttgattccagctgatataagtccttcagtggataacaaattaaaaggaatgaaagcaggtggaagttcaggctggtgggcaagtgttacttcgccgtctaaaccgaccacaacgacttcaacttcagtcacagttagaactactccatcaactccagctcagccagtaagaccatcgacacctgctaaaacaagtagcagctcggtaacggtaaaaactgcaacacctcgtggttctgatgcgctagctgcttttgcagcgtcagctgatgtaccaagtgcaccacgtattcctgttgcggtcactccggctgcaaatatcaaacctgtgagaacggaaccgccaatttcagcaactgaacgcgagaaaattttagcggcagtgcgtgctgaaggggaaaaggaaacagttgatcaagctttagagcctcaagctactcaagctgaaaaagatcaagttgttgccgagttaaaagcacttgcacctcagggtacagaaattgtcgatccgtatgacggcaaaattaagttaaccgcaattcagaccagccaatctgttgctgagcagcaaggtaaagaagtaagtaaaggttttgcttatccaaaaactttagctgaagatgcaactcttgcaaactctgaagatgctcagcgcaataaagataagccttatatcaagactgatacagatgttgtggttgtacaacctaaaggtaagcgtagtacttatacagtacaaccgggcgatactttagcagttattgccatgaagaatggtgtgaactggcgtgatgtagctaaatggaaccagattgaccctgaaaagactttatttgtaggaaccagtctatatctctatgatgctaagcctcaagaggtggaaactacggcaaaatcggcagctaaacctgatgtctatgttgttcaagcaaatgacagtttaacaggagtggcaaatcaatttaatttgtcagtgaaacagctagctgaatataacgatttgtctgtaacagatggcttgtttgtagggcaaaaattacagttaaaagaacctaaaggtaatcgtgctgctaaagtagagccaaaggcaattcaagcaagtacacgtcgtattgcaacaaagagttatacggttaaacgtggcgaatacttgaaattaattgcagaccgttatgcattatctaatcaagagttggcagacctaacaccagggttatcagctggtagtaatttaattgtaggccaaaaaattaatgtacctgcaaaagaaatcactgttgatgaagttgatgacagcaaggcttctggtaaatatgaaaagcttgcagcaggtccatcatataaaactgaaagttataaagtacagcgtggcgacacattatcaagcattgcgaccaagtctaaaattagcctagctgagcttgctgaactgaacaacttaaaagccaacagtcatgtccaactgggacaaactctaaaagttccggctggtgcatcagttcctgaccaatatgttgtgcagtcaggcgatagcttaaatgcaattgcagctaaatataacttacaaactagttatttggctgatttgaatggcttgtcacgtactgcaggccttcgtgctggtcagcgtttaaaattaactggtgaagttgaaacaactagcaaagtttcggctaaaaataccaaagaagaaacgccagagacctacacagttaaatctggtgatagcctaggaaatatcgccaaccgctatcatttacagttagattatcttgctgcattgaacggtttgtctcgcaacagtaatgttcgtgttggtcaacgcttaaaattaacaggtgatttaccaacagtagaaacagctaaaacggatacggcgaaatcgtctccaaaagctgtagttgcagggaaaaatactgaaaagtatacggttaaagctggtgagtcgctaaatgctattgcgagtcgtgcgggtatttcagttcgtgaacttgctgaaatgaatgcattaaaagcaaatgccaatttacagcgtggacaaaatattgtgattccaaaaactgtagtggaatacaaagtcaaacgtggtgataccttaattggtcttgcgagtaaatatggtttagaaaccactttactggcggaactcaacaacctaacaccgtcgactcaattgcgtattggcgatatcattaaagtgcctaatttatag

SEQ ID NO: 45853 - DNA, 1479 bp, Acinetobacter baumannii
atgcgacagtttacgtctcttcaggttgcgatattagcactcggaagtttatgcttttcttcagcttatgctggttctacattagttccaatgtctgatgctgagttgtcagctactcgtggtcaggcattaatgagtatgtcttatatcgcacctactgactctgcaaatttagaaaaactacgtgacaatagcagtaatattggtttttataaattaggaatggaagccgagttagaaatcaatactaatattcgtaaactacagttgggttgtggtggtgtaaatggtgcgggtggctgtgatattgatattgataatttaagtttaagtggacagaattttgatgccaatggtaatccgctacctatgtctaatgaagatcgtgcctcatcttcggctgttttaaccaatccattcattgagtttgctgttaagaatccaaactcagcatcaacacgtgaagtagttggtttaagactaagtgctgaaaaatttattggactattaacagcaggtactgaaaatacaaccaccccgaatgggatcaactctatttcgggttatatgaaggttcagtccgatagtagtggtttgattaaaggttatgcaacaacttctgctacgcgagataatttatatggcgcaaatgctgtaacgggacgtttacaagctttaggcttgggaggatttgcagaggttagttttattacttcaaatggaggctttaatattccaggtattcaaaataactacttcgaaattgctcctattcaagttaatggtaaccgggttagctcaaaggttttatctgcaccagttaaagttcctaatatttatgtaggtcacagtagctcgtacccagtagatggtacggtacaatataatgcagcaggaccacatgatccagcttatcctgaaccgacaggtatttatactcaaggaggtaaggttgaagcaacggtaacagattgttctgtgttagcttgtgctgtagcaggtaaaggctcgaaattttctaatgtatatatgaacgggacaatttcaaatattactgcaaatttaaatttaactcagtcattaggtctcattcataatttaccgattaactcgccaatgtatttagctctacaaaatcaaatgttacagtggcctggtgcaaaagcagatgacgtagctcaaaagggttggtggatgtcttttgcagacccggttaatattggtaatattattcctcaagatgcgattgatatttcaccactatttccacaaatttcagctgctgtttctgcatatttacaagctaaccctgcgcaaacttctgatttgggtggtttgttaaaactgggtgacttggatgtgaatattagtacagttgatttaaaaaatagtcctcttactttaaatttaagtaatttacagttaaccaatcaaaactttaaaccaaactgccatggctcaggtttaactttttgttaa

SEQ ID NO: 45854 - DNA, 396 bp, Acinetobacter baumannii; identical to SEQ ID NO: 45336

SEQ ID NO: 45855 - DNA, 2229 bp, Acinetobacter baumannii
atgattacacgtcgtaaatttttaaattactctttaaatatgggctttggcgctgcagcgttagcggctttcccatcgagtattcaaaaagctctagcaattcctgcaaataataaaacgggcactattcaggatgttgaacatgtcatcatcttaatgcaggaaaaccgatcttttgaccattattttggtacgttaaagggcgttcgaggctttgctgaccgttttacaatccctctgccaaatggtcgccgtgtctgggaacagctgagaagtaatggtcaggttttaaccccatttcacttagatggaacagccaataatgcacagcgtgcagatggcacgcctcatacgtgggatgacagtcagttggcgtgggacaatggacgtatggcaaactggccaactcataaaaccgatatatctatgggctattttaaagaaaaagaaatcccatatcagtttgcacttgccaatgcctttacgatttgtgatgcctaccattgttctatgcacaccggaacagatgcgaaccgctcttttcatttaactggtaccaatggtgcaacaccgaccaagcgttcatttgtaaataatgaatgggactggattgatggtaacccagcaacggcagaccgtggttacacttggaaaacctatgccgaaagattagaagaagcagggataagctggatttgttatcagaatatgccagatgaatggggcgataatatgttgggtgcattccgttcttttagaaaggccaacattgcatccggttatcccgtttcaagcggtggagagccgaataaaccgtatgccgatacgggtcaaaaactaccgtataaagcctatgatgcggctactgataatgccaaaaatccactctataaaggcattgcaaatacgctaccgggcaataaaccagaagagtatctcgacgcttttaaaagagacattcgtgaagggaagttacctcaagtttcttggattaacgcgccatcgatatactgcgaacatccagacccttcaagtccggttcaaggagcttggtttattcaagaaattattgatgcattaactgctgtgccagaggtgtggagtaaaacggctctgctcatcaactttgatgaaaatgatggttactttgaccatatgccatcgccatcagcaccatctcgactcaaaaatggccagtacgcaggtaaatcgacactaagcaatgctgatatgcaagatgaatattttgatcatgctgcacctgaggggagccattcacagcctacacctgatggacgagtttatggtccgggtcctcgtgttcctttatatgtgatttctccatggagtcgtggcggttgggtcaactcacaagtgtttgaccatacttccgtgctcatgtttttagaaaaacgttttggtgtaaaagagccgaatatcagtccataccgccgtgcagtgtgtggtgatttaacaagtgcatttaactttaaaacaccaaatgcagatgttttaccgcagctgagtggtaaacaaacacgtctgcaggcagatgcgctaagggaaaaccaagaagctttgccagctgttcctgtacccacggatattaagttacccattcagcaaagtgggatccgtctatcacgggcgctaccttatgagttgcataccagtgcgcgttgtaaagcagatggtaaggtgcaattgattttttctaatacgggtaagcaggcagcggttttccatgtatatgacaagctcaatttagaccgtattccaaagcgttatattgtcgagccgaataaaactttagatgatgagtgggatgctttaaacgataacttaggccgttatgacctatgggtacttggtccaaatggctaccatcgtcattttaaaggggatgctcaacgtattatcgatagtggtgttaaacctgaaattcgagtgtgctatgacattgctaatggtgatgtttatgtcgaactcatgaatgagggaaccaaggatacaatattgacagtaaaaccttgtgcatatcgacaagatgcgccattgcaactgaccgtaaaagcgggacaagttgttaagcaacattggtcgttggctgatgttgggcattggtatgattttgaagttacgagcgagagtgatccgtattattaccgacgttttgctggccgagtcgaaacaggtgaggactcctttagtgatcctgcaatgatctaa

SEQ ID NO: 45856 - DNA, 9243 bp, Acinetobacter baumannii
atggtacaagtatcattaatggcaaataatgcttcaaaaaataatacagttgatattaatgttggccaaacaaaaaatattgtagtagatccgaaggtaatcgcaaaaattgatattaatccagaaaaaattgcttcaataacaagagatggtaatagtgcggttatccatctaaaagatgggactgaaattgttttagagaacttttttattagtgaaaatccacaaattcttttaaatgaggggcagatttattgggctgctaatttagctgaagatgctacaggacagaccactgttaattatttagaattaaaagagataccaaaatatatagatgcttcatcttctgtacctatctggtcttgggtggttagtgctttagctggtgcaggaacagttgcattattatcccagcaagacgccaaagataaaacacctccggaaccaggtaaattgtctttccaaaatcttttagattcaggggagttaacacaagatcaaatcacgaatgataacaagtttaatttaaaactcagcggacaggaaaagggaagtagcgtaacgtatttaatctctaccgatgaaggtaaaacctggcaagagacgacattaaatcaaaaagatttagctgacggtatttatctttataaagctgtagtgacagacgctgctggcaatacctcggaaacggctgtacaaaaagtagttgtggatactaccgcgccacaagcaggtgaactgactttatctgacttgaatgatacaggcgtttcagtaacagatcagatcacgcaagataaaaacttcaatttaaagcttgaaggacaggaaactggtagccgagtaacatatttagtttccactgatgaaggaaaaacttggcaggaaaccacggtagtccaaaaagatttggctgacggtatttacaaatataaagctgtagtgacagacgctgctggcaatacctcggaaacggctgtacaaaaagtggttgtggatactaccacaccacaagcaggtgaactcactttatctgatttgaatgatacaggtgtttcagcaacagatcagattacgcaagataatagttttactttaaagctagttcaaccgattgtgattggggaacaagccgctttactagaccactatgaagtttcaaaagatgaaggaaaaacttggcaagagacaacagctgatcaaaaagatttagctgatggtatttaccaatataaagctatagtgacagacctagcaggcaatatctcagaatctgctatacaaaaagttgttgtagataattccttaaatgttgaatcaaccacagtgattgtaaagccgattactgaagacaatacaataagtctagttgaaaaagatcaagttatttctataagacttgaaatagctaatttacccacagatttaaatagctcactgacatcagtaaatacgacattagacaatgttacttataactttcattttgatgaagtcacgcaagaatgggttaccgaaattccagcagagtttctttggtcagtagagccgcaaaccaatatatcaattgatattagtcttactgatcaagctggcaatacagccattatcacacatacccaaaattataatgtggatcatactccgaattcaccaaccctagattcactaactttcaacaatatagatggagctatcatttcaggtagtgcatataaaggaagtaaggtcgatatctacaataaaaatggtgattggcttgcaagtacaataactaatgaagaaggtaaatttactttacaagatctttcaattaactcaaatcaagaagtttacgcagtcgctacttataatggttatagcagtgaaaattcatcaattgggttagttactgaagttccagctattagtattacacgaattagtccagaaggcgtgattagtggttatgcgactgaaggtagtcattttattgtaaaagatcagaatggaaatattctacaagaatttaattctaatgtatttgatagctctggtattacaccatttagtgtaatggcattaggcgaagtaagaccatttattttgtccctcgatcagcctttagaggaaggggctcaaattattatctctacagataaagataatatttcaggccatccacaatatattactgcagactatactccagcagtatttttagaaactccacaatttgatattagtggtgagactttatcagtacatgttaatgaacctaacagctttattcgtgcattttctggagaaggcaatttaattgctacaggttttaccgatgagcaaggctttgcaagtttacaagtgttccaatttttaaaagaaggcgaaacggttactgtacaagtagtagataaaaatcaaaatacgagtgaaaccctaatcgaggttccaaactttgcttatattccacatgttgaacgtattacacaagaaggcttaatttctggagttgctgaagataatagtacggtaattgtacgtgatgctgatggcaatgaattaggaaaggttacattaggtgatgataatagttggagtgactttagtcattttagcttgagtgtaaaccgccctttaattgatggagagaaaatttccgttcaaattattgataataaagggttaatgagtcctgagcaaaatatcatcgtagatctgactcctccacctgctccaacggagttaaatttcaatgatgctggtgatttagtttatggtcatgcagaacctttctctgaaattttagttaaagatgggcaaggaaatattcttaataaatggttttggaataactggaccgatgagagtggaagtttctcaatagaactaggtacatttttaaccaatgctgagacggtttatgtcacggctaccgatgtaaatggaaacgtaagtttagcagctcagatacaagcacctaattatgcctttgctccatatgttgatagctttacttcggatggcgtgataagtgggcaagctgaaaataatagtactctcgttgttaaagacgccaaaggtgacgttgtagccgaaattaaagttggtgaagataacggttggaatggatcgagttattttaaactccagcttgaccgtcctcttgttgatggtgagcagtttttcttatcaattaaggatgctcgtgggcaagtaagcaccgatactgtaattaccgctgatacggttgctcccgcaccagccagtaatttagttttctcagaagatggttcatatcttacgggtgtagcagagctgaatactacgattcaggtttttgatcataatggtcagctagtgaatatatggaataacaccattaactctgatggtacatttactatttacttaggtagcaacaatttacatggagaagcattcacagtcactgttaaagaccaagccggaaatgtgagtgaagctatttcaataaatgcgccacttgacgatattgcaccgaatccaattaaaaatattttacttgatgcaaatggtcaaaactttacagcacaagcagaagcaaatagtcagatcgaagtttttgattcattgggtaatcagacaggttggggttctacagatagtgcaggtaatgcttctggttctttcaatcaaacttatttacacggtgaggaactcacttttgttgttatagatcgagcaggtaatcgcagtatcgaatttaagcaaaatgctttaattgataccattgcaccaaatccgattgaaaatatcatcttcaacgaaaatggccaaagttttacagctcaggcagaagccggaagttctattgatgtattagatcagactggaaataagattggttttggttacaccgatagctcaggtaatgtatctggttattttcaacaagtttacttacacggtgaggaacttacttttgtcgtgatcgatcgagcaggtaaccgcagtgcagaggtcaagcagagtgctttgaatgatgacgtcgcaccaaatccgattgaaaatattgtattagatctcaatggccagaactttacagctcaggcagaagcaaatagccaaattgaaatcaaaaataataacggtgacgtcgtaggttatggatcagcagatagtgcaggtaatgtttcaggatatttgtatcaagtgcatttacatggcgaagagctcacttttattgtagttgaccgagcgggtaaccgtagtacagaggttaagcagaatgccttgattgatgatattgcgccaaatccgattgaaaatattatattagatatcaatggtcaaaactttacagcgcaagcagaagcaaatactcaaattgaagttaaaaatgctgttggtgagattgtaggttcaggttatgtggatggcgctggtaacgtgtcaggttatttatatcaagtctatttacatggagaagagctcacttttattgtagttgaccgagcgggtaaccgcagtacagaggtcaagcagaatgccttgattgataatatcgcaccaaatccgattgagaatattttacttgatgcgaacggacagaactttacagctcaggcagaagcaaacactcaaattgaagtcaaaaatactgctggtgaagtcataggatctggttcaaccgatagcatgggtaatgtttctggttacttctatcaggtctatttacatggtgaagaactcacttttgttgtagttgatcgagcgggtaaccgcagtacagaggtcaagcagaatgccttgattgatgacattgctccgaatgcgattgaaaacattatctttaatgaaaatggtcaaaactttacagcgcaagcagaagcaaatagcaaagttgaagttaaaaatgctgcgggtgaggttgtaggttctggttatgtggatagtgctggtaatgtgtcaggttacttgaatcaagtttatttaaaaggtgaggagctcacttttgttgtgattgatcaagctggtaatcgtagcattgaagtaaaacaaacagcctttcttgataatacagcaccggaaaatgcgactaatttagtatttagtgaagatggctcatatctaagtggtatggctgagccaaatgcgacgattcaaatatttgatcagtatggtcaattattaaatcagtggaataataatgttaattgggatggaacatttaacatctatttaaacagtaactacatgcatggagaagtatttaaagtagttgtagttgatcaggctggtaatttgagtggtgaggttactgtaaaagcaccgcttgatgatattgctcctgtagctgcaagtgatctggtctttaatgaagatggttcatccctttctggtgtagctgagccaaataccttcatccagatttttgatcaaaatggtcagcagatgaatacgtggagtcagagtgtaaatgctgatggtacatttactatttttttcggtacttacaatttacatggtgaagagtttacagtcattgttaaagaccttgctggaaatgtgagtgaagctgtttcagttaaggcgccgcttgatgatattgccccaaatctgattaaaaatattgtatttgatgcaaatggccaaagctttacggcacaagcagaagcaaatagtcagattgaaatttttgactcatttggtagtcagataggttggggctctaccgatagcactggtaatgtgacgggttacttctatcaagtgtatttacatggagaagaattaacgttcgttgttatagaccgagtaggtaaccgtagcgatgaaatgaagttaaatgctttgatggataccattgcaccaaagccgattgaaaacatcatctttaatgaaaatgggcaaaattttacagcacaagcagaagccaatagttttattagtgtcaaaaatgctgcgggtgagtttgttggctatggttatgtcgatagtactggtaatgtgtccggtcacttcaatcaggtttacttaaaaggtgaggaactcacttttattgttatagataaagcaggtaatcaaagtattgaatataagcaaaatgctttaactgatgatattgcaccaaatccgattgaaaacatcgtcttaaataaaaatggacaaaactttacagcgcaagcggaagccgatagccaaatcgaagttaaaaatactgcgggtgaggtcgtaggttctggttatgtagatagtattggtaatgtgtcaggttcttttaatcaagtctatttacatggagaagagcttacttttgttgtagttgaccgagcaggtaaccgcagtacagaggtcaagcagaatgctttgattgatgatatcgcacctaatcaaattgagaatattgtttttgatgtaaatggtcagtactttacggggcatgctgaagcagatactcgaattgaagtactagatcaatttggcaatcgcgctggttggggatatgttgatagccaaggtaacgtgataggttatttcaatcaggtttatttacatggagaggaattaactttcatcgttgtagatatagctggtaaccgaagtgttgaagttaagcaaaatgctttaattgatgatgtcgcaccgccagcagcagcaaatattacattaacttcagacggattgctttttggtgaggcggagccaaactcaactgttgaaattattgatcaatatggtgcagttatcacaacaacttatgtttggtacgatggcacatttaatcaatggattaatttgagtcaataccagacacaaaatttaagtattgttgtcaaagatcaagcaggtaaccgcagtgaagttgctcatcagttagtaccagtatttaccaactcaccaattgctgcaacagagctaaaattggatatagatggtcatattctaacagggaaggcgacagtaggaatgtcggttgttgttacatctactgatggtcagaccattaacggagggtggaataatgctgtgaatgaagatggtagttttgctattcagttaaatgattactatctacagggacagacattacaagttcgagtttatgatcagaatacgaatcaatatagcctaatctctgaaattattgcgcctttagacaatattgctccaataattaatgatgtggtaattaacaatgatggttatagcattactggacacactgatccgaaagtaatcattaaagtaatggatgaggacggagattttagagcagaatttcaatcggatgaagcgggatatttcaatgctagtatttatccaccactattacgtggagagcagttatttatcacggcaacagatttagccaaaaatataagtacgccatttaatattacttttaatgcagatattaatgcaccaccttcagcaaatcatgttgtgatatctgaaaatggtttctttattgagggaactgctttaccaaatagtgtggtgcgtatttatgatgtgtatagtaattatattggcggtggttttgtagacgaaacagagcattttaatatccagttatattcacctcaggcgaatgggcaaactttacgcgttgttgtggagcaaaatggctatcaaagcgcttacaccgaaattaccgcacctatagacactgtcgcaccaaatgcagcaactcagcttgtcttagaagatggaaatgtactttcaggacaagcggaagcatattcaacagttaatatttttgatgctaataataatttagttggtcagactactgtcggaagtgaaggtagtttcttaacacaattatggtcacaatattggcatggagaaacattgacggtaaaagtagttgatgccaatcaaaatgtgagtgtaagtacgacgattactgctacaaatgatacaacagcaccgaaagtggtcacccagcttgccataaatgaatggggtaattggctggtaggacatgccgaaagcaatgctactcttgaaattacatattattttgctgatcaagaaccttccgtaacgagtactacggtcatggcagatggaactttctctacttatgtgtatgggactgcaacgtcatttgaccttactgttattgatcgtgcaggaaatcgtagtgaaactatcagcaaagcgattaatgatttacctacaatcactgttgatcagtttaaaggtgatgctacggataatacgtatatagttgatcatataagtgattttgttgaagaatatactgttgagccgtatgcaatatataaagatgtttggattgataatagctatatgtatccagaatgggttagtgaaggtcattatgaacaaatatggtttgttgatggatattatgattcccaatggatcacaagtggttactcaactgtacaaaatgtttatcaagatcagaatggtataacttatattgataatggtacggcagatagcgattatagtcgatatgaacaacaatattatgatttcgtgaatgggcaatggcaagaaggctacgaactgacttatatacgttctgaagaaggttgggttgatacaagtcataatgaagatgtttatattgatacaagtcattatgaagatgtttgggtagatactagccactatgaagatgtttgggtagaaagtggctattgggagaaccagcttgtcgaatcaggctaccgagatttcgattttggtggacacgataaaatagtaagctctgtgagttatagtctggttggatattctgattggtcgacaggtctagaaagcgggcgttatgtagaagacttggaactggttggttctgctcatctcaatgcaacaggtaatgctttagataatcttttaacaggtaactctggtaataacattttgaatgggcgtgaaggtaacgatacctatatcactaatgaaggtactgataccattctgttccaattgctaaatagccaagatgcgactggcgggaatggacatgacacggtgttagattttactttaggtgatataagaactaaccttcaagctgacaaaatcgatttaagtgaactattaattgactattctaaagatgtaagcgcattagctaaatttattactgtagagcaagatgctgggaacacgactattagtcttgaccgagatggcgaaggtacaatgtttaatagtgtgtcactgttaactctaaatcaagtaaatacaacattagacgaattactaaacaaccagcaaattattgtttag

SEQ ID NO: 45857 - DNA, 819 bp, Acinetobacter baumannii
atgcggcacacacattttttaatgcctttggcacttgttagcgctatggcagcggtacaacaagcatatgcagctgatgatttcgttgttagagatattcgtgtaaacgggttggtccgtcttacccctgcaaatgtttataccatgttgccaatcaacagtggcgatcgcgttaatgaaccgatgatcgccgaagcaattcgaacattgtatgccactggactttttgatgatattaaagcatcaaaagaaaatgatactttggtttttaatgttattgagcgcccaattatttcaaagcttgaatttaagggtaataaacttattcctaaagaggctttagaacaaggccttaaaaaaatgggtattgctgagggtgaggtttttaagaaatctgctttgcaaaccattgagacagaattagagcaacaatatactcaacaaggccgttacgatgctgatgttacagttgatacagttgctcgtccaaataaccgcgttgaattaaaaattaattttaatgaaggaacgccggcaaaagtctttgatattaatgtaattggtaatactgtttttaaagacagtgaaattaaacaagcatttgcagttaaagaaagtggttgggcttctgtagtcacacgtaatgaccgttatgcacgtgaaaaaatggctgcaagtcttgaagctttacgtgccatgtaccttaacaaaggctatattaattttaatattaataattcccaactcaatattagtgaagataaaaagcatatctttattaaggtagccagtttaaatttggtcaaactaaattcttag

SEQ ID NO: 45858 - DNA, 1356 bp, Acinetobacter baumannii
atgaatgcactgtttatgattgcagcggcagctcttttacttgggcctctaattgcaatccatgagtttggccattactgggttgcgcgaaaacttggtgttaaagttttagtctactcaattgggtttggaccaactttactgaaatggacgtctaagaagtctggtattaaatatcagctttctgccttacctttaggtggctatgtcaaaatgttggacgagcgagaaggtaatgtggcagaacaagatctaccatatgcttttaaccggcaaaaaccgtggaaacgtatagcgattgttgctgctggaccattaattaacttgatttttgccgtactcctcttttggattttgtttttaccagcccaagaacaattaaatactaaaattggcaaaattattccaaactctccagctgcagcagcccagttacatgtaggtgacaaaattattgctgttgatgggaaagagacagcaacatgggaaaagctaaactttgctttgattgatcgagttggggaaacaggtactgtaaatattgatgtggaccgtgctggttccgaaaaaaattttgtattaccaattaaagattttttaaaaaatcaaaatgaatctgcactggacgtattaggtttcttaccttatcgacctgtgattcctgctgttgtaacagagttaacggaagatggtgcggcgattcgtcaaggaatgaaagtgggtgatcgtattgttgcgattgatggccagcctatgaaagattggttcgacgtggtagaagttgtccagcgttccccagaaaagttacttaagattgatgtcttacgtcatgaacaactagtacatttacaagttatgccacaaggtaagcgtgatagcatggggcaggtaaatggagtacttggtgtaaaaagtgatgctggaaaaattacaattcctgacgaatataagcaaacaattcaatatactccaatacaagcttttgaaatggcacttgataaaactggccaaatctctagcatgattttgaattcaatagtaaaaatggttaagggactaattggattagaaaatctttctgggccaattaccattgcaaaagtagctggccaaagtgcagaaatgggttgggaaacctttatctcttttatggctttaatgagtgtaagtcttggaattttaaacttattaccaattccaatgttagatggtggtcatctagtgtattacattattgaagctattcgtgggaagcctgtttctgaacaaatacaaatgtttggtctaaaaattggtatggtactgctcggtagtatgatgcttttagctttatttaatgactttatgcgtttgtaa

SEQ ID NO: 45859 - DNA, 654 bp, Acinetobacter baumannii
atgcatgatccagtccttgagtcacatcatctcgtatgtgaaaaaccccaaacacgccgcggtatagaacgtcgtttagctctattgctaagcgcaaccgagctgtttttggaaaaaggatatgatgctgtctctcttgacgacatcgtcaatcatgctggtggttcaaaaacctctatttataaatacttcggtaataaagatggcttatttactgcaatctgcgattatcgccgtgaaatgttttttaaagatatctgcattgcatttcaaccagagcaaacttctttaaaagattatttaatccaaactctcatccgtttttataaacacattattcaacctgaacacattgcctttttacgtttggttattgaacaaactcaatgtaatgcaactttgagccaatacttatatgaaaaatgtgctctggatgtccaaaatacaattgctcaagccttactcatatctcatcaatcaggtgaaattacctgtacatctcctgatcattcctctcttatgtattttggaattttacgtgatattgaatggcgaatgattatgggaatgcctcttccacccaatgagacagaagttattgattatattaactattgtgttgatattttcttaaagggccatcataaagtctaa

SEQ ID NO: 45860 - DNA, 921 bp, Acinetobacter baumannii
atggctctaagacatttcctgactttacgtgatctatccactctagaacttaatcgcattttggaacgcgcaagcgaacttaagaaaatgcagcaaagcaataaggtatatcaaccttttgttggtaaagtattgggaatgatttttgaaaaatcgagcacacgcactcgtatttcttttgaagctggtattaatcaatttggtggtagtgccattttcttatcaccacgtgatacgcaattaggccgtggcgaaccgattgaagattcagcacgtgttatttcaagcatgcttgatatcgtaatgattcgtacttttggtcacgatattgttgaacgttttgcatcttattcaaaagttcccgttatcaatggcttaactgatgatcaccatccttgtcagttacttgcagatttacaaacttatattgaacatcgcggcagcattgaaggcaaaaccgtagcttggattggtgatggcaataatatgtgtaattcatacattgaagctgcacacatgatgggtttcaaactcaagattgcatcaccaaaaagttatgaacctaaacctgaatttttagcagagtttgggcattgtgttgaactttttgataatgcggaagatgcggctgtaaatgctgatcttatcgttacagatgtatgggcaagcatgggacaagaagaagaacagaagctccgtgaaaaagcctttgctgattttcaggttaacgagaaattaatggggcttgcacacccggactgtttattcatgcactgcttacctgctcatcgtggtgaagaaatttctgaaaccatgctcgaccataaaaatgccgtagtatgggacgaagcagaaaaccgtctgcatgcacaaaaagctttaatggaatttttactcaacgaaaatttgaaaaaagcttaa

SEQ ID NO: 45861 - DNA, 228 bp, Acinetobacter baumannii
atgaactacgcagaaatgtatgtagaaggtgctttaccaaagattgaagcagacattgcacaaaacggagtatgtactctttattcaaagatgactttaaatgaagaaacaacaacggccatttcagatctacttcgtgaaaaaggcttcaatgcggaagtatcaattgaagatgatcctgattttattggtagtagatataagcttgtaattaaaaaagcatcgtaa

SEQ ID NO: 45862 - DNA, 609 bp, Acinetobacter baumannii
atggataagttagaagaatttagcctgaacgggccaaaaaataccgatggactaactttattaagtggctttccatcaaatcagaaacccgctcgtcaatggtttaactggttatttaattcaataaccaaaaagattaatgaaatcattgatggcaagctggatgcaggtgctaatgctgtttctgcagcaaagttagaaaagggacgaaagataaatttcactggtgtaatccagggtagtggcacatttgatggctctaaagatattactatcgatacggtcgacggtggaaccataggtgaaaaagctatcgctattattcgcctcaacggctcaacgttcgatttagtcaaaagccgtggctttgcttcagttgaaaataaaggtggcggccaaatcgaatttactttgagtgagggtgcacctgatacagattatggcatcgtatgtactggaacaagcaatcgagctgatgcagttagcttgcaagagcgtgaagactttgcccggacaaacaccaaattccgtctgatgggagcatttggtggtgataacactcaaggctcatatactcccaagatctgcactgtagtcgtctattactaa

SEQ ID NO: 45863 - DNA, 591 bp, Acinetobacter baumannii
atgcaaacagatgattacttgaatctgatcattaatgagcaccgatctaagcctaagtttaaacagacagtcaaagaatcaatagaacctattcttgattgtataaacgtgctgcaaagcataaatgagaagtttgacttagatacagccactggcgatcagcttcacattcttgccgagtgggtgggtgcgccactggttgttcctaatattattcctttaccgttctttggtttcgaggggcagcctgaggcattaaccttcggtgaaacggataacccagatattggtggtttttggcgcgaatcaggtgtcagtagttatcgtggccagagcaccccccctcaaaaattaccctcagttgttaaagctaaaatcttgttaaacaactgtgattgcactctcgatgaagcatttgaaatctgcaagctattaactgatgtgcctttcaagctaaaggacaacagagacatgaccgttacttttgaatttcttgcagagtttcaacctatagataaagaactagtccgcttgttatttcctttaccaagtggagttgagctaattttttcggatgaagtagatggataa

SEQ ID NO: 45864 - DNA, 1185 bp, Acinetobacter baumannii
atggcactaactagcatagccccagtaattaaccaatatggcgtaacagtttcaacatacagtgaaattgttgagcaccttaaagaaaaatatcgagaaatttatggccaagatgtttacttagaaaatgatagtcaagatggacaatggattggtgtaattgctcgtgtaattgctgactgtaatgcggttgtttccgacgtttacaactctatgtcgccaagtactgccgatactgatgcgctttcacgcaatgtcaaaatcaatggcattcgccgtgcagtggccacaaaatcaactgtatcagtggttttggtgggcgttgccggcacaatcattaataacggtattgtgagtgacaaaaacaataaccggtggttgttgccggcacaagttgttattccttcagaaggtgaaatagttactacggcaatagctgaaaagcctggagcaattttggctttaccaaattcagttacgaccatttcaacacctacacgtggttggcaatcagttaataatcctcaggcttccacattaggtgcgccagttgaaagcaatgctaaattacggcaacgccaggcactatcgactgctattccatcgcgttcttatactgaaggtattttaggtgcgttgtttagccttgatggggtaagccgttgtaaggtttatgaaaataaaaagtcattcgtagatcctttagggctaccaccaaaatctttagcggtagttgttgcgggtggaaatgatcaattgattgctgaaaccattcgggtaaagaaagcgcctggttgtgatctatatggaaatacaactgtgattcgcccaacggtttacggtgatcctgtagaaattcaatattggcgacctattcagaagtctattggtatccgttttgaattaacgactaattctgattacacggtagatattggtgagcaaataaagagcgcttcagccgattacattaatcagctcgatattggtgaccgtattgcaattaataagctgtatgtaccagcaggtttatacggtgcattggatgccaggtcttatgaaattgaaagccttcaattgactgtagacggcgtaccagttgagggtgattacaccttggcttttaacgccgtggcctattgtgattcagacaatatcgagatcagtgttgctggaggtggttaa

SEQ ID NO: 45865 - DNA, 354 bp, Acinetobacter baumannii
atgcgctatagaaagctagatgaagatggggattatagctttggccaaggtcaaaataatttccatagtaatacacctgagggtgtagcgcaggcggttatgacgcgtcttaagttttgggtaggtgaatggtttgctgatacttcagatggtacggggtggacaacagacgtgctggggaaatacacagatcatctttttgaattgatgattcgccagcgcattttagagactcaaggtgtactccggattgattcattcgatagtcaatttaatggagaaacacgcacgttatccattcaatcatccatcaccacgatctatggtcctgccgatctgcaaggggatatttaa

SEQ ID NO: 45866 - DNA, 663 bp, Acinetobacter baumannii
atggctttaagtaataacgaaagatcgccccatttgcttaatacaatcaacgatgcgattaaatctgctctagcagtactgtggactaatttgccttgtatcgttgattcttatgatccagataagcaaacagtatcagttacaccagctattcagataccggtaatgcgtgaagatgggtcaatggagttagtggatctaccattaataccagacgtgccggtatgctggcctaaagctggaggctttgctttaacatttccagttaagcggggtgatgagtgcctagtacatttctcctctaggtgcattgatttgtggtggcaaaacggaggcattcaaccaccgtttgaaaaccgtaagcatgacttatccgatggtttcgcaacatttgcgccgcaatctcaacctaagcgattaaagaatgtagccaccgatgcagttgagttaagaaatgatggaggcaatgccaagatccggattaatgatgctggagagttggagtttttaggtaccaaagctacttttaattgcccggttgaaatgaaagatgggttaggcgtcttaggggcattaaaaaataacgatgtggatgttggatctagccatggccatacgaaagtacagccgggtaatggtgagtctggtccaccgaaaccataa

SEQ ID NO: 45867 - DNA, 960 bp, Acinetobacter baumannii
atgagtgaacaatggaagcgtaattgccggctaaccgttcaacttaaatatggtgagcctgaggcattagatttatctgaaatgcgaattgtatttcgaattaatcaacctacggccgaaacgcctaaggcagcagagttttatatctacaacctatctgaagacacaatgaatcgtttggctggtgaagacaactcaaatgtcggtgctatggtcacttttgaagtagggtacggtgatgaattatcaaccatttttaaaggttcaacttttcaataccggcgtgagcgtgaaagccctacggataagtttttatgcattctggcccaatctggagataaagctaaaaactatgctttagtgaataaaactattgctgccggcacgacagtagatcaggtaaaaaatgaaatcgccaaagagtatcaggctaatggtgtagaaaccggtgaattgccacagcttagtgatcaaacatatgttcgcggcaaagtcatgtttggttcactagacgatcagatccgccagttttgcaaagacacaaatacggagtacttcattgatgatgaatacctctacatggtcggaattagtagttatttgctggactctgtatttgaaatgaatgcaaatactgggatggtcggaatgcctcagctaactactgaaggcttaatggtgaattgcctccttaatcctcaattacgccgtggtagacgcatacatgtcgatacttcaagtatccagacacaagcttttgatattgattaccaaagccagggcgttgatcaaccacaaaaggatctaaaaacggctggtggtattaatggtatttacatcatcaaggcagttgagcactacggagatacacgtggtgatgactggtatacaagcacagtttcagttggtcagggtgctgtagttcctaaatctggtattacaattacggcggtggattga

SEQ ID NO: 45868 - DNA, 297 bp, Acinetobacter baumannii
atggctttgtatgaaatccctttgctcgatcggaatcagaagttttttatcaaactaaataaagtgaattatcagctcaaactgatttttctaaagcgctggtatctagatatttttcaaactaattcagagcctgttgccttaggtattcccttagtctcaggtgtcgatattttgagcccttttagccatgtaattagcggctctatgtacgttcaaaacctcaatgaagatgagagccaatcatttggtgatttaggtaccaacataaaactattttggcaggatccggaatga

SEQ ID NO: 45869 - DNA, 597 bp, Acinetobacter baumannii
atggctatcactgaaacagttggctcactattgtttggtggtcatcgttcaataatgggtttatttgcagatgtagttattgaagagaatcattctgatgagcttgtaataacagagcatcccgttgaaaaaggttcacctatttctgaccactgctataaagcaccgccagaggtcaccatgaaaatcgggtggtctgaaagtgctggaaggatgaatggtcttattggtaatacatttattgggtcagatttgtcacttcttggtatttatcaggggttgcaggccttacaaggtcaacgacttattatttctactggtaaacgcctttatacagacatgttgattaagtcattaaagaatgtcactgatgaaacttccgaaaatgctttgatgatcgatattgtatttaagaaagtttttattgtttccacaaaagaaacgctggtttctatcgctgatcaaaagaatcctgaagtaacttctgatgttgttgattctggtaccaaacagctgaaacaagttaactcttcagtattgaatactgttttaggaccagctgtagatgcttttagttcattaatgagtggtaagtaa

SEQ ID NO: 45870 - DNA, 450 bp, Acinetobacter baumannii
gtgagcacatcatcaagaccaatttgtccctactgtaatagtaagcagacacgatttgcttcaagcaaatcaaatatacttaaatcacaatacacttgtaaaaattgtggccaaagcttttcagttaaaaatgaactgtatgaatcaaaaggcggttgctttaagttctttttcaaactgatattttgggtagtaattgtagctattggctttgccatttacttggcaaaatttgataacacccctaataaatcgcaatcttctacacaattaactgaaaagaaaaattcagatagtagtgataaggaggaattttcaccagaagctgaaaaagctgctcacgaatacatccccactgaagaagattataaaaaacatgaaagtattgctgatagtaaagatcaaagtgatactttaaatatctctacaactattcggaataaagattaa

SEQ ID NO: 45871 - DNA, 357 bp, Acinetobacter baumannii
atgaagagaatcttattgttggcaacagcatcattattaagtttcggcacttttgctaactgcgaaatttactttaatgaccctactgatgtagcgaaatgttatgaagacgaatcctttgcgaaagtcacctctaatcttaaaaagttaaaagaaatttccaaggaacagttaacttataatcctaatgtcataaatgatttaaataaatcacaaaaagcatggttgctttaccgtgacagctattgcacaacttatagtttctatcacggtgaaagaaacgcacatgcgaactgtatcgtccagttaaataatgatcgtgcaaaacagctaaaaacagatattgatgccaattaa

SEQ ID NO: 45872 - DNA, 2025 bp, Acinetobacter baumannii
atgagtgatacagttattcgtgacttctttgtgtccttaggtttctctacggacaatgaaggtgctagaaaaatggctgatacccttaaaggggtagagctaaaagcggctttgctgcataagactttattgcttcttgcaactggcgcagttgttgccgtaacaaagacagcaagtgaactcgataagctgtattactcatctcaacgtattggcgcatctgcttcaaatattcgtgcttatggtgatgcaatctcacaaatgggtggtaatgctcaaaatgcattacagtcacttgagaatgtggcgcagaagatgcgtaactcgcctggttacgaaggtatgttaactggcatgggtgttgctacacgggatggtaatggtcagttgcgtgaccgtgtagaagtaatgaaagacctttcaaaaacaatgaaagggatggattactaccaggcaaatgcttatgccagttctttaggtattgatgaaaatacccttatggccatgcgtgatgataagttcatcgacaacatggagaagtaccagaaattacgtcaaagtgttggcttaactgatgagcttaccaagtctggtaccgatttcatggttgaattccgtgacatcaccatgacgaccaaagctattactgaagttgttgtaatgaccgcagggcaggcacttatacccatcctcaagatgattaataactttttgcgaagtgctattgcttggttcgctgaactagatccaaggtttaaagcaattctggccactggattaaagtttgctttgctcgccgtgatctttggtggttttattggaacgattgctaaattggcctcagtactgccaatgttgaaagggcttcttttcctgatcaagtcgttacgtttagcttttttggcttcacctatcggtattgtattagcgcttgccgctgctattgctgctttatgggatgactaccaaacttggaaaaatggcggtgaaagccttattgactggtctaagtgggaaaacggaattgaaaccgcaattagccgtattaagcagttggccgaattaattaaaagccttaaggataaaactgtagagtttgttaccaaggcaattgatgatccagcaggaaccgcgaaagagacagcagaagcagctacccaagctgctaaaacgggtgcagcagtagttgcgaatgtagctaagacaaccgtaagtactattaagaaaagtgtttctaagagttatggttttagctttggtaaagatgttgatagatacattcatgaagctgctacaaaatatggtcttgatgagaaggttttacgtggcttcgttaaaatggaggatggttggactgggaaaatgtcacctacaggagcgattggtaccggtcagtttattcagtctacttgggataatctggcaaaaaccgctgagggtaaagcaattggtatgacaaagatcgggaagagatttcgtactaaaaacgatcctcgttatgacaagcatattaatactttagcaacaggtcttttggctaaacagaatgcagatattcttactaaaaatggattagcagttacgggggagaatctttatttactccataatattggaccgggaattattcctgctttaaagggttctaataaggtgtctgctaaaactctggaagcaataagagtaaataccccaattaaaggtcaaactcctgtacagtttgttcaatatcaaaaaggacggtttaagaagcattacaactcagcaaatgttggcgaaaagatcattaataatggtgagactaagattaataattttggtccaccaaatggcaatccagacaaagcccaagttaataattcttcaaatatgtctgctaaatcagtagtaatacatcaaagctataaaactgatatggtaatcaatggtgcaagagagccagtagaatcagcgaacgctgtaaaaaaacagcaagaaaatacgatgattcttttggctcgtaacactaaaagtttaattggttaa

SEQ ID NO: 45873 - DNA, 462 bp, Acinetobacter baumannii
atgcagattggtaattatgattacgaaattggtcgcttaaatgcaattgaccagttccatgtatcccgaaaaattgcaccaattattcctacgatcatgccaattcttacggagttggcaaaaggtgagcttcaaaaaatcattgagaagttagaaagcgctgaagaaaacgatgtgagtggcttggctgaggcaaatctcgaaagccttggctcagcattacaaccacttatggatgccttcgccaagatgcctgaggatgatgttgattatgtcattaagaagtgtctaacagtggtttcccgcaatggtgcaaaagtagtggtccgtgatgcaatcatgtttgatgatttaggcatggagcatatcttgccgctaactatcgccgtcattcgtacgaacttgggaaattttattcaagggctgcttacgaaggcattgagcacgaaacagcccacttaa

SEQ ID NO: 45874 - DNA, 444 bp, Acinetobacter baumannii
atgtctacatattcatttatggatactcaatgtaccctcgccagtgatgacggggtaattgacctaggttacggtgcgggcgttgcagatgaaggcattaccattgcaatggctggtgatgcgaacactatgacgattggggcagatggtgagggtatgcactctctgagcgctaataagtcaggtacggtgacagttcgcctattaaaaacatcacctattaacgccaagctttctaatctttatcacattcagcgctcaagtactaagaagtggggaaagaacactatcacactaaatcacgctggatctggtgataacgctacggcatcaaaatgcgcattcaagaagcatacggacttggcttacaagtcagttggtgacttcaacgaatgggtattcgatgcaatcaaaattgatcaaaaactaggagcgtatgagtaa

SEQ ID NO: 45875 - DNA, 1476 bp, Acinetobacter baumannii
atgacattgcctgtttcagacgttgttaatgtctccattagtttggcggcattagcagcagggccacgtagcttcggtaatttacttattcttggtgccacggatggtgttgtagatccagttgaacgtttacgcgaatactcgggtcttacacctgtagcattagattatggtaccgatgcgccagaatataaagctgctgaattgtactttagccaatccccaaaaccacgaactttatatattggccgttgggttaaatcggcaagttcagcggttttaaaaggtgcggttttatctgcagatcaacgtgatatttcaaacttcacagctatttcagatggttcgatgaaaatcaccattgatggttctgaaaaggttgtaactgccctgaacttatcagctgtcaccaatttaaatggtgtggcatctgccctaacagccaagctgggtaccgcttcagtaacttggaatgatgtttataaccgttttgaaattacgtcattaaccaccggtaccacttcgacaatttcctatgctattgccaatgcaactggtacagacgtttcttcattgatgggtttaaccgttggtcatgcttcggtaccagtaaatggctatgctgctgagccattgatggatgcaattacacatttagcggacaagtcacttaagtggtatgggttagatatcgctgagccaatttctgatgcagatgtgttagaagtggcagcattcattaatgcgacttcaccatctcgcatttatggccagacaattactaactcattggctttggatggtaccagtacagccgatctagcctacaagctcagtaaattaaataacggtcgcgtattttcgattttttcgggtgatacggcacatgcagcagcttcagtatttgggcgagcatttagcgttaatttcaatggtaccaacacgaccattacattgaagtttaagcagcttccgggtgtagccgctgaagatctacaagtttcccaagcaaaagccctaaaagataaaaactgtaatgtttttgccggctacaacaatgacaccgcaattcttcaagaaggtgtcatgtgtgatggttcattcatcgatgagcgtcatggtctcgactggttgcaaaaccatttagagacggcactgtggaatcttttctataccacgccaactaaggtcccgcaaacggaaggcggcgtaaatcgccaaagtactatgcttgaacgggcattggagcaggcagtaacaaatggccttattggtcctggtcagtggaatggtgattcttttggagcagtagaaacaggtgattacctttctaaaggtttttacgtttttgcgaacagtctagatgatcaagctcaatcagaacgtgaagcgcgtaaatctccggttttccaaattgctatcaagatggcaggtgcaacacatttctccgatgtgcttgtttctgttaaccgctaa

SEQ ID NO: 45876 - DNA, 540 bp, Acinetobacter baumannii
atgggtgattctgcttcagggggatatattacccctagtggcggatctgcttatgaccaagacctagaggacatctttcaagccttcattgtcgggattacatccttaccaggtgatatggttcgtccacgtttccaaagagaaccaccgccttttcctgaaattggtgaggattggtgcgccttcgccgtaaagtcaataattcctgatgatgggccttacttcgaccagaaagacgaaacaatggattcaattcgacatgaagaattgacgctgtttttatcgttctacggcgaccacggccaatcaattgcaaacgtcctaaaggatggtctaggcattccgcaaaacatcgcgcaactcaaagcgcaaaaaatcaaatttatcaaggtgggtgagatcatcaccgcgcctgactttctcaataatcagtatgtacatcgatatgacctaaccgctgtctttaagcggcaaacattacgcacgtttgctgttaagtcatttgtagatgctgggccgatagaatttcctaggagttaa

SEQ ID NO: 45877 - DNA, 369 bp, Acinetobacter baumannii
gtggctcaacttgatgtttcagacgttttgctagatccagacttcatggacacaggcattatttgtaagcgcacagaggtcatcgtaggaaacaatggacgatctcaagaaacgactacatcaacaccctttgatggcgtagttactacaaataatggcctcaatatggaccgtcgagcagatggcacattgattaaaggcgcaatcaacattcacacgcagtttgctttaacttcaggcgataaaaataccaaagcagatgagattacgtggaagggtaaaacctacattgtggctcaagtgctggacaatctacattatggccaaggtttcataaaagcaatttgtgagcttaaaccactggggtaa

SEQ ID NO: 45878 - DNA, 561 bp, Acinetobacter baumannii
atgagcagtggtgttaaatcttctggtaatggtttagctgacattttccaagctgtagctgaactttctcaaatggatgttttggtaggtattccacatggggaggctcgaaccgatggtgacggccttaccaatgcgcagattggttacctcatggaaggcggctcaccttctcaaaacattcctgagcgacctttcctggtgccgggtgttgaagaagttcaagaaccggtaggcgataagctggttaaagcggttgacgctgctttagatggtaatagtcagaaaatgatgaaattgcttgagtccgctggaatgattgcaatgaattcagttcgggcttatttcgttaatggtgaatttgcccctctatctttggccacaatccgtgctcgagcacggcgtggccgtaaaggcgctaaacagtatcttaaacagcttgaaactggtccagctgagtctggcctagttcggccgttgattgatactggagagcttagaaagttggttacttacgtgatcatgaaaaaggaaaaggaggtaaagcgtggctcaacttga

SEQ ID NO: 45879 - DNA, 387 bp, Acinetobacter baumannii
atgatcagtgaatcctcttttcgtgaagaaatgccggcatttgctgatacaacgcaatatccatcatttcagtttaatttctacttaaaccttgggaagaagctgcttcgtgaggaacgttgggaggatatgctcgattatggtttaacactgttcatagctcattatcttacgctttaccggcgtacgatgagtgctgcaagcattggtgctgatgctggcaaaatcgtaggtaatgagacgtctaaatccgttgatggcgtttcaaaatctatggatgtttccggcgttctcattactgatgctggtcattggaaccaaacgacttggggcgtccagttttatcagttattactgatggctggcatgggaggcatccaattatga

SEQ ID NO: 45880 - DNA, 432 bp, Acinetobacter baumannii
atgtctaagttagtacaaattcttctaagtaagccgctaaccgttaaccttggtcgtgatgaacaaggggaagcaaaaacaatcgttttgcaagctggaattcaagaagttgaagaagacgtggccaaacattggttcgtgaaagctcattcacaggaaattccagcacattcagcatataccaatgagcttgaacaagtccttgagcagaaagatcaggaaattgcagcaatgcaaatccagattgatgaagcagcaaaacaaattcttaagcatgacgaagaaatgaaggctaaggataaagaacttagtgatcttaaaattcagtcagcaaaagaacttcaagaccgtgacgctgaaattgcaaagttgaaggctgaattaactaaagctacaccggcaaaagaaaaggccacaccaaaggaaacctaa

SEQ ID NO: 45881 - DNA, 1026 bp, Acinetobacter baumannii
atgagtaaattactcttagcttcgaccatgactcaagccgtagcaatgggtcgaccaattcgagcgcgtacccgtgattctggaacaatgcatacctttgatgcccgtacgattgatagtactggtgcattcctattaggtgaattggaacgcctcgaccaaactctacatgagccattagcaaatattacatggggtcgtgatattgacttgcgctctgatgtatcaattgcagatgaagtatcttcattcacaaactctacatttgctgcagctggtggtccatcacctaccgggaaatcttggattggtaaaaataccgatgctattgcaggaattgcgttggatatcggcaagactgcccaacctcttagcttatggggtatggaaattggttataccattccagaattggagtctgcacgagctgtaggccgtccagtggatgaccagaaatttaaaggtatgaatctgaaatatcaaatggatattgacgagcaggtatatatcggcgatgacacgcttggtgtagaagggcttttaaactcttctaaagtgggtgcgaccaacgttaataaaaactggaaactagcaaccccacaagaaattttagacgatgtaaaccttgtcttaaataacgcttgggtggcttctggttttgcggtttgcccggacaagcttttattgccaccagttcaatttagtctcttaacttcgcgtattgtcagcgaagcagggaatatctctattcttgagttcttgaagctcaatagcttaagtaattcagtgaatggccgacctctaaatatccagccttctaagtggtgtgtaaaacgtggtgcgggtggtacggatcgtatgttgacgtatacacagtctgaagatcgtgtgcgcttcccgcttgtaccgttgcaacgtacaccgatcgaatatcgtggtattcgacaaattactacctatttcggccgtttaggtgttgttgaatgggtatatccagaaacagcttattacgctgatggcctataa

SEQ ID NO: 45882 - DNA, 477 bp, Acinetobacter baumannii
atgggtaatgcatatctatatcgtatgccgtcaggcattccaggtgatatttcacgaaaagcacactccacagttgaagcacacatccttaaaggtaattttggcgcctttggtattttcggaaagctaacagcagatggaatcgtaccgcttgaagcggctgataccgatgtatacggcttaattgtgcgttcttatcctacacaatcagctttaaatggaattggtgcagctgttcctcaatcaggaattgtgaatgacatcatgcgccgtggttacatgacagtaaaatgtaacgctggtacagcgaaaaaagccgggaaagtttatgtgcgtgtagctacaggaacagaactaaaaccgatcggtgggattgaagcggttgcagatggtgtgaataccatcgagatcaagaatgcaatgtttatgcatgatgctgatgctcagggcaacgtagaaatctcttacaacatctaa

SEQ ID NO: 45883 - DNA, 1317 bp, Acinetobacter baumannii
atgtttaaaaagaaaccgaaatcaaaggccacggtagatagatctaatttctacactactggccaacttggtagaacacgggaaacaacgcctgaaggttatttgctttgccgagatgttccattagctcggattggtaaattgctttatgccgatggtgaagtgccagttactgctgacaactccggtctaatcatcattgagcgtggtgaagatgttttatttgatccacgtacgatcgccagttttgaagggaagcctgttacagatgatcatcccaagggttgggtaaccccggagaattggaagaaactttcaaacggaactgcacatgatgtacgccgtggtgaggatgaagattctgattgtttagtggcggatctgctcattacagacaaagacatgattgatgctgtgatgaaaggaaaggttgaaatctctctagggtatgacgctgattacacggaaattagcgtaggaaaagggattcaaacaaatatttttggaaatcacattgctctggttaaaaaggggcgttgtgggtcgcgttgtaaaatcggagatagttttatgcctaaacagagtaaaggctggctggaaagcttgcgcaaagctaaacgtacaattgatgaggctttggaaaaagccaagagcactgatgaggaggatgtcgaaaccgaagatgacgatgaggatgatgatggcaaaacaactgatgctgcaatcaatcgtgaacttttaaaaaccctcaaaacagttcaaacaacagtccaaacatttgatgagcgactctcaaatctggaaaagaaaaaaaccaaagattctgaatcggaaactgaagatgatgatgaagaagacgatggtaaggggaaagaaaccgaagacgatattttggaagctgaacaagctcaaaaattatctgaacaaggtattcaaaaccataccggtgattcacttcaagaagttttatcacgtgcagaggttttggtaccgggctttaagatgccaactttcgatagtgccaacaatggccaagctgttttaaataccaagcgcaatgtattaaaacaggcttatgctacggaagatggccaaaaagccttgaagccgtttgtaggtgctactccgaactttgacaccatgccagcctatacagtcgatgctgcatttattggggcatcggaactcatcaaacaacaaaataacgccgctggtgtacgttctggcatttctactcgtgattttggccgagcgccaatgacaccggctgaaatgaataaacgtaaccgtgaatattgggcaaacaaaggaaattaa

SEQ ID NO: 45884 - DNA, 636 bp, Acinetobacter baumannii
atgatcgttaaaggctttgatgtaaatgatccaaagtcatacccactgatgattgcgtcattaaacgagtatgcaaacacgcttcagttttgggcgcaaaatgcagctggtcgaatcattactgatgtcgctttaagggatgagaaaacttggctcatttatgcaaaggatttatcacgtggtgtacgtgagcaaatcaggaatacggacactggagccgtatatcagcagcttttaaatgaccaagtaaggcttattaagtctttaccacttgatgcagcacagcgtattcatgacctgtctactcgatcgctaattgaaggcaaccgttcaagtgagattgctggcttgattatggcaactggccgtgtgacaagatccagagcaaatacaattgcccggactgaggttagccgagcatcatgcgtatttactcaagcgagagccgaaaatcttggatccgagggttatatctggcgaactagtgaagatggtgatgtaaggccaagccataaggcaatgaatgggaaatttgttgcttggaacagtccgccaactttggataatttaaaaggtcatgccggatgtttgcctaattgtcgttgttatacggaaccggtaatcccaaacttttga

SEQ ID NO: 45885 - DNA, 1413 bp, Acinetobacter baumannii
atgggcttaattaaatttacaagagattcgttccagaactttgcagctcgagttgggttgggttctggaagtcaacacgatcaatcgacttatggttttaacttcacaagccgaaatcgattgaagcttgaagcgatgtatcgatcaagttgggtggttgggcaagcggtcgatgttgtagcggatgacatgacgcgtgaaggaattaacatccgtggcatggatgatccagaagatgtggaggcaattaaccaggaactagatagcctgcaagtgtgggataagatcaatgagacaatccgctggtcccgactttacggtggggctatcgctgtaatgttaattgacggtcaaaatgtatctaccccacttaatgtaaatactattggtaaagatcagttcaaagggttgcttgttttagatcgctggatggttttacctgacttgcaagatctagtcaccgagtatggtccagattatggaatgcctaaatactatgatgtcattactgactcagtaggcttatgtaatcagcgcattcattattcacgtgttttcagaatggatgggattaaactaccttactggcaggctatagcggaaaatttatggggccaatcagttattgagcgcttagaggatcgtttaactatttttgatagcgccacattaggtgctggccagcttatctataaagcacacttacgcacatacaaggtaaaaggcttgcgtagtcttattgcagccggtgggcgaatgtatgacgctttggttgagcagatcaatcaaattcgtctatggcaatctaatgaaggcctaacgctgatggatgctgaagatacttatgaagcccatcaatatagctttgccgggcttgataatattctgatgcagtttggccagcaaattgctggtgctttgggtattccattagttcgtttatttgggcagtctccagcggggtttagtgcaactggtgagtctgacttatcaaactattacgacaatatcaaccagcagcaagaaggccgtatgcgtacgcctttacataagttgcttgaaattgtttcgcggtcaaaactaggtaaacctctacctgattcatttaagtttgatttcgcttcattgtggcagatcgatgacgagaaaaaggcagagattgcggccaaagttgccgaggcagttactaaggttgaagaggctggaatcatctcacgtcagacggcgttaaaagaattgcgtcaatcaagcgaatctaccggtattttctctcatatttctgatgaggaaattaaccaggctgaagatgatccaccgccgccaaaagaaggttatgacgatgaagagtcaaataagtcggatatcaccgcacctggcgaggaagaccgagatacggtacagccagcagcttag

SEQ ID NO: 45886 - DNA, 1659 bp, Acinetobacter baumannii
atgacatacgcattagatgaaatagcccctttaattaaagagtggactattaacgtacgcctgcctgaagtaatgactgagatgacacggcgttattactacaaggctgcaattgagcaaaacgaacttagcattcaagcagagctatacaagtgcagtaaggatccagtccattggtttaacaattggatatggacatatgatccgcgcggtatggcttttggtttacctgccaatattccttttgtattacggcctaaacaagttgagcttgtggagtggctagaggaacgtgaaagcacccaaacacacggtctaattgaaaaatcccgtgatgagggcatgagctacgttgtgctgggttttttcttgcatcgttggttattcgttgaaggttttgcaggtggtgttggtagccgtaaggaagagttggtagataagaagggcgaccctaaaaccctatttcataaattccgcgatatgttcagcaaaatgccccaatggttaaaacctaagggctttgtcgagaaagtgcatgataactacatgcgaatcattaacccagataacggcgcaactattactggtgaagcgggtgacaacatcgggcgtggtggacgtactacgatgtattttttggacgaatgggcattcgtagaacggcaagaagctgtagatgctgccatttctcaaaacaccaacgttcatattaaaggatccacacctaacggtattggtgatcgatttcaccaggatagatttagtggtcgttacgccgtctttaccatgccttggcgagctaacccggataagaactggaccgttacctataacggcaaagttatttacccatggtatgaaaagcagctggccacacttgatgatgtggttcttgctcaagaggttgatattaactatgccgcttctgtagaaggcgtcttaattcctagtacttgggttcaagctgctatcgatgcgcataagaagcttcagattgagccgactggtgaccgtattggcggcttagacgttgcagatgaaggtaaggataaaaactcttttgcagcacgtcacggcgttgtcatgacttacttggccacatggtctggtaaaggcgatgacatttttggaacgactcaaaaagctatggatttctgcttcgagaaatccatcgatacgctgttttacgatgccgatggccttggcgctgggtgccgtggtgatgcccgtgtgattaatgaaaagcgcagagagctgggcttatccgagattaatgtggagtcattccgcggatccggttcagttcatgaccctgaaggggaaatggtagagaaacgtcttaataaagacttttttgccaatttgaaagctcagtcttggtggtcattacgtttacgcttccaagaaacttttagagcacttgatgggcgtgattatgatccagacatgatcatttcactatcaagtgaagatatcgatgccaaggaattagcactactcactactgagctatctcaaccaacgtacacaaaaaacggtgttgggaaaatcctagtcaacaaacaacctgatggcacagcttcaccgaaccgggcagatagcgtgatgatttgctttaacccgcaaattgctgagctcaatatttggggcaagctataa

SEQ ID NO: 45887 - DNA, 510 bp, Acinetobacter baumannii
atggcaaggcttaataaacgggtgaaactctatatagtacggtcacttgctacctatgagacacctagtgaaacagcaagaggcgtccaagaagaatttggtatcaccgtaaccaaacagcaatgtgaagcatacgacccaacaaaaaaaacaggacaggacttaagcgaagaatttaaaactgagttctacagagtgcgaaaggaaatgaacgacaaccttagcgcaattccaatcgcaaacattgcctaccgcctcaagcgtctacaacggttcatcgatcatgaacaattcaaagaaaaccctgtcattgtgccgagccttttagagcaggcagctaaagaggttggcggcttatataccaaccgtaaggaaataacaggggctggtggtgggccagttaaaacggaaaatacagaaaagccacctcaaccagcatataaacctgaagagctttcgaaactctcgcctcaggaactttctcgcttagtgattaatggaaagctatga

SEQ ID NO: 45888 - DNA, 648 bp, Acinetobacter baumannii
atgaaaaacgaagttggctttcatgttcctgttcgtccaatgcctccagaatggctttttgaaatggatacacctaactttgttccagcgccagaattatgggaatggataagaaaggtttttctagaccctaaatctaaattatttaaccctgatcatatgcatttacggtcatttcgatatccagatattgctgtgatgtgggctagatctggctttaaaaagcaaggccgtcaggtcattgggactactgaaaaagtcatgatcaatgctggtggctggaagaaagaacgacaagaagaacaatacatccaatggttcaattatttacctgaatacttaattacttttgatgcttcatattcacgtatagcaagtgatgtgaacttttgtgctttggttgaacacgagctttatcacattgcacataagaaggaccaatacggaacaccagcttataacagagaaactggtatgcctaagttagctattcaaggtcacgatgttgaagaatttacaggtgttgttcgtcgatatggagctagtgaggatgttatgcggatggttgaagcagctaataaaagaccgcagctgtcacgggcagatgttcattacgcttgcggcacttgtaacttgaaggtggtttaa

SEQ ID NO: 45889 - DNA, 3033 bp, Acinetobacter baumannii
atgactgcggtgtcaagtgtttatgcacagcgcttattgatgacattattcttggtctcttttgggatttatatgtttctggcgacagtaacatatacaccatttgatccgggctggatgcatatttcaagtgatactcagcaagtatccaatgcaagtggtattgccggtgcatggattgcagatttgctgtttggctttttaggttgggcaagtttacttattccaatcttcctatttgttgaagcgattcaagtctggtggccacatagttttctaaaccgcccattccgttatgctgcgcagttcttcttaattcttgttgtttcgagtttgctttaccttcactggaatgtacctgcagatactttagataatgccgcaggtgggattattggttatgagttggggcaaagcttatctcaactgttaacaatttatggtgcgacattatttctacttgttttcggagtggtattgttcactttggcatttggggtgcagtggagcaaaacatgggttacgctcaaagcaatgcctggttatttacaagatttattctataaaaatgtatctcctaacgaatctgcttatgacttaaccacacagcctgcgaataaagcagcaacggtaaaagttgcagagatgcctaaagcagaagaagttacggatgaagtagagctaaatgcccaaccagaaaaagctcaaagcaaagcgagctctacacgacatgatgaaatagcagagcgtttatttgccgacgttttagctaaagaacaaagtcaacctgaaacaattgaagaaaaaccaactcctcagccagaaaactttgagcgtacacttgagcaagcccaacaacttaaaaaagacagtgagcgtttagtggctacgggggaggtttggcgtgcgttacagcgtgatgatgtaagccataaacaagaaattgatgcgctgttaagagctgctgatgattcaagtgaacagccttcgactcatgagcaatttcagcaaacagtttatcaggctaaacaaaatcaaccatcggatactcatcaaggtttagattggaatgatgatgagatttttgatgaactacttgctgcagttccaaatagtaaaacggcaactgacgtgcatacgccatttgttcaagatcatcatgttgaaccagaagttacaccgcaagcttctcaaacattagttgaatcatctgtacctgtaacgaatttaaatcagtcacctaaaaatttatcgaatgaagaagtctttgatgattttgatgacctattgattgatgaggatatcccgccagcaactcaaccgatcaaggcaagtagctatgcgcaatcttcggcttttgtaaaagcgcctattcaaactacgattggtgcagagaagctgtcaaaagaagaatttattgaagcttggcaggaaactgctggaaagcctcaggatgaccttgaggatgagtttgattttgatgcgcctctaacagatgcatcaggtcgaccaatgtctcgtgccatgcaagtggccaaaaaacgtttagatttaccaacattaccgggctttgaattgcttgataaggttgacccaaataagaaagttaactttaccgaggaacagctttcccgtttatctgaattgcttgagatcaagttacaagagtttaacgtgaaggctcaggtggttgaagctcagccgggtccagtggttacacgttttgaattagatttagcaccgggtgtgaaagcatctaaagtgactaatatttcccgtgacttggcacgttcaatgtctatggcttctgtacgtgtggtagaggttattccgggtaaaccatatattggtattgaagttccaaatagtgctcgtgaaatggtacgtttgattgaactattggaaacacccgcatatcgtgacccaagtgctctcattagtatggcaatgggtaaagatatttcaggtaatccggttctaacagacttggcaaaagcaccgcatatgttggttgcgggtactacaggttctggtaaatctgttgccgttaactcgatgattttatcgatgttacttaaatatacccctgaccaattgcgtctgattttaattgacccgaaacagctagaacttgcaaactacaacgatattccgcatttattaacgcctgtagtcactgacatgaaagatgcagtgagtgcattaaactggtgtgtaaatgaaatggaacgccgttataagcttatgtcgttccttaaaattcgtaagttaagtgactacaaccgaaaagttgaagaagcgcttgcaaatggagaagacttgattgatccaacatggaaaccaagtgattcagcgacacaagagcgtgcacctcgtttaacgccattaccatcaattgtgattgtggcagatgagttcgctgatatgatcatgcaagttggtaagaaagcagaagaaatgattacacgtttggcgcaaaaatctcgtgctgctggtattcacttattgcttgcaactcaacgtccatcggtagatgtcattacgggtcttattaaagccaatattccaacgcgtgtagctttacgtgtaaacagtaaaattgactcacgtactattttggatgcaggtggtgcagaagacttgttaggccatggtgatatgctgttcttagggccaggtaaaattgagccagaacgtgtgcatggtgcatttattagtgatgatgaagttaaccgtatttgtgatgcatggcgtgaacgtggcgaaccagactacgtagatgagatcttaactccatttgatgaggagcctgcttcgcgtggctttgaagaaggtgatggtggttcagaccgtgatgcactttatgatcaatgtgtatcgtttgttttagaaactcgaaaagcttctacatcttcattacagcgtaagtttagccttggttataaccgtgccgctcgtatcattgatcaaatggaagagaatggtattgtgagtgctatgggggccaacggtaagcgcgatattttagtttaa

SEQ ID NO: 45890 - DNA, 621 bp, Acinetobacter baumannii
atgttagtcgcgttaattacgttagcttttattcatttttgtgcgcttattactccagggcctgatttttttctggtatcacagaccgcagtgagccgatctcgtaaagaagcaatgctggttgttgcaggaataacagcgggtgttatgttttgggcttctttagcattgatgggcttaaatattatttttgagaaaatggcttggttaaagcaaggtttacttattgcaggcggtttatacctatgctggttaggataccaaatgttacgttcggcattttcaaaaaatcagcaggaagaggtgacaactgttgaattaccgaaagcgccgtatttattttttatgaagggattactcaccaatttatcgaaccctaaagctgtgatctattttggtagtgtattctctttatttttagcaaaccctcagcttgatcaagttcattggctgctttttattattgtgtcggttgaaacaattttatggttctgctttgtgacttttattttttcattaccgagttttagagccgcttaccgtaatttttcaaaatggattgatggtatttcaggtggtatttttaccgttttcggtattttcctgattggaaaccgataa

SEQ ID NO: 45891 - DNA, 405 bp, Acinetobacter baumannii
atgtttaaagcatggcgattttttctaatcaaagataagttaaatattatgcccgctgctcgtgcaattttttctatattctttttatattcactatttaatcggataaaaacttatgcaaaagaacaagggtatattaatgatttctcttcaggttggatgtatttaggatatctcattacatctttactggttcgcctacctgatccttactggcttatctctctctgcagcattatatttttaataccagcctttaaagcgttgaattatgcacaaaaacaaatagaaacaacaattaagcaagaaaaattcaatacacctcaaatcattttaattattataggttctatcatgtggctgctgattcttttcagttttgttatattattcctatataagtga

SEQ ID NO: 45892 - DNA, 1476 bp, Acinetobacter baumannii
atgaaaattatgtataaaaaacaacttaccttaaagttgtcggctattgctgtgtcaattatgttagcaagttgtggcgggggaggcggtgatggctattaccaaaatggttcatcaaataactcatcatctggaagtaataatagcggatctcagcaagcgactgctacagctttaaagatagaactagataaattatcagttgccgcaacgaatgatactttaactgttactgttagagctttagataagaataaaggcggtgttgctggtgctaatgtcactttggaattagatgatccaacaaataacgtatctatagaaggcgtatctactcaaactactgatgcggcaggtaatgctatatacattataaaaacaccaaaaacatcgagttcgataaatgagttggtgaaaaatggtttcaaattaaaagtctctacgaataatggtacgcttactcaagaacagacagtgacagtaacaggtagcaacagtactgtcgaagctgatactacgagtattgtattgtttgatgctacaaaaacctctctaaatgttagaggtgatcaaacaaccgtcacattaacagctgtagatgcaaatggtgcaactttagcaaaccaagcgattacacttaaagttagaaattcagttttaaatggtgtcaaatttactcctaatgcgacacaaactgatgtaaatggtcagatcagctatactttatcttttagtgaaaatcaaagaacctcatcatatagtgctggtcagttcgtaacagatgatcttgttttagaagcaaactttggccaatctacaaaaatttatacttataaacttgatgtggttaattctgatgtaccagtagcagtaggcgctattgccgtagcatataatccgaccacaatggaagattcaagtgatggagtctactactataaaaatatttcagtacaagtgactgatgtggatggtaaaccgatacccaatcaagatgtagtcatgggcgttaatgctcttgcgtattataagggtcgatatgggtttgttgatacttctaatccaactgatggtaaaccagatgaatatcttcctgttattagaacagcctgtacatcaccagtccaagctgtaaatgtgaatggggacgttattaatcaattaaagccgcttaaagaaaattctacagtccaagttgtatcgtatattaacagtgcaggtaccgctgcaaccaataataaatatacgacagatgcaaatggacgttttgatcttaaaattcaatatcctaaaatttatgcatcatggttaactgttcagttaacggctaaatctacagtttcgggaagtttaattaaaggttctacatccttaactttaggttatttaactaaagatgtcagccttacggatcttaatggcccaaatatggaaagtccatatggaatagatccaaactgttcaaatggtaattaa

SEQ ID NO: 45893 - DNA, 210 bp, Acinetobacter baumannii
atgtttgtaagaggagtaaaagctgaattacaaattgattcatccgtatttagagggcatagcttatatatttttagtcagttattaagtcgtgtttttaatttaaaggttcaaattaatagttttgttgatttggtggttaaggattattcatctcagcaggagttataccaatgcagtcagaacgttggtggcaagactcttctgtaa

SEQ ID NO: 45894 - DNA, 1413 bp, Acinetobacter baumannii
atgattaaaaaaatattactctcattcatcgctatttttacagttgttagtggaattatcattttctactggcgtgatgttcaatataacccaaataaaatcgactttttcctttattttttattattgccagcaatcattacattggtgatcttatcaccttggttaatttatagtgtttataaaagctacaaagaaaagaaagagcaggctgcaaatcaaagtcaagatgatgatagtcaaaaatcatctgctgcaattgaacaacctctagaacagctggattttaatgtatattccgcttttgctatacatgccctaggcgagaatgaaactattattgaagaaatacaaaattttaaaagtccggagcttgatgagcaattgttgaattcgtatggattgcctcttttatcttatcgaattaaagatttagctgagacaaatgatgaggatattcaatacgctgcttcaccaagacaagttcgtatcatgtctttaatcaggcaacaactagaacaaaatatagagaatttgtatcgcttggctgaacatttaaagcgctcaattttattttatgaatctcatcagatccgtgaatatcatatgcatcctgcatgggtcgatccaaatagcgaatatgaagatgtggaaacacccgtagttgaagtacaccgtttaaatcgactgaatttgcatatttttcttccagaagatttattacatgtttggaatgatgagcaaagtaatgatctgattttagagttttttactgagattggtattatttcccaaaaagttcatatcgaatatcactttttgggtgagcgtgtagcttatcaagaatttattcatttattaaaacgcattcaaaagaaagagcatgaggtatttctcatgctggctgtcgattcagagattgatcaagatcttattgatgaaaaatcatggatggtcaaagattatattccggctgaatttgctgcaagctgcctccttgcggacccatcattaaaaatcgaagaactcgaaccggctaaaaacttaaaaattgtggtgggccaagaaaaagcagccaaagttcttcatacgctgaacttaaatgaattaccgcagtatgagggagatgagccatacgtacttattctttcagaccagacagatataaaaacagcgaagcaattacagcagcagtttgcacaaacatctgttgaaccacatcactatatttatgtgaaatcttcattggggcatacccagcatttagttgatatttatggctttatgcttagtatgcattttcctgaacatatcgttccttttgtctttggagaaaatacagtgtcagcacatacatttgtgcagagtgtcactgaaaattcagaagatgatgcgatggtgttgaatagctaa

SEQ ID NO: 45895 - DNA, 3825 bp, Acinetobacter baumannii
atgcatacaattttaggctacttgtggcagtacatcacgaatcctaaagcaattatcgccttgtcattgttcgtggcattgatgtcttcctatacttcaattcctcgccatatattttgggctttagcatctgcatatgctttagggctcatcgcttatggaatttattggctaattcagcgtaaaaagcatgctgttcaaggtgaagagcttgcacaagcgattgaaaaggatacccaagcagagtacggcaaaaataaagataaagaagagctgcaacttattagccaacaaatgaaagaatctattcaattgattcgtaagtcaaagttaggcgataaaaaggggaacgcagcactatatgagttgccatggtatatggtcattggtaacccagctgctggtaaaagttctgcgatctataattctggtttaaagtttccttttgaagaaacccatcaaaaaatggtttcggctggtttaagcggtacgcgtaattgtgactggtttttttcgactgagggtattttactcgacaccgctggacgttattcggtctatagcgaagaccactctgaatggttaggctttttaaatatcttaaagaagaaccgttctaaggctccagtaaatggtttaattcttattgttagtattgctgagcttgttagtcagagtcctgaacactcattaaagcttgcgaaaaatttacgcgctcgtattcaggatttaaccgaacgtttagaagtggttgtacccgtatatctagtcttttcaaaaatggatttgatcgcgggttttaccgaatttttcgaattctatgaagcacaagaatataatcaggcgtggggcgcaacactaccatatgagcaaaactcttctcataatgctgtagatctttttgagaaacactacaatattctttatgacggtttaaaaggggtcagttcaactcatcttagccgtcgacattctcaaaatatctcacctagtgtgatgactttcccattagaatttaagacattaaaacctgcattaaaaagttttattgcgacattgtttgaagataacccttaccagttccaaccagttttccgtgggttttatttcacaagtgctttgcaagaaggcgtaatagaaagtccaatgactgagcaaattgcacaggaattccagctttcccaaattgctcaaagtgaagtaaaagatcagctaaaaacaacgcctaaccatggttatttcttaaaaggcttgttttcagatgtcattttaaaagataaagatctggttaaacagcatgtcaatacaagcaaaaagcgtcagcgttatattgcatttattggtgctttagcaggcgtatccattattctcggtgtgtgggtttggtcatatcgtaataatcaacaacttattgccgaagttcaagctgatttgaataaagttgttcaattggaaaagagttcaggtcaacaattgtcgactcaattagaggccttacttatcttgcaaagacgtctacaacagttagacgaatttgatgaaaatagaccactaaaatttagttttggtttatatcaaggtaatgagctacgtgaaaaattaaaagctgaatatttaaaaggtgttaagcaaattgttttgatacctacacagcaaaatattgctcagtatttgcaacgtgtaaaaaataacgaagcaactttaaaagcaaatcataccaatgttgagatcaagcaaactgctcaaactcagcaatatttagagccttcggataccaaccctcaagatgcttataatgctttaaaagcatatttaatgatgagcaatccacagtatatggatgcaagtcacttaagtgatcaggtaacgcgtttctggcgttcttggcttgatgccaataaagggcagatgccacgtgcagatatgatccaagaagctgagcagatcttatcttatgcaatgacattggcaaatgataaacaattcccgatcttggatgctgactctcaactcgtggatcagacacgtcaagtattgctctctgttattagaggtatgccagcacgtgaccgtgtttataatgaaattaaaatgcgtgctgctgtgcgctttccagctttaactgtaaaccagattgtaggtgacgcaaataaaaatattgtattgggtagttatgcattaccaggggtatttactcaaaaagcttggaacgagtatgtagaaaaagcaattgaggaagcagcagacaaacctacggatactaaagactgggtgcttaatagccgtcaatctgatgatttaactttctcaggtagtccagagcaaatcagaaagcagcttactgcattgtataaacaagaatatattgcagagtggagaaaattcttaagtggcattcactatgcaaaagcaactcagtttgctcagcaagttaaaaatattgatgtattgggcgaaccacaaaattcaccaattcgcatgcttattgaacgcgtagccattgaaacaaactgggataatccggttgttcaagcagagttagcagcgcctcaaaaaggatttattgcatggtttaaacgtaaggttttaaaccatgatgataaacaattagcaaatcaggctgtaacgaatgctcaagggcctatttctcaagaatatcaaatgttctatcaattggttcgtaaacgtgatgatcagcaaggtaaatctttgcttgatgaatatatgacgaatcttgccttagtacgtagtaagtttaatgaacttaagaatgcgggtgagatcggaccgaatgcgatgacattggttaagcaaactttaaatgagcagacatcggtatttaaccagactcaaaaaattgtagatgaaaagatggcggttggtttcagtgaaattgatcagcaacttctacaaaaattagtggtgagtccacttacccaagcctttgaaagtttaattacacctactcaagatgaaattaataagctatgggtaatgcaagcctatcaaccatttactgcaaatcttgctaagaaatatccatttaactcatcagcttctttacaagcaacaagtagtgaaattggacaaattcttggtgagaacggcagtatttcccgttttgttaaagagagtttagacccgtttgttatccgccgcggttataccttaacctccaaaacatggaaagatttggggattagtttaaacccacaatttgttatgaacttccaacgctatgttgcacctacaaatggaatggcaacaggtgagttaaatagccaagcaccagctgctccggcaactaatcagtctaacttccagttctacccaattcaaaacccgcagttactttcatataccgttgatattgatggtcagcgtatgacttatgaaaatggggtgcagcaatgggttaactttatttggccaaatcaaggcagtattccgggtgctcgtattacggctgtagatttacaaggtcaaacacataccatttttgatgaaccaggcgaatacgggattaaccgtttaatcgatagtgcacagcgtaaagagcaaaacggtggttttgaaatgctttggcgcagtaagacagatccatcactctttgtgaaaatgaacttccgtcttattagtagtaattcaggaagtatcggttcaagccgtggctactctggtatgcaactggttgacaaagtaactgcggataaggctgctcgcgttgtatccgcacagcaagcaccagctcaggcagctgctcctgccaaaactgaaaatccagtttctgcactagcacaacctgctgcgggagttaagccatga

SEQ ID NO: 45896 - DNA, 1437 bp, Acinetobacter baumannii
atggaaactttagattcttcaatttttgacctcaccccaattccaatgtggattgaagactttagtgaagttaagcagttatttgacttatggagaaatcaaggggttgaaaacttatatgaatttctaagtcaaaatgaaaatctagtggttgaatgtgctcataaaattaaaattattaaggtcaaccaaaaagtattagacctttttgaagcaaaaaaccaagaagagttatgtgccaacttaaatcttatttttaaaaaagaaatgtttgaagctcatattcatgaactcgaagcgttatggaatggcaaaactcatttctcgagtaccactataaattacacgctctctggtaaacgtattgatgtacaactacgtggagcaattttaccgggttctgaaactacgtttgaccgtattttaattaccaccgaagacattactccgtatcaaaatgcacttcgtcaggaagagaaaaatcgacgcctagcagagtcaatgtttatctactccccgacttcgctttgggttgaagattttagccgtattaaaaatagaattgatcagcttaggctattaggaattgaagactttagaacttttttagatgtacatcctgaatttgttcgccaatgcatagaagacattttaattttagacgtcaatcagtcgactctcgatttatttaaagcaccagataaaaccactctgttaaaaaatacccataaaatttttgccaaagagatggtggaaacttttagagaacagctgattgaactctggcaaggaaatattcaccacaagcgtgaagccgttaactatgcgttagatggtcaaatcagaaatgtcttactgcaatttaccgtattccccggttatgaagagacttggggattggtacaggttgcacttacagatattactgcacgaaagaaagccgaaaattatctagaatatttaggccagcatgatgtactgaccaaactttataaccgagctttttttacagaagagcttaatcgtttaaatcgcagtattatccgccctgtttcttcaatttttttagacatgaacggcttaaaggaaaccaatgatcaacttggccatgatattggtgatggtttattacgtcgagtaggtaatattttaaatcaggcaattatgaatactgcttatacagcttctcgaatcggtggcgacgaatttgtcattttaatgcctggtgcagatgaagcgaatgttttgatgatgctgcaaaccattcaggagctttttaatatagataatcaatattattcaagtcaccctattagtattgcaattgggcacgccacaacaaaagaaaatgaacaagttgaagatatgctaaaacgcgcagatcatcatatgtatcaaaagaaaaaaagttattatcaagaaattcttctaccataa

SEQ ID NO: 45897 - DNA, 759 bp, Acinetobacter baumannii
atgttagcattagttacaggcgcatcagcaggttttggttatagtatttcaaagaaactgattgagtcaggctataaagttattggatgtggaagacgcgcagaaaaattagaagaactacaaaaacagcttggcgaaaatttctacccactcgtatttgatatgactgatacggcagaaaatataaataagttatttaaagaattaccaaatgaatttcaaatcgatcaaattgacttactagtgaataatgcaggcttggcattgggtctagagccagcagataaagcggatttagatgattggtacaccatgattgataccaatgttaaaggccttgttacggttacccgattaattttaccaagtatggtaaagaagaaatcaggcttaatcattaatatgggttcaattgcaggtacatacccatatccaggtggtaatgtgtatggggcaacaaaagcttttgtagagcagtttagtttaaatctacgtgcagatttggctggtactggcgtgcgagtaacgaatattgagccagggttgtgtggtggtaccgaattttctcttgtacgttttaagggggatcaggagaaagctaatagtctatacgataagaaaaatccaattttgccggaagatattgcaaatacagtagcatggatcgcatcacaaccaccgcatattaatattaaccgtatagaaatgatgccaacgactcagacttttaaccctttaaaagttgtagaagtggaataa

SEQ ID NO: 45898 - DNA, 981 bp, Acinetobacter baumannii
gtgattgcccatgcccaaaataggctcagcctttttgctgctcagagcgggctaaaagctgttgctgcacaaggcaaggtagaaatacaagctcaggcagatgcactggatgtactgagtaaacttggaattactatttcatcaaccgatgacaaggtcatcattagtagcccgaaagaagtcaaaatcacgggcggctcatcgcaaattactctaaatggttcaggaatctttccgaaaactggtgggaaattccaagtcaatgctggacagcatttgtttatgggaggagcgagtgcaaacgccagtgctcctgagttgcctaaagctaaacctatgcagggagcattggagctactgcggagttatggtggagataacttcttcaagcaaaatagctataaagtcattgattcattaggtaagcaaattacgggcaaactcgatggaaatggttttgcacaagtaacaggtattgcacccggaccagctaaagtagtttttgagaaggataatacaagtgcatggctacaaagcagtgattttaaacgtaattatacgtgggctgaaccagtcaaaagtgttcaaggattaatgaaaaatgccctagaagcagtggggcaaaatacgatgtctcaattgcaaaataatcttctttcaacggataaaaatagtttcaaaaacttaggtaagaatactttagataatttagctggccaaacagtagcccagattaaaaatcaggtaactaatactgcccttaatactgtttcaaaacaacttaatctcaatttatctgccgatcaaatgaaaagtcttggtcaaatggcgacgaatccaagtcaatctcttgaaatgcttaaagagcagggcggagattttttgagtgatcaaatgaccgcaaaattatttaagaccacaaatcaagagtcacctattcagcagggcgatttagatacttttgtacggtcaaaaaagtag

SEQ ID NO: 45899 - DNA, 4698 bp, Acinetobacter baumannii
atggctaaagagaatacacaacagaaagaaattaaaaaacaacctgctgttgaacttgctgtttttaacttaaatagcgtgacggatgtagcggacttgcaaatggtcgcaagtcaggttcagcgttatttacaagtgtgtggaaacacctcattagaacaaataaaaagtaaggccaatataaccacagttgctaatatctttgcattgacgggtagtgtactagatctaatgctctatgctacagataaaaaaactggtgatgctgctgtacaacgtggggcattacttgcggcaaatttaattggtttattttcagaaccgaataatgaagcacatgcacgaatggctttacgtccgatgtttggcttaatggcagagtgcttatatcgagaaaatggaaaaattaaagaaacggatattaagcgtttaggtttacatctcaatgcgatgatcgctggagatctagagaacttcttaaaagagactcaagcgaagttaagcagtttacttactagcgctacaacattgggtgtaaccattctacaaagcatggcgaccccagcaacaggtataaatgcaggaataaccactgcggcaggtgcaagtgcagaaaaacgagatccgaaactcaaatttaccaactgggctgttccactcattgatttattagggaagccgagccaagcaaatttaacccctaaaatacaaccaaatataacaagtcgtttgcaacaagaagcaactcaagctattgcggctttaagtcaaactttacagcaacaagcaaatgctggccaaaaatatactttggcatggctattacaagaaacactgaaagctatacaagcattagaaaataaaggtaatgcaagtgtgccagtcaaccagacgggtgaatatgaacggcatacgaaaggagacactttagaatttgtaagtttgcaggcagatgctttaaatgctcctccatgtgaaggtgctgattcacaatctggaaaaagtattagctattcaattggtgctgaacgggttcaacatgcagacttctatttaccaaaaataggtttttcttttacacggcaatataactcacaaatggatgagtttgatcaaagtatggtcggtgcacgttggatgatgccattttccaatatgattcaacaaaatgccaaaggctatctatttattgatagtaaagggcgaaagcatcaactgccagcttccattacatttgaaacatatgaagtgccttatgagggaataacaatacaacctcttaaaaatggagatctggttctaaactttgggggagactggacttttcaatttcatcagttttcagtcggacagccttatcaattgattcaacaattcaatgaaaaaacacaagaaaaaattgatttaagttatcttatttttgaaaaggttgcttatcttcaatatgttgtttttcagttagagcatgccaaacaccaattaaaatttgcttttaatgagcaagttaaaattatggcggtgtttttagatgataaagccgaaccattagcacgttatgaatacgatatccaagggaacttaattaaagctattgatcagaatggctatacaagaacttatgaatataacaactttcatcaactaacacgctatacagaccgtacagggcgtggacagaatattcgttatgaatcaacagacgccaaagctaaagcagtagaagaatgggcggatgatggtagtttccataccaaactaaaatggcacccgcgcttacgtcaagtggcggtttataacgcctatgatgtaccaacctactattactttgacctcaatgggtttacttatcgaactcgtttagcggatgggcgtgagtcatggtatagccgtgatgggaaaaagcgcattactcgacaaattgattttgaagggcgagagactcaacaggaatataatgatcaagatcaacttgttaaaattgtccagccaaacggcggagtaatacgttttgcatatgatgaacaggataacttagttgaaattaaagacccagaaggcagtatttggaaacgggaatatgatgaaaatggtaatcttaataaggaaatcaatccattagggcatatcacacagtacaaatataacaatgataatcaactggttgaagtcattgatgcaaaaggtggggttaagaaaattcagtataatgaattggggcagatgatttcatataccgattgctcaggtaagagtagtacatgggaatatgatgaagatggtgtactgacagctgaacaaactgcaaataataaagttgtacagtatttttacagtatcaaaggccgagataaaggacagctgcaaagtattatttatcctgatgggttaaaagaatactttgaacatgatgaagaaggacgcttacttaaacataccgataccaaaggtttagtaacggaatataagtacaatcaagttggcttattagagcagcgtattgatgccaatcgacatagtgtagcttatcaatgggacaaacaaggtcgcattcaaaagctaatcaaccagaatcaagccgaatatttgtttggatacaatccgtatggatatttgatacgtgaacaggcctttgatggagaggaaaagcactatagttacaatgagaacggaaggatatttcaaatccgtcaaccaaatatactgacccaatttgattattatgcagatggacaaattgcttcgaaaagctttacccatttacatacagggcagaaacaaacggaacaatttgactataacctcaatagccaactgagccgagccagtaatgaggttagccaaattgatttctatcgcaatgcacttgggcagttggttagagagcaccagcattataaaattccagaactgaaaccgctcacagcagtattacattatgaatatgatgagcttggaaatttaattaaaacaattcgacctgatggacatacactgaatcatcttgtttatggttcagggcatatttatgcaattggtttaaataaccaagaggttgtttcatttcagcgtgatgatttgcatagagaaacaacacgattactagcaaatgggctcatgcaaaccaaacaatataatgatgtggggttattgagttcacagttcattcaacctgagcaagaaactcaagactatttacaatatcaagcacatagaaaatatcactacgataaaaactatttgcttagtcaagttgaagatagccgtttgggtaaactcaattatcaatatgacccaattgggcgtttaattgcagctcaaagtttacataaaacagaaagctttaattttgacccagcaggtaacttaattgattctgactcggtattaagtcctgcacaaattaaaaataaccttattaaaagttataaaggtaaacactaccaatatgacgttcaaggtaatgtgacagagattattcaagcgggcaaaaaccttaaactgacttgggataatcaaaacagacttattcgaagtgataataatggtctagttacagaatatggttacgatgtctttggtcgtcgactctacaaaaaaacagccaaagaattaaccttatttggttgggatggagatttaatgatatgggagtcttttaaatctgcacagaccaattatacaaagcactatatttatgaacctgatagctttgttccactattacaaacaggttataaggatttcattcaactgatagaaactcctgattatcaggaatatcaaacaaaaccatattctatttataaagacccagtatggaatagtactactcggaaaaagcgtgctgatttagagcaaatcacattttaccattgtgatcaggtcggaacaccacaaaccatgactaatatccgaggagagtgtgtatgggaaattctccaagacacatggggcgcggtgtcgcaaattaaagcactaaatcaagataatccatttgaacaaaataatttacgctttcaaggccagtattacgaccaagaaacagaattgcactataaccgttatcgttattatgaacctcatagcgcaagatatgtaagtaaagacccgattggtttgagtggcggaattaatacctctgcttatgtaagtgatccaactcaatggatagatccgcgtgggcttgcatcgacgaattcgattggttcatatggaagtgtaaaatcagcatcagatacatatgaaaagtatgcaacaagtaaaagtttaaaagatgtagctgaaagatatgcagcagggaaatctgtaggcggctcagcgacagcaggagttggtgttgggatttacgctaattataaaggtaatggtgaaagtaccttaacaatggaacgaaaagtaggtttaggttatgagtatggggtttttgaacgtaattaccattatggggaaagacaggttaatagaggttatatagaagggtgtgcagcaacaggagaatctaaatactgtgcgggctcacacactgataaaataagcccttatatttataaagatgagtataagtcaaaaagtaaagcgagagggattactattagtcaaggtaaagaaatggttggtaatccaaatggcccatctattattcatggtcctggtcatagttgggatttgggagcacatggcttcccttcaacatattaa

SEQ ID NO: 45900 - DNA, 858 bp, Acinetobacter baumannii
atgttatcaaaaaaaatttttctaactgtttgtcttttaagtatcttaagttcaggttgtgcaaaatctgtcaatcaagctaatgacaataatgaacaacagcactctaatcagaataatatagataatattaatgtaaatgatatccgatcaaaagctgaaaagggagatccggaagcacagtacaatttaggtgtaatgtatgcagaaggatataaagacattcaacccgatattctaaaagctattgaatggtacactctatctgcaaatcagggttatgttaatgctcaatataatttaggtttattatacatgggaaatgagcatattaaaccagattatgctaaagcaaaatattggtatgagaaagccgcagtacaaggtgatattccatccttaaacgaacttggaaatttctacagtaaaggcttaggtattaagcaggactatcaaaaggctattaaatactacttagatgctgcaaatgcaggtgattcagatgctcaaacaaatcttggcaccatgtttttacatggtagaggagtaactcaaaacaaggaagaagcttctcaatggtatttaaaagctgctatccaaggagatattgatgcccaatataatttagggcttatgtacttactcggagatggtataaaacaagattatcctcaagcacaaaaatggtttttggcagctgcaaatcaaggcgaaagcaatgcacaatttcatctcgggaaaatatataaagacgggctaggagtagataagaacttatccttagcccgtacctggtttgaaaagtctgctgaagcaggaaactcatatgcagctcaagaattatccaagatgaactaa

SEQ ID NO: 45901 - DNA, 738 bp, Acinetobacter baumannii
atgagagataatatgaaaattttcttatcaatatttatatttagtacattaactttggtaggatgtgattcttctaatataaaagtcaaaagctccaatagtgagttaagtaaatatgaaaaagatgcagaaaatggtgacccagttgctcaatacaatataggtgttatatatcaacaaggattaaatggtaataaggttaacttagataaagcggtgtattggtttgaaaaagctgccgaacaaggtgaagaggaagccaaagctaatttgggtataatttattatacagagggaactaaatatactaatattcctaaggcattagatactttttctgaactttcgaaaaaagataatagagtagctattaattttttaggaagaatgtataaggatggagttggtgtagagcaggatagtaataatgcctttaatctttttaatagagctgcttttttgggtgacttaagtgcacagtttaatttgggcaatatgtattttaatggcgaagggacccctttagactatgaaaaggctgcctattggtataacaaggctattataaatggaaaagatggagatgccgctaaaatacttgctggaatgtactatgaagggagaggggtagaaaaaaacattagtaaatcaattgaattacttcaaattgctgctgatcaaggagatcaagaggcggccaaaaatatagaaattataaaaaaagaatgtagctgctaa

SEQ ID NO: 45902 - DNA, 480 bp, Acinetobacter baumannii
atgagtaaatatttaaatatctttatattcagtatattagtagggtgtaatatccctgatagttcagcaaattctgaattcgaaaatttaaaaagtgcagcagaacagggagatattcgtgctcagtcacaaatgggtgatgcatatctattcggtgagtatgatttaaatgttgattataaacaggctattaattggtatcaaaaagctgctgatcagagtgatgcaaagtctcaatataatttagcaataatgtaccttaatggttatggtgtaaaaaaagacttatcaaaatctgtagaatattatcgtaaatctgctttacaaggagatgctgatagtcaacttcaattaggaattaggtacttaaatggagagggagttgaaagaaatatagaaactgcaaaagaatggtttaagaaagcaaaattatctgggaatcaagaagctggtatttatttagaaaaaatgaataattaa

SEQ ID NO: 45903 - DNA, 237 bp, Acinetobacter baumannii
atgaaattaaataaattgagttttggaattactactattttactattagtcggatatggcagtagtgtttatgaaccaccttcagataaatatccatttgaaaataaaatgaaagaattacttggtaatcaaataaaaattataaactcattaaaaaaggctgaggtacaaatttcatattttgaattacctaaaagaatatggatgggtattgaaaggaaaagggtagggcgttga

SEQ ID NO: 45904 - DNA, 246 bp, Acinetobacter baumannii
gtgagtaatttattcagatatatagcattatttttcttgtttttacaggtgggttgttctaatggagtgtatgaacagcctgcggataaatatccatttgaagtgaagatgaaagcattattaggcgataatattgaaattatagattctataaataaatatgaagcacaagtttcttattttgaatttactaaagactctaggaaattagataaaatagtcaggtatttagataaagatggatag

SEQ ID NO: 45905 - DNA, 408 bp, Acinetobacter baumannii
atgcttgaagaatctgagcataaagatattgcttatgacgtctatcaggttttaaacggtaattatccgttacgggcaacgggctttttaatggctttcattaccattttagggcttattccaacagcaactttatttgtacctctactgcgtaagccaaaagaactgttgaccagaaaattttggaaagatgcacgtcgtggcgtcaacttaatttttagtccaaaagatggcgtatttggtagcaccattggtcagatttttgattacttacgtccagacttccatccaaatgatcatgacacgaccgaatatctggagtactacaaagacaaattactcaaagaaggcggcgcgattgcaccttactttgtgaaggaatttaccccacctgtacgcttgtcttaa

SEQ ID NO: 45906 - DNA, 834 bp, Acinetobacter baumannii
atgattttatttggcaaaaagaaggttaaaccaagccaaaaagcttatgccgtcgtgacgggtgcaggcagtggaattggacgaagctttgcagttgaactggcaaaacgtggtggcagcgtagtctgcgcagatattaatttagaagctgctgaagaaaccgtaaagttaattgaacagttgggacaaaaagcatttgctgtacagtgcgatgttgggcaagcagaacaagtacagactttggctgatcaggcagagcagttgcttgatcatccggtaaccctcatcattaataatgctggcgtaggtctaggtggcaaatttgatgaaatgagtttggaagactggaaatggtgtatgcatgtaaatctgtggggtgttattcatggttgtcatgcatttgtgccaaagttcaaaaaactaggttacggtgcaatcattaatgtggcttctgccgcgtcgtataccgcagcaccagaaatgagtgtctacaatgtaacgaaagcgggtgttttggcattatcagaaaccctttcagccgagcttcgcaaattcaatattaaagtcaatgtactttgcccgactttggtgccaaccaatatcattaaaaatggtcgtattccggggcgttattccaagcttgcagaccatgcactcatgaactatgccatgacgaccagcgatgcagttgcaactttaacattgaatcgattagatcgtgggcagctctacaccacgccacagatcgacgccaaattattctggcttatgaaaaggacatctccaacgctatatgcaaagttccttgggctttcgtatcagttatttaaataa

SEQ ID NO: 45907 - DNA, 807 bp, Acinetobacter baumannii
atgcgcttaaaacatattatattaacaacttgtctttttagctcgactctagcaatggcggagttaccccaagactcaagaagacccggtggtattgcagttattcctttaacgtcggatattactcaggtcacttttcaacacaaaccggttttaattagccaagaaggacagcagcgttatgcagttttcggtattccgttatctactccacttggtagtgttcaactcgataccaataaagcccctattcaaatagaagttaaatcttatccatatgctgagcaacgccttaaagttacgaatcaagactatgtaaatcccaatcaaagtcaattagatcgttacgctcaagaagctaaagaacaaaatgatgtttatagttcatttacgcaaagttcgtggcaagccttaccaaaatttatacgcccaacttcgggtaaatttaccaattcttttggtagaaaacgcttttttaatggtgaagaacgtgctccacactcaggtctagacattccagcaccaataggccaaaaagtagttgccccagcagacggcgtagtcgttcaaacaggtcattatttttttaatgggcaaactgtattaatcgatcacggccaaggcttaattagtatgttttgccatttaagcgagataaaagtagaaaaaggccagcatattcgtcaaggggaaactttaggtctagtcggtaaaacaggacgtgtcacaggccctcatttacattggggaatgagccttaacaatgcacgggtagaccctcaactttttctaactacgactcattaa

SEQ ID NO: 45908 - DNA, 1311 bp, Acinetobacter baumannii
atgaagacaaaacatcttaaacagttttttaaagcgacaacccttgctgtattaatatcttcatcaatgcatagttttgcccaacctactgatgaagttgtggcaattgtggacaatagcgtaattttaaaaagtgaccttgaacaaggaatggctgaagcagctcacgaattgcaagcacaaaaaaaagaagttccacctcaacaatacttacaatttcaagtattagaccagctcatcttacgtcaagcacaacttgaacaagttaaaaaatatggcatcaaacctgatgagaaaagtctaaatgaggctgtacttaaagttgcaagtcaatcaggtagcaaaagcctagaagcctttcaacaaaaattagatgcgattgcacctggaacttatgaaaacttacgtagccgtattgctgaagatttagcaattaatcgtctgcgtcaacagcaagttatgtctcgcattaaaatcagtgatcaagatgtagataacttcttgaagtcaccacaaggacaagctgctttaggtaatcaagcccatgtgattcatatgcgaatttccggagacaaccctcaagaagttcaaaatgtagcaaaagaagttcgttcacaacttgctcaaagcaatgatttaaacgctcttaaaaagctttcaactgcgactgtaaaagttgaaggtgcagatatgggattccgtcctctttctgatataccggctgaacttgctgctcgtattactccactgcaagacggtcaaacaactgacttaatttctgtacgcgatggtgtacatgttctaaaacttttagaacgtaagcaaaatgaacagaaagcattagtaccgcaatatcagacacgccatattcttattcaaccttccgaagtggtaagccctgaaaatgcgaaacaaataattgatagcatttacaagcgattaaaagcgggtgaagatttcgctattcttgctgcaacttattcaaacgatacaggttcagcacgtgatggcggcagtctaggttgggttacgccaggtatgatggttcctgagtttgataaaaaaatgcaggaaattcctgtaggtgaaattagtgaacctttccaaactcaattcggctggcatatcttacaagtgacagacaaacgcgaaaaagatatgacacatgaatatcaagagcgtatggcacgtcaaattttaggtgagcgtcaatttaacactgaaattgatagctggttgcgtgaagtacgtgcaaatgcttatgtagaaattaaagatccaagcctcgacaaaaagaacttacaaaaataa

SEQ ID NO: 45909 - DNA, 2442 bp, Acinetobacter baumannii
atgaagcatcagtttaaatttaatcctttagcgaccgctatttttacgctcttatgtagtggctccatacaatcaagttatgctgagtcagctggtgttgtctccaacatagacaataatcaacttaaggcgagtattaaggaagcctatccagggcaggaattctttcaacaatattatgttgataaatctacccctgaggcgcaattgcgcaataataaatatttgagttcagcattctgccaaggaacttggattacaccaattaatcctgaaactaaagcgttagatgcagataaggctacttcagttgtaacggctgattatgggcactacaaccctgccggcgactctgtgttggaaggaaacgtggtgatagatcaagaaggccgtacagttcgtgccgataaagtcaccattgataaaactcaaacatttgcacatgcacaaggccgagtacagttagctcaaggcggcttactctctcaaagtgatgaaattgattacaatctaaagactcaaaccggaaatttagataatagtttttatatttctgaacaacaacatgcccatggtcatgctgggaagatcgagagaacctctccgaatgtaatggttctcaatgatgcgacttacacaacctgtccgccaggccagaaaccaggttggaaaattcaagccaacaaaattgagttgaaccaagaaactgggcgcggtgttacgcgcggaacaaaactatatgtaaaagatgttccagttctagcagttccctactttaacttcccgatcgatgaccgccgtactacaggtatcctcaacccacaatttggtttctcaaacgatggtggtattgaactttcggttcctgtttatttaaaccttgcgcctaattacgatgcaacaattacgccacgttacttagcagatcgtggggcaatgttacaaggtgaattccgatatttgacggatgggtttggtgccggacagatttggggcggcattttgccatctgataaagaatatgatgataaagaccgtaaagatttccattttttacataattgggatatcaacgaccaatggtctaccaaccttgaatataactacgcatcagataaagactacttctctgatttagatagtagccctatctctaaaacagatcttaacttacgtagagcttgggaacttaactatcaacatggtattccgggtttaaaagcacagcttaaagtcgaagatttccagacccttgacccagaagtaaaagacgtcaataaaccatacgcccgcttacctcaatttttattaaattatgtcactggtaatccactaggactacaatacgaatttaataacgatactgcttattttaagaaatcaattaacgatgattctgcacaagaaagtagcggtacgcgtatttataaccagtttgcaacacgttataactatcgaacaccagcagcctttgtaattcctgagctttccgtacgttctattcaaaccttctatgacaaggacagtatcgcctctcaaggtttagacggcggttctgaaaacaaatcagtcgttgtgccacaatttacattggacactggattgaattttgaacgtgagggcaaatatttacaaacacttacaccacgcgccttctatgcctatgcgccatacaaaaatcaagatggctacccaaactttgactcaaccactgcgtcaattagttacgatcagttatttaacccttaccgcttctatggacatgaccgccttgaagacaataactttttatcgttaggtgtaagctatagtctttttgacacagtaggcttagagcgtttacgcgcaagtgtgggccaaagctattattttgaagatcgccgcgtcaccttgaaacaacaagatgaaattgatactgaacgtaatacaggtcctgttgttagcttatcaagtcaacttaatcaaaactttaccattgctgccaactcggcatggatgtcaaatggtgataatgcacagcgtgattttcaactttactatacaggcgataaaggaaatctatataacttaggctatttctatcgtaaagatattccaggacgccaagatacatacgaccaagttgttgcatcgtttatacaaccaattaaagacaattggcgtattatggggcacgtacaatatgacatggacaatgatgttgcccgtgaattattactaggtgttaattatgaatcgtgttgctggggcatttctgtctatggccgttcatactataacgatctagacgatccaaaatctccagatgttagtgaaaagcgcgcgatcatggccgaaattacactcaaaggtttaggtggtttaaacaataaactcgcgtctttacttgaaaatcgcgttttaggttttaacaaaattaatcaatcttggacacaacgttaa

SEQ ID NO: 45910 - DNA, 1014 bp, Acinetobacter baumannii
atgaatacacaacgtgaacaattgatacatacatggcttacatctgttcttgaaaatgatcaatttcagatcgcttatttagcaggggatgcaagctttcgacgttatgctcgcatccagttacaaaataaaacgtatatgcttatggatgcacctcctgaaaaagaagactgtgttccgtttgtgaccattgacgagttttttgcagggcatggggttcgggtacctcagatcgttgcaaaagatttaaatcaaggttttttattgttagaagactttggtgatgtgctgctgtctacattgttaaacgatgaaacagttgatcaatattatgaacagagttttaaacagcttattcatttgcaatcgattaatggggctgaacatttcccggcttattcttatgaaaagcttttatcggaaatgcagttgttaacagattggatgttaccgtcactcgatatccatccaacagctgagcaaaagaaaactattgatgatgcatttgatttcttggctcaggcagcattagctcaaccgcaagttattgtacatcgtgattttcatagccgtaatttaatgaaaattgctaatgaagaagaattgggagtaattgacttccaagacgcggttattggtgctgatacatatgatttaatctcgattacacgtgatgcatacgtgcagtggaatgctgagcgtgtttatcaatggtttaaagtgttctatgagcttttaccagcatctgctaaacaaaaccgaagctttgaccaatttaaacgtgatgctgatttaatggcaattcaacgccatatcaaaattttaggtatttttgtccgtttgtttgagcgagatggtaagtctggttatttgaaggatttaccacgagtcatgtggtatttacttgaagagagccgtggctatcatgagcttgatgacttcatggcatttattcacagttcggtaatgcctaaatttattgaaaaatatggcccttatgaggttgcagcataa

SEQ ID NO: 45911 - DNA, 690 bp, Acinetobacter baumannii
atgaaagcaatgattttagctgctggcttgggcaatcgtatgcgtccactcacgctatatacaccaaagcctctgcttgaggtaggtggtaagccacttattgtgtggcatattgaaaaacttaagaaaattggtgtgaccgacatagtcatcaattctgcgtggttagccgacaaactcatcagtagtttaggtgatggctctcaatttggtgtggatatccgttggacacgagaagaagaagggctggaaaccgctggtggaattattaatgctttgccactgcttggaacagatcctttcattctggtgaatggagatgtatggactacaatggattttgaagctctacgccatattaagttaaatgatgatttggcacatcttgtattagttgataatcctaaacagcatcctgatggcgactttacattattaaatggacgcgcttttacatttgatcaagatgtgaagggcgagaacctcacttttagtggtgtatctgttatccatcctaagctttttgatggattggaagctggtaaacgtccgttagccccattgttgaagcaagcgatgcacaatcaaaaaatatctggtgaaaagcttaaaggtgcatgggtagatgtgggaacgcctgagcgtttaatggagctagatttgcaaattcgtgaaggcttctacgattaa

SEQ ID NO: 45912 - DNA, 960 bp, Acinetobacter baumannii
atggccgttagttacaaacaccaacagggtgttgctttactgactatacttattatggttgccttggctacaattttagcggcttctattgccaagcatcaaaataatactatggaaaatacagcctacttaatgcgccaaaatcaatctttgctttatgcaaaaagtgcagaagcctttttttcagaattattaattcaagatgcaaataatgcaggtggagtagatcatttaaaagagacatgggcacaacctatgccgccgttttctattgaagagggttcagtatctggtcgtttgcttgatgagtctggtaaatttaatttaaataatctaactaacggggaaggcattgtaaatgaagatgctaaaagttggtttgaacgtttattggtacgtgtgggattaccagccgaattaagccaagctgtgattgattggcaagatccaaatgatgagccaactgggccaatgggggcagaaagtagttattatgaaggtttggatccaggttacatggctgcgaatactaaattccaccgtattgaagagttaaagctagtgagaggctttgatggaaaaaaatttgatctaattgctccatatatttctgctttaccagaaaattcgaagttaaatattaatactgcttcgccattggttttagcaagtatggatgaaaaattagatataggagctattgaaaaagaattgcaaacacgccaacaaaatttaaagttcttccaaaatgtagatgaattgtggcaattgaatgctttttcagcggttgatagtcaaaggaaaaatcaagtaaatagtcttattgatgttaaatccagcttctttcaagctcagattgaagttgttctaaataataggaagcgacagtttactagtgctttaatgagaaaagataaacaagtatatgtttattcaagaagcatggctccatttaactaa

SEQ ID NO: 45913 - DNA, 807 bp, Acinetobacter baumannii
gtgtctaaagtttggagttttcagcgttggttgattgccttttttatggcttttttatcagtaagctatgcaaatgcatctgaccaagtacaaaatcaagaaatggctaaaagcaaaggtaaaattttagtcgttatgaccaatcattcagcctatccgactcgttcagataaaactggcttatggcttactgaattaactcatttttatgatgtcgctaaagctgctggctatgacatggattttgtcagtcctcaaggtggagttgtaccacttgatgaacgtagtatgaagcctatttacgttgataaatcagctcgaaaacttttagcagatcgtcagtttatgtatcgcttaaaccacactttggcaccaagtagtatcgatccaacacgctataaagcaatttattatacgggtggacatggaacaatgtgggatttcccggataataaggaactaaaaaatattagtgaaactatttaccgccaaggtggtatcgtttcagcggtttgtcatggcgtgggaggcttattacctttggtaggtgaaaatggtaaaccactcatttcaggtagaactgttactgggttcgctaataaagaagaaactttgtctggaattaaatctcaagttccattttccttacaaaatagcttaattaaccatggcgctaaatataaacaaggctttcttccatttacttcatatgtagtatcagatgatagaattattactggacaaaaccctcaatctagtaaagaaattgccgaagctgttgttaaacggttaagcactcttaattaa

SEQ ID NO: 45914 - DNA, 1011 bp, Acinetobacter baumannii
atgaaaatcgcaacagctttattaacatctgctcttttcactacagctgtttcagctgaagctatcaatactcctactccgactgtgggtgtacaagcattcctagacgtactcaattcgggtaacggtaaaccaatggaattaatgactccaaacgaagctcgtcaagttttaatcggtgcacaaaaaggagcaaaacttccgccagcacaagtttcagagaaaacaattcaaataaatggtcaaagcattcaactaaaaattgttaaaccagaaaatgctaaaggcgttcttcctgtatttatgttcttccatggtggcggttgggtgttaggcgactttgctactcatgaacgcttaattcgtgatttagttcgcgagtctggtgcagcggctgtatatgttaactatacgccttccccagaagctcatttccctgtagcaattaatcagtcatatgaagcaaccaaatgggtcgctaaacatggtaaagaaattggtgttgatggtagccgtctagctttagtaggtaatagcgttggcggcaacatggtggctgctgttgctcttcagattaaacaatctggcggtccaaaagtgcgttacaacgtaatgttatggcctgttaccaatgctggtttcgacaatgcttcttacaatcagtatgaaaaaggatacttcttgactaagaacatgatgaaatggttctgggacaactacacaaccaatgccaatgatcgcaacaatattttggcatcaccacttcgtgctacaagcgaacagttaaaagacttcccacctacattaattcaaacagctgaattagatgtattacgtgatgaaggtgaagcttttggccgtaacttagataaagcgggtgttccagtgactgtaactcgttataacggtttgattcatgactatggtcttttaaatccattaagcaacgaaccatctgtgaaaactgcgttatcacaagctggatctgaacttcaaaagcatttgaaataa

SEQ ID NO: 45915 - DNA, 423 bp, Acinetobacter baumannii
atgaaagaaaacaagatattaggtgataaactctgtttttcgctttattcagtagcgaatgcacttacgcggcagtatcgtccattacttaaagatttcgatttaacttaccctcagttcatcgttcttttagctctttacgaagaagatgatatttccctaaaagaactcagtgaaaagaccttatttgactcaggcaccttaacgccgttggttcaaaaacttgaagcaaaagagtttttgaagagggtatcaatcaaagaagatgagcgggtaaaaaaagtaatattgacggacaaagctttagagataaaagaaaaagtgattgatctacccaatcagttgcgatgttcaatgcatatgaatgatgaggagctgactatgctgagaaagctttctttgaaattattggaagatttataa

SEQ ID NO: 45916 - DNA, 576 bp, Acinetobacter baumannii
atgagaaaactcatactatttctacatgcatcgcttgacagttttgttgaagggccaaatggggcaatggatataggttggattgcttacgatgccgatttggcaaatcatgcaaataaaatcttgaactctgctgatacggtaatttggggacgtgcgacatacaagatgatgcataattattggccaactatgctttcaaatccagaagcttcagagcatgaacgaaatcatgcagaatggattgaaaagacagagaaaatcgttttttcaaccacattagatacagttgaatggaataattcccgacttgtaaaagaccatgttgaagaagaaattaataaactcaaacagcaaccgggtaaggatatggtgattttgggtagtccacggttcgcgcactatctgatgcaacttggtttaattgatgaatataaaattacagtttcgcccgtgctgcttggtagtggcttgccactatttcaaggtattgagcaaaagaccagtcttaaactcattgaaaataaaacgtttgcttctggagctatcggtcttcactatcaaaagataagctga

SEQ ID NO: 45917 - DNA, 297 bp, Acinetobacter baumannii
atgagtgctgtttatttagtagtgggacttcgagcaaaaccagaaaagattgatcaggtcagaagtgatcttattgaagtggtagctccatcccgcaaagaaagcggctgtatcacttatgaattattccaagatcaaaatgatcctagtctatttatattttatgaacattgggctagtgaaaaagatcaggaacatcatcataattttggaccacatatccaaaactttcaaaaagaaggcatgggtaatgttgaaaaaatagaattttttcatcgacttcaagcgctggcttag

SEQ ID NO: 45918 - DNA, 642 bp, Acinetobacter baumannii
atgactagtgaaaacatccgtgacccaaaacaagatcatcttttaactccagaaaactctgcttttattgtcattgattatcaaccggttcaagtaaactccattgcttcgatggatcgtcaactgttgattaataatattgtaggcacggcaaaagctgccattgtttataatttgccaattatccattcaaccgtaaatgttaagactggtttaaataaaccaccgattccacaattaagtaaagttttgaaagattaccctacctatgaccgtacaagtattaactcttgggaagataccgaatttaaagaagccgtaaaagcaacaggccgtagaaaactcattatgacagcgctttggactgaagcttgcttaacatttcctgcactagacgccctagctgaaggatatgaagtatatgttgtggtagatgctgtaggtggtacttctgttgcagcgcatgaagctgctttacgccgtattgaacaagcaggcggcaaaatgatcagtgttgctcagttattctgtgaactgcaacgtgattggaaacgctcagaaactgtacctcaatttatgaaattatttattgagactggtggtacagcgggtatccaattctcttacgacaaagctgaataa

SEQ ID NO: 45919 - DNA, 927 bp, Acinetobacter baumannii
atgaaaacagatttaaatgatctttattattttgtaaaagttgtacaacatggagggtttgcttctgctagtcgcgaaattgatattccaaaatccaagttaagccgccgcattttattattagaagaaaggttaggggtaagattaatcaatagaaatactcgtcaatttgatgtaaccgagttaggacgagaatactatcatcaatgtcaaaatatgattttaggtgcagaagctgcacagcaagtcattgaaagaaatcaggcagaaccttgtggggtaataagagtcagttgcccgcctgcatggttatatgaccacattgcagatatgatttcaaaatttatgaggttgtatccccaagttaatattcatcttgaagtaaccaataagaatattgacctgttaaatgacggaatagatatcgcgttaagaattagatttccacccttggaagattccgatcaggtcatgaagatttttgcaaaaaatccgcaatgtatagtggggcattgtgagctggtccagcaacatggtatgcccgaaaccccattagatctatgtggttatccttcaattgggttaggtaactcggaacaaaaaagtatatggacactatacagccgagagaatggtaaaatcgaaaaagttatacatacaccacgtttgattgtgaacgacatgattggtgtacgagatgcggtattaagaggagttgggattgctcaattaccttttgccctgatttataaagaaattgagcgtggtgaattaattaatttaatgccaaattgggaattaaaaaatagtattatgcatgcagtttacccctcgcgaaaaggactattgccaagcgttcgagcactattagattttttatcggaggagttcgaaacacttattaatgaaagacccggttttgaataa

SEQ ID NO: 45920 - DNA, 1443 bp, Acinetobacter baumannii
atgaataaacacttattactaaacattgcttttttaggttcggtccagctttttacaatgtctaatgcattggctgatgttcccttaactccagcgcaatttgcaaaagcaaaaactgaaaattttgaaaagaaggttcttttatcaaatttaaataaacctcatgctttagtctggggaccggataaccagatttggttgactgaacttgtgacaggcaaaatcttacgagtaaatccagaaacaggtgcagttaaaacagtatttcaagtacctggtattattaatgatccgcatgcacaaaacggcttgttaggttttgcatttcatcctgattttaaaaataacccatatatttatatctctggaacttttaaaaatcctcaggcaacagacaagaactctccaaatcagacaattattagaagatacatctataataaatcaacagataccttgcaaaacccagttgatttattagcagggttaccttcttctaaagaccatcaggctggtcgtttagtgattggaccggaccataagatttattacactttgggtgaccaaggccataaccagttaacgtatttgtttgagcctaactatgcccaaagtcttccaacccaacaagaattaaagaataaagacttccatgcctattctggtaaagtcctgcgtttaaatttggatggtagtattcctcgtgataacccaagttttaatggtgttacaagtcatgtttacacattaggtcatcgtaacccacaaggtttggcatttgcaccaaatggtaagctcttacaagctgagcaaggcccaaattctgacgatgaaattaatttggttgttaagggggggaactacggttggcctaatgtagcaggctataaagatgacagtggttatgcctatgcaaactattcagccgcaaccaataaatctcaaattaaagatttaggacaaaacggcataaaagtagcggcgggtgttccagtaacaaaagagtctgaatggactggtaaaaactttattgcacctttaaagaccttatttaccgttcaggatacttataactataacgacccgatgtgtggcgatatgacttatatttgctggccaacggtagctccatcttcggcttatgtttatacgggcggtaaaaaagcaattccaggttgggaaaatactttgcttgttccatctttaaaacgtggggttattttccgtattaagatggatcagacatatagcacgacctatgatgatgctattccgatgttcaagagtaacaatcgctatcgtgatgttattgcaaatcctgaagggaatactttatatgtcttaactgatccggaaggtaatgttcaaaaagatgatggttccgttacaaaccaattggaaaacccaggggctttaattaagtttacctataaagctaagtaa

SEQ ID NO: 45921 - DNA, 1839 bp, Acinetobacter baumannii
atgagttcagaagcacattcaattagcttgattgcccctgtagttttattggcggccgcggtaattgcagtccctatttttaaacgtattggtttaggttcggtattaggttatctcattgcgggtctgattattggccctttcggttttgcatttttccaagattctaccgcaatcttacatattgccgagttgggcattgtgatgtacctatttgtgattggtcttgaaatgcagccatcacatttatggagtctacgacgggaaatttttgggctaggaacactacaaatcataagctgtgctgtggcattaacaggcgtaggtttgctatttggttttacgtggcaagttgcttttatcggcgcagcagggtttgtattaacatcgactgctattgtgatgcaactactgggcgatcgtggtgacttaactcagcctcgcgggcaaaaaattgtagccatcttattatttgaagatttattgatagtgccattactggctattgttgcttttatggcaccgaatcatgtggtcgaaagcacagcggtacgtttagaaaatataggaattggtttattagctattgcgggtctgattgcagcagggcattggttacttaatccattatttagaatcttggctgccgctaaagcaagagaagtgatgaccgctgccgctttgctggtggtattgggtgcggcattgctcatgcaagtgagcggtttgactatggcaatgggcgctttcttggctggtgtgttgctatctgaatctacctttaggcatcaaattgaagctgatattgaacctttccgtggaatcctgttaggcctctttttccttggggttggcatgtcactggacttatcagtggttgctcaaaactggcagcttattgtaagtagcgtaattgctctcatgtttgctaaagccatcatgatttatatggtcgcgcgagtaactaagagttctcatactgaggccttagatcgtgccttattgatggctcaaggtggcgagtttgcctttgtacttttctctgccgcattaagtgaacaagtcattgatagtactattaaatcaaacctgactgctattgttgtactttcaatggtgttaacccccattgtaggtattatttttaagcgttttactcaatctaaggcgagtgtttcattagaaaacatcaatattgccgagggtttaactggtaatgttttaatgatcggtttcgggcgatttgggcaggtaaccagtcaattattgttggcaagaggagtagacgtcaccattattgataataataccgacatgattcgaaatgctgaaagatttggttttaaaatttattatggcgatggttgccgtttagatattctacatgcgtctggagccgcaactgcacaagcaattgtagtatgtgtagatagtaaagaaactaccaatagaattgtagaactcgtgactcatgaatttccgttggcaaaattattagttcgttcatatgatcgtgagcattcactacatttagtcaaacaaaaagtagactacatgattcgtgaaacttttgagtctgccattaaatttgggggcgttattttacaagaactaggtgtagatgaagacgaggtagagcgaattaccgaagaaattcgagatttggacaatgagcgttttgaaactgaaattgccgccgatgatgtatatgccggagcggatatgcaatatacgcatgcacatcatccgagaccaacagcaccattaattcggccaaaacaggaagggcgtattttaaataaagatgatgcttcggataatgaaaatatggatgggtaa

SEQ ID NO: 45922 - DNA, 681 bp, Acinetobacter baumannii
atgtataaatttttagcactttcttttattagtataggtctggttgcttgcaataaaactagtgaggattctgcattaactataaataatcaggaatatatgccgaaacaccaactaacagctaataaatatatttatgaatacaacaatattatttataacttacctaacaacagtgaccaaaaatcgatcaatttaaaattaaaaaaattattaaataccatgccatctaatgaagataatttagccattttaaaaactaaaaggaaaatccttattcgtctaggttgccttgaacaagcttatgtcattacagaaaaaatgttaacgaaagctaataattccaagcttcaagaaacgcaatgtattttcttaaaaaggatgaaaaaagatatatcacttataaagcaatgttatgaaaaaactgcgtccagctatttaaacgaaataaatctaattcctaaagcacagttatggtaccaatatgcattatggggaaattatgcggcaatgtaccacgctggtcataaagaatataggcttaagttactcgaactaattaactatcataataatgaagatcatcgtttaacgtaccgacaaatgtatgaaagcgtagtgaatccgtcaattttacaaaaaagaatcgaccggattccttatagccatgagtgtcgttaa

SEQ ID NO: 45923 - DNA, 987 bp, Acinetobacter baumannii
atgatatcactcagccaacagatggaactcaatcattattcccgcaaagctgaatttgcgcagaatctgatgtccacaatttgtggtgaacaccgtctagacacaatttacaaagataatctcgatttccactatgacggaatgcgtttgcctaataaaaaaatggcaatcggcacaatcagttatggtgcaaacgtcgctatcaacatctcaaatttaaaagcttatagcattagtttacctatacaggggcgacaagctctcaacattcgtggtgcacattatcaatctgatgaaaacagaggcctaattgtttcaaataatgatcaacaagatctgattatcgataaagactgtagaaaatttcaggtggttattcctgagcgaagtatgcagattgtccttgcagatttactgaataaacctatagaaacgcctatcatttttaaccctgaaatgcacttagactctgagcaactgattggagcgtggtggaagaatattcagaattttttacagctaaaatcgcaatatagcaatttttatggtttacagatgttatctgaagactatgaaaattttgtaattaaagccttactattatctcaagaaaacaactactctgaagctttaaagtcactctcacatcaagatgagccagcttatattcgaaaggttcgtaattttattattgaacatgctcacgaagaaatctgtgcagaagacttgcagcgtttggctggggtttcaaaatcaaaattgtatgatgaatttcaacaatactacggcaccagcccaatgtcgtatttgaaaaaatatcgtcttcaacaaatttacaaaatcttgagcactacaggagcagataaaaaggtttctatttcaaagcttgcgtatgactggggctttaaccatttaagccgtttttctcaagaatatcgtgaagaatttggagaaaatccaagtgagaccaaaggcaaaattttctga

SEQ ID NO: 45924 - DNA, 1239 bp, Acinetobacter baumannii
atgcgccgtattgcaattgttggagcaggacagtctggtttacagcttggtttgggcttattagatacaggctatgacgtgaccatgatcaccaaccgaactgctgatgaaatccgtcaaggtaaagtcatgtcaagccagtgtatgtttcataccgctttacaaactgaacgtgacttgggactaaatttttgggaagaacaatgtccagcggtagaaggcattgggctagctttagttaatcctgaaaatggtggtaaagcatttgaatggagtgctcgtcttgaacgctacgctcaatcggtcgatcaacgcgtcaaaatgccatattggatggaagagtttgaacgccgtggtggtcgattggtgattcaagatgtgggaatagaagagttagaacaactcgtaaacgactacgaacttgtattactcgccgctggtaaaggtgaagtcgttaaacagtttgagcgtgatgatgcacgcagtgtctttgataaaccgcagcgcgctttggctttgacctacgtcaaaaacatgaagccaatttcaccttattcacgtgtgacttttaacattattcctgaagtcggggaatacttttcatttccggcactaaccatcaatgggccttgcgacattatggtatttgaaggtattccaaatgggccaatggactgttggcaagatgtgaaaacaccagaacagcacctgcaatgtagtctggacttactcaagaaatttgtgccttgggaatatgaacgctgcgcaaatgttgaattaactgatgctggcggttatttggcagggcgtttcccgccgacggtacgtaagcccgttttaaccttaccctctggcaaaaagatttttggcatggcagatgccttagtggtcaatgatccaattaccgggcaaggctcaaacaatgcggctaagtgtagcaagatctattttgatgccattttagccaatgataatcaaagctttagtgaacaatggatggttcaaacttttgaacgctattggagttatgcagaaaaagtcgtggcttggaccaatagcttgttattaccaccagagcctcatgtcgttgaactcctagcagctgcaagccaaaaccagagcattgcttcaattatggccaataactttgatgacccgcgctcttttgctccgtggtggtttgatgcagatcaagctcaggcattcttagcttcaaaaaccgcagcaaaagtcgcttaa

SEQ ID NO: 45925 - DNA, 1416 bp, Acinetobacter baumannii
atgacctcatctaatttaaaacaatggaatgattttatagatggatgtatcgacttccgtcctaacgatggcgtgttccgtatcgcacgcgacatgtttaccgagccagaactatttgacttggaaatggaatttatttttgaaaaggtttggatttacgcatgtcacgaaagtgaaattccaaacaatcatgatttcctaaccgttcaaattggccgccaaccgattattgtaagccgtgatggtaaaggcgaactacatgccatggtgaatgcttgtgaacaccgcggtgcgaccttaacacgtgttgctaaaggcaatcaatctacatttacctgcccgtttcatgcttggtgttataaatcagatggccgtttggttaaagtcaaagcgcctagcgaatattgtgaagattttgataaatcaagccgtggtttaaaacaaggccgtattgccagctaccgtggatttgtatttgtaagtcttgatactcaagcaacagattcactagaagactttttgggcgatgcaaaactgttccttgatttaatggttaaccagtcgccaacaggtgaactcgaagtattacaaggtaagtcatcttatacctttgcaggtaactggaagctacaaaatgaaaatggtctagatggttatcatgtaagtaccgttcactataactatgtctctacagttcaacaccgtcagcaagtcaatgcatcaaaaggtgccgaactcgacacgctcgactacagtaaattaggtgcaggtgactcagaaactgatgatggctggtttagttttaaaaatggccatagtgttttattcagtgacatgccaaatccgacagttcgtccaggctacagcacagttatgccatatatggttgaaaaatatggcgaaaaatatgctgaatgggcaatgcatcgtttaagaaatttgaacttgtaccctagcctattttttatggatcaaattagctcacagcttcgtattgttcgccctgtggcatggaataaaactgaagtcattagccaatgtattggtgttaaaggtgaatctactgaagcacgccgtaatcgtattcgccagtttgaagatttctttaacgtatcaggccttggtacaccagacgatttagttgaattccgtgaacagcaaaaaggttttcaggcacgacttgaacgttggagcgatatttcacgtggttgtcagtcttgggaatatggcgcgaccaaaaactcacaagatttaggcattcaacccgttattactggccgtgaatttacccatgaaggactctatgtaaaccagcatggacactggcaacgtctcatgctcgatggcttaaataaaaaagcgctgaaaatgcaggatattacttttgaaaacaatgccgtaatggatgaggtgtaa

SEQ ID NO: 45926 - DNA, 237 bp, Acinetobacter baumannii
atgcctatcaaactctcaggtggggaaaagcagcgcgtggcactaggtcgagcattattatattcgcctaagctgttactgcttgatgaacctttatcagcattagatgcgaatcataaagctgaaattattcctttttttcaaaaggtaaaagaggaaattaaaattccgatgatttatgtaagtcatgatattcaagagattaaacaactgaccgaaacaatgtggattttataa

SEQ ID NO: 45927 - DNA, 498 bp, Acinetobacter baumannii
atggctattttaaaaaaacttcagaacattccttcaatttccaaattcttatttaaccattacccaccttaccgtggagctggaattcatattgaagtcatgaatttagagctctgtcatgttcgggtaaaaatgccacttacttggaaaaatcaaaatctggtaggcactcactttggcggaagcctttattcaatggttgacccgttttatatgttgattcttatgcatcatctcggatcaaaatatattgtttgggataaagcagctgaaattaattttttatcacctggccgaagtaccgtttatgctgacattcgagttgatttagcagaaatcgaacaaattcgtgaacttgccgaaaactatgctcctgttcttagaacatatcatttaaatattttcgatgaatcaggtgtgagaattgctgaagtccaaaagacactttatatccgacgtaaaaaagcaaagccttctactaataaaataagcgcctga

SEQ ID NO: 45928 - DNA, 495 bp, Acinetobacter baumannii
atgaatgttaaggcagtcacgtttgtgaccagtttatttatctcaatgggagtacccgcaatggataaaaaatcagtcacagcatttcaaaccgttaaaaaagccaaccaacaacaggtaattaccggcctagataatattttcacgggtcaagttgcaattaaaccattaactgatgttactgacagtataaatgcttccagtgcttatgtaagttttaatgccaatgcccgttcattttggcatacccatcctaaagggcaatatctcattgttacagaaggagagggactggtgcaagaatggggtaaacctgcggaaaaaatttctgtaggagatgtgatttattgtccacctggagtgaaacattggcatggtgcaagtggaaattctgcgatgacacatcttgctttaactgcaactgatgaacatggcaaaaatgtggactggttagagcctgtatcagatgagcaatataaagaggcgggccactga

SEQ ID NO: 45929 - DNA, 639 bp, Acinetobacter baumannii
atgcaaaattctttatccgaacagcaacaggcaatcataccgattgctgcctatgctgcaaatggtgacctagctaaactcagtcaatcattaaaagatggtttagatttagggttaaccattgcagaaattaaggaagttttagttcaaacctatgcctatgcaggttttcctcgaagtttgaatgcccttacaacatttatgcaggtgctagagcagcgtaaagaaagcggtattcgtgacatagagggtaagactaatagcactctaccgaaagattatcaggcacttttacaaggtactcagaatcaaactcagttggtgggtcaacctgtaaaaggtgcactttttgattttgctccagctatagatgagtatttaaaggctcatctttttggcgatattttttcaagggatgtgctgaattggcaagatcgtgagattgctactttgagcatgctttcggctctagaaggtgtagatagccaacttcaatcccatcttaatattgcaaagactcaaggtgttagttctcatcaatttgaaaatatacagaaaatacttgctgaaaaagtaagtctgcaagtgggtcaaaggttccaaaatgtattgaccagttttcacaatcaatcgctctaa

SEQ ID NO: 45930 - DNA, 1020 bp, Acinetobacter baumannii
atgaagttattggcttcattactcactttactcattctatgtggatgttcctcatctgagcaaaatagaaaaactcaagaaaactcaacctctcattcaatatgtgtttttgatagtacaaatacaaaagtctgtgtagccaaacctgcccaaagaattgtctctttgtttgagtcgggtttagatggcctctatatgctagggcaaggcgacaaagtaattggtatacctgccgaagtatacattcaacctttattatttaatgcctattcaaaaatagataaacgcattgctaataaacagcttgcagcaccttcgcaaggagccaatgcaaccaatattgaaagtctcgtgttgctaaaaccagatctggtgattgtaggaagcgggcagactcaaacgattgaactgttacggcagtttggcatcgctgtatatgtaatggagtcaggcacctataaacaagtgaaagaagaactgtctgaaattgctattctgagcggcgcccaaaagcgagctcaggaaattttaaatttctctgatgaaattgtggcagaagtcgcagccaaaacggcccgtcagccaaataaacaatcgatttactatgcttggtctggtggacgaattttttctacctctggacgagagtcgattaccaatgactttattgaactcgctggtgcttacaatattgttcagaccaatgctaaccagcctaatgtaaatcccgagactctcattgaatggaaccctgacaatattgtgctttggaataccaacccaaaactgatttatgaacgaaaagaattacagggtttaagcgctgtacaaaaccgaaaggtatttaatttgagtcctgcatttatatataacccgcacaccatcaaaatcattattacagcgatttatctaaatcacagtatttatcctgaacagtctgatttaccagtaagtgctttacaacagcgtattttaaccaagttgtatggtgagcagcttgctaaagtgttgatgcaatga

SEQ ID NO: 45931 - DNA, 765 bp, Acinetobacter baumannii
atgattcaaattgatcagttaaattatgcctatgggcacaaacaggttcttaaaaatattcatctagagtttcccgaaaatcagttttcagtgattttagggcgtaatggttgtggtaaatcgacactgtttaaattgatggcgggcctagaacctgtaaaagatggcttgattcgttactctggaaaagcactatcggactttaaaggaaaagatcgggcagccttactcggttttttaccgcagtttcataaaaccgtatttccatttttggttaaagatgtggtgattacggggcgtgctgcttttagcagatatagaccttcaaaatcagactgggaacgtgtagaccaagctttgcttgatttagacatcgagcatttgcgtgaccgtccttataccgagctatcgggtggcgaacggcaattggttatgattgcgcgtattttagtgcaagcaccgaaagtcattttgctcgatgagccaaccaatcatctcgatgtttattaccagtcttatttaatgaaaaagttgcgtcagttgtcgaggcaaaattttacggtgattgcaattatgcatgatcccaacttggcttttttatttgcagatcatttgttttttatgcgccaacacgaagtagttaagcctgaatctaaaactcgtataaccgatcctaagtttttaaaaagtgtctatgatgtcgagtttcatgaagccatgattcaagacaaaaccattgtgattcctgatcattcgtggctgtaa

SEQ ID NO: 45932 - DNA, 876 bp, Acinetobacter baumannii
atgaataccccagcatcaaatgataaaaatccaactccagatttagctgaagataatgcgttcttcccatcaccatattcactgagtcaatatacttctcctaaaacagattatgatggcacaacctatccaacgccgtatgcgggcaataaaaaggttttaatgattgcaactgatgaacgttatatccagatgcaaaacggtaagttcttttctaccggaaaccatccagtagaaatgcttttgccaatgttccatttagataatgccggatttgaaattgatgttgcgacactttcagggaaccctgccaagcttgaaatgtgggcaatgccaaagcaagaacaagtagtattagatactttccagaaatatgcagataaattaaaaaatccgttaaaacttgccgatattttagaaaatgtagtcggtgaaaactctccatatgcggctgtatttattccgggtgggcatggggtattagcgaagattccgcatagccttgaagtgaagaaagttcttaaatgggcagttgaacaagacaaatttattattacgttatgtcatggtccagcttcgttactggctgccgcagtagatgaacagcctgagaattatatttttaaagattatcaaatttgtgtattccctgactcgttagataagggagcgaatattgatattggttacatgcctggagcattaccgtggttagtcggtgaaaaccttgaaaaactcggtgtgaagattttgaacactggcattactggtcaatgtcatcgagaccgtaaattgttaacgggcgatagtccgcttgcttctaataatttaggcaaacttgcagctgaaacattgctggctgaagtgaaggattaa

SEQ ID NO: 45933 - DNA, 1686 bp, Acinetobacter baumannii
atgattgaatggttacaaggtgttttaaagcacagccccgaaatattattgttcttatcactcgcaataggtttctggattggacaattccagttcggaaagtttcagtttggtggagttgcaggctccttactcgtcgcagttgttttaagtcttattggtgtgcctgtcgataacggcgttaaagcaattttatttgctctcttcatttacgcagtaggctttgaaagtggtccacagttttttaaatcacttggaccacagtccataaaagaaattcttttagcagtatttatggcagtgtgtggtttagttactgttttagtgatggctaaaatttttcatctcgataaaggcttggctgcaggtctcgctgcgggcggcatgactcaatcagccattattgggactgcgggagacgcaatttctagacttgatctcccactcgcagaaattcaaagacttcaagcaaatgtcgcgattggctatgcagtgacttacatttttggttcattgggagcaattattgtctgtgtgaatatcttgcctaaatttatgggtaaagaaattcacgacgatgcattaaaagctcagagtgaacgactcaaaggtgcttttgaactcgcaccgggccaagaactcgcaatgccggaaattgttggccgtatttataaagttaaacaagccaatgggcaaactattgcggaaattgaagcaaaagagccgagtattacgattgaacggttaaaacgtaaagatcagtttattgatgttgctcctgaactaactttacaaacagacgatgtcattttactggttggtcgccgtgccagtgttgtttcggttgccgagcaaatcggtagcgaattacagtcatcgcaaggtatggaaatgattatggataccagcgatgtcatcctaagaaattccaaatatctcaatcgtactttaggagatattaaggccaatacgcctgcgtatttaaagcacggtatttatgtacttgcgattaagcgtaacgatgagtcccaacctttaagtaacgacaccgttttacgccaaggtgatgtagtcaccgtctacggtacaaaaagtgacctcgaccgcttggtgaaagaggctggtaaagccctgcctgaaagcttaaaaacagactggatttttcatggtgctggccttgtggttggtttagtgattggtctttttgtgattcgtctaggtgatgtgcccctaacacttggcgctggtggtggtgctttactatcaggtcttctgtttggttggattcgaagtcgaaatcaggtgcatggcaatatgcctttagcagcttcccagcttcttaaagatttagggcttgcaggcttcgttgcagccgtcggtttacaatcaggtttacaggctattcaaaccattaaagaaagtggtctttcactctttatgattggggtggtggtcacactggttcctctcctactttccatgctctttgctcgttatgttctgcgttatgacaacgttgcagtgatggctggtgcattatcaggttcacgcagtgcaaaccctgcatttggggcaatcttagacaaagcaggcaactcgattccgactgttccatttgcaattacctatgccctagcaaatgtgttcttaaccttactcggaccactgattgtaggcttggcctga

SEQ ID NO: 45934 - DNA, 1599 bp, Acinetobacter baumannii
atggggaaagtcgattattctaaatacgcaaaactcagcccatttgaacttaaagataatttaatagaattagctcaaagcaaaactgaccgaatgatgttaaatgctgggcgtggtaatccgaactttcttgccactatcccacgtagagcattctttcaactgggtttgttttctgcgactgaatccgagttttcattttcctatatgcctgaaggtttaggtggcttcccgcgccccgttggtctccagtcacgttttgataatttcattttggaaaaccgtgacaaacccggcatcgtctttttaggcaaagctgtttcttatgtacgcgaccagttaggtttagacccagatctttttctgcttgaaatggttgaaggaattttaggctgtaactatccagttccagatcgtatgctcagagtaagtgaaacgattattaaagagtatgtcttacgagaaatgggcgtacaaggcatgcaaaaaagtgatttagatttgtttgctgttgaaggcggaacagctgcaatggcctatatttttaactcattaaaagaaaataaaattattaaaaacggcgaccgtattgccattggtagccctattttcacgccatatctggaaattccaaaacttaatgactaccagcttgaagaagtacttattgaggcagaccctaaactcggctggcaatatccagagtcagaacttagaaagttagaagatccgtctattaaagcgttcttcttagtgaaccctagtaatccgccatcagtgaaaatgagtgatgaaggccttgcgattttggcagatattgttaaaaaacgccccgacctgatcattttgacagatgacgtttatggtacttttgccgataacttcaaatcactatttgcgatctgtcctgacaacacgatcttggtttattcattttctaaatactttggtgcgactggttggcgacttggtgtcattgcactttcaaataacaatgtgcttgataaacaaattgcgaacttatcgaaaaaagagaagaaagagctggaagaccgctattcatctttaaccaccgacccagcaagcattaagtttattgaccgcttagttgccgatagccgaaatgttgctttgaaccataccgctggtctgtctaccccacagcaagttcaaatggttttatttgcgctatttaatatgatggactcacgccaaagctataaaaaagcagtcaaatctgttgttcgtgaacgtgatgcagcactttatagacagcttggtgtcgatgtcccaacagatccaaatgctgtggactactacaccctagtcaacctcgaaaacacttcacgaactctctatggagatgagtttgccgattgggtcatgaaaaataaaaacccaaccgagctattatttagagtagctgatgaaacaggtgtggttttattacccggttctggcttcggtgtgcagcacccttctgctcgtgcatctttagctaaccttaatgaatatcaatatgccgcaattggtgaatctttacgacgctttgcagatgaagcttatgccgaatacacaaaagcgaaaaagataaaataa

SEQ ID NO: 45935 - DNA, 903 bp, Acinetobacter baumannii
gtggatgatcatcatttaaaaagaaaagtcggcacgcttgaaatggtcgtagccatgctgctttcagggagtattggtctatttgtgattaagtcaggtcaatcacccgttaatattgtatttttccgttgccttatttcagcattgtgtttaataccgatttgttacttttatggtcattttaaaaaagtatacttcggtaaaaaagaactgtttttaatggtgacttcgggccttctaattatttttaactgggttctactgtttgctgcttttcctaaaacttctatttctttagcgacgattgtttatcacgtgaacccgtttgtcattttatttttaggggcgttggcctttcacgaaaagctcaataagaatgatgtgctatggaccatcgttgcttttgtagggctaatcgtgattataggcttaggcagtgcttcggtgaactctaatgagttggtcggcttggggctggttcttattgccacaacactttattccatatcggtattaatcactaaaaaattaagtaatacaccgccgttattaattgtatttatacaaaccctgagcggggccattgccatgactccatttatgtcggtttttgaaaacccgccgatcggtcaacaatggctgtttgtggtcggattgggagttttgcataccgcatttctctactatttaatgtattcggcgattaagaaaatacctttaaataatattgcgatcttatcttttatttatccaatatcgaccatagtgattgattatttcttctttgatcatgtgttgactagtactcaagttttaggtgcaggtttaattttattaggcgtattgggtgtgaagttgcattggaatatttttgcagtaaaaaaagtaggaataaggaattaa

SEQ ID NO: 45936 - DNA, 1398 bp, Acinetobacter baumannii
atgtctaaatcgacaatcgtatctcgtggactcattctttctacactctcaattgcactcgttgcatgtgtcaatatgcaagcgccacagcctgcaattacatctcatattcctcaaaattttagtcaaaatcattctggaaaaatgattgcagaaaaaagttataaagaatttatttctgatccgaaattattacaggtcattgaaatcagtttaaataacaaccgtgatttacggactgctacgcttaatattgaacgtgtacagcaagaataccaaatcacaaaaaatagccagctcccaaccattggtgtaacgggaaatgcagtgcggcaggttagcccatcgattaaccccaataacccagtttctacatttcaagttggcttgggaatgactgcctatgagctagatttttggggccgtgttcaaaatttaaaagatgctgcattaaataactatcttgcaactcaaagtgcaaaagaagctgtacaaattggtttaatcagtaatattacacaggtctggttaaattatgcttttgcacaagcaaatttaaaccttgccgagcaaaccttaaaagcacaagtcgatgcttataaccttaacaagaagcgctttgatgttggtattgatagtgaagtgccattaaaacaagcacaaatttcggtagagactgctcgaaatgatgttgcaacttataaaactcaaattcaacaggcaaaaaatttactggatttgttagcaggtcatcctgttccgcaaaatttacttccggatcatgctattcaaaatattacctttgagaaaaactttgcagccggtttaccaagtgatttattaaatcatcgtccagaccttaaagctgccgaatatgagttacgtgttgcaggagcaaatattggtgctgctaaagcacggatgttcccaaccataagcttgacaggctcgacgggttatgcatcatctgaactgaaagatttatttaaaacaggcaattttgcatggtcgattggacctaatatcgatctaccaatttttgattggggaacaagaaaaactaatattaaaattgcggaaactgaccagaaaattgctttagctaaatatgaaaaagccattcaatcagcttttcgtgaagttaatgatgcacttgctacacatgcacatattggtgaacgattagacgctcagcgtcgcttagtctctgcgactgctgcaacctataaactctcaatggcacgttacaaagctggagtggatagttattttacggttttagatgctcagcgttctgcttatgctgcacaacaaggcttacttgcacttgaacaaataaaattaaataaccaaattgaaatttataaagttttaggaggaggaatatcaaaagtctaa

SEQ ID NO: 45937 - DNA, 1191 bp, Acinetobacter baumannii
atgcaaaagcatcttttacttcctttatttttatctattgggctgatattacaggggtgtgattcaaaagaagtcgctcaagctgagccaccaccggctaaagtcagtgtattaagcattcaaccgcaatcggtaaattttagtgaaaatcttcctgcacgtgtacatgcattccgtacggcggaaatccgtccgcaagtcggaggtatcattgaaaaggttctatttaaacaaggtagtgaagttagagcagggcaagccttatataaaattaattccgagacttttgaggccgatgtaaatagcaatagagcttctctcaataaagctgaagctgaggtggcaagactcaaagttcagttagaacgttatgagcagttattaccaagtaatgcaattagtaagcaagaagtaagtaatgctcaagctcagtatcgtcaggctctagccgatgtcgctcaaatgaaagcattgctggccagacaaaacttgaatctgcaatatgcaacagttcgagcgcctatttctgggcgtattgggcaatcttttgtcactgaaggtgcattggtcggtcagggcgataccaatacgatggcaaccattcaacagattgataaagtctatgttgatgtaaagcaatcggttagtgagtatgaacgcctacaggctgcgctacaaagcggcgaattatcagcaaatagtgacaaaaccgttcgtattaccaatagccacggacagccctataacgtcacagcaaaaatgttgtttgaagatattaatgttgacccggaaacaggcgatgtcacattccgtattgaagttaataacactgaacgaaaattacttccgggcatgtatgtgcgtgtcaatattgatcgtgcttctattcctcaagcgctattggttccggcgcaagcgatccaacgtaatatcagtggcgagcctcaggtatatgtcattaacgcccaagggacagcggaaattcgtcctatcgaaattggacagcaatatgagcagttctatatcgctaacaaaggcttgaaagtcggtgacagagtcgttgttgaaggtattgaacgtattaagccaaatcaaaaattggcattggcagcatggaaagcaccagccgtcgcgaatcatgcttcaagtgtagaaaccaaaacttctatagctgaaggggcacaaccatga

SEQ ID NO: 45938 - DNA, 744 bp, Acinetobacter baumannii
atgtttgatcattctttttcttttgattgccaagataaagttattcttgtggtagaagatgactacgatattggcgacattattgaaaattatttaaaacgtgaaggcatgagtgttattcgggctatgaatggaaaacaagcgattgaattgcatgcgagccaacccatcgatttaattttacttgatattaaattacccgaattaaacggttgggaagtattaaataaaatacgccaaaaagctcagactcccgtgatcatgttgacggcgctagatcaagatattgataaagttatggcattacgcataggtgcagatgactttgtggtgaagccttttaacccaaatgaagtcatcgctagagttcaggcagtcttaagacgtactcagtttgcaaacaaagtaactaataaaaataaactctataaaaatattgaaattgataccgacactcatagcgtttatatacactctgagaataagaagatcttgcttaatctgacgctgactgaatataaaattatttcattcatgattgaccaacctcataaagtttttacgcgcggagaacttatgaatcactgcatgaatgatagcgatgcactagagcgaaccgtagatagccatgtaagtaagctgagaaaaaaactagaagaacaaggcatatttcaaatgttaattaatgtgcgtggcgtgggatataggctagataatcccctagctgtaaaagatgacgcctaa

SEQ ID NO: 45939 - DNA, 1074 bp, Acinetobacter baumannii
atgaaaagtaagttaggaattagtaagcaactttttattgccttaactattgtaaatttaagcgttacgctattttctgtagtactgggttatgtcatttataactatgcgattgaaaaaggctggattagtttaagctcatttcaacaagaagattggaccagttttcattttgtagactggatttggttagccactgttatcttttgcggctgtattatttcattagtgattggcatgcgcctcgcaaagcgttttattgtgccaattaacttcttagccgaagcagcaaaaaaaattagtcacggcgacctctctgctagagcttacgataatagaattcactccgccgaaatgtcggagcttttatataattttaatgatatggctcaaaagctagaggtttctgttaaaaatgcgcaggtttggaatgcagccatcgcacatgagttaagaacgcctataacgatattacaaggtcgtttacaaggcatcatcgacggtgtttttaaacctgatgaagtcctatttaaaagccttttaaatcaagttgaagttttatctcacttagtcgaagacttacggactttaagcttagtagagaaccagcaactccggttaaattatgaattgtttgactttaaggcggtagttgaaaaagttcttaaagcatttgaagatcgtttggatcaagctaagctagtaccagaacttgacctaacttccactcctgtatattgcgaccgccgtcgtattgagcaagttttaattgctttaattgataatgctatacgctattcacatgcaggcaaacttaaaatttcctcggaagtggtatcacaaaactggatattaaaaattgaggatgaaggccccggcattgcaaccgagttccaagacgatttatttaagcctttctttagattagaagaatcaaggaataaagaatttggcggcacaggtttaggtcttgctgttgtacatgcaattattgtggcactgaaaggcactattcaatatagcaatcaaggctcgaaaagtattttcaccataaaaatttctatgaataactaa

SEQ ID NO: 45940 - DNA, 996 bp, Acinetobacter baumannii
atggatcgttttaaagctattttacttattacaagtacatgtttaaccacaactctttatgccaaacaacaagtcgtctgtgtatttgaccccattggtaaatcgggagacgctttcgctttagccaaagattatgcacttgaagccaaaaattggggagctgatctatctttaaaagcatatgttgatgaacgtgtagctgctgaagatttgaaagttggaaaatgtgatggcgctattattagcggtttacgtggccgtcagtttaataaatatacaggctctttagatgctgttggtgcattaacaaatatgaaaacggcaattaatgcctataagctgttgtcctcaccaatggccgcaaaaaacatggtggtaggtccttatgaaattgcaggtttaggcacaattggtcctgcctatttatttgtaaatgatagaagtataaatactctcgctaaagctgccggtaaaaaaattggggtatttaaatacgatgaagcccagccaaagcttgttcaacatgtcggtggtcaggctgtatcggtagacgttaccaatgccggtgcaaaatttaataaccatgaaattgatattgtgcccgctcctattgtggcgtttaaaccttttgaactctacaaaggtttaggtgagaaaggagcaattgttcgtttccctctgactcaaatttcagcaaacttcattattcgtaaagaccaattccctgcgggttttgggcaaaagtctcgaacttgggtagccagccaactcaatagaacatttggtattattgccaaatatgaaagtgatattccttcaaaatattggatggatattcctaaaaatgaacaattaaactatatgaaaatgatgcgcgaggctcgtatacagctaaccaaagcaggtatctacgacccaaaaatgatgaactttttgaaaaaagtaagatgtaaagaaaacccaagtaattttgaatgtgcattaaacgatgaatga

SEQ ID NO: 45941 - DNA, 915 bp, Acinetobacter baumannii
atgggtaaaagtctaaataatgtgccccaagcgccacttgatgttcagtttgattcaaatgacgtgaaatgcagtgcctatttataccgtcccacaaccgaggtagctactccaatgattgtgatggcacatgggctgggtggtactcgaagaatgcgtttaacagcttttgccgaacgtttcgtggcagagggttatgcttgtttagtgtttgattatcgctattttggggatagcgaaggtcaacctcgacaattactagatataaaaagtcagctcgaagactggaaagctgccattgcctatgcacgtagcctagacaaaattgacccaaaccgcgtagttatatgggggacttctttcggtggaggccatgtgctggcaacagctgccaatgataaccggcttgctgctgttatatcacaatgccccttcactgatggtttctcatctagcatggcaatgaacccgataacgaccctcaagctcatgggactcgctttaaaagacaagattggatcaatactcggcgccaagccagtcatggtacctcttgcagcaccatcaggacatacagcattaatgaatgcacctgatgcttattcaggttatctcgcactcatgccttcaggttcaaatattccaaactatgtcgctgcacgttttgtactcgacatcatacgctattacccgggtcgtaagacatcacgtattcaagcgcccgtgttgttttgtgtctgtgataccgactctgttgccccctcaaaaacaacattgcgtcatgcgagccatacacccaatcatgaaattaagcactacgccgatggtcattttgaaatttacgttggagaagcttttgagcgtgttgttcgtgatcagatcgactttcttaaacgcatcgttccagtcaagtaa

SEQ ID NO: 45942 - DNA, 861 bp, Acinetobacter baumannii
atgaaatatgacctgaacaaaaaagttgttttaattacaggagccgctggaggaattggtgcagcaacagcccgtgaattttatgcattaggtgcaaacttggtactcaccgatatgcaacaggaagctgtagataaacttgcatctgaatttgaggcatctcgtgttttaccattagcgctagacgttactgatgcggtagccacaaaagatgtagtccagaaaacaataaaacactttggacaccttgatatagctttcgccaatgcaggtatctcatggcgtgatggtgcttcgacaattgctagctgtgatgaagctgagttcgataagattattgaagttgatttacttggtgtctggcgcacagtccgtgctgccttaccagaggtgacccgcaacaaaggacaaatcctcataacctcttctgtttattgctttgtcaacggaatggcaaacgctccatatgcggcttcaaaggcggcagtagaaatgctcggacgctgtctccgtacagagattgcatatactggcgcaaccgctagtgttgtctatccgggctggacagcaacaccaatcgctaaggttgcctttgggggtaatgcaactgtaacgaagatgattgaagcagcatttccggcatggttacgcaagcctatttctccggaatatatggcgcaagccattgtaaaaggtgtacagcgtcgacagccacgcatttttgctccagtgcgctgggttccgttctcgatattacgcggaatgtttaatgcagctagtgatgcaatggttgtacgccataagaaattacagggattacttcaacaacttgaaagtgaatctaaacctgtccagaaataa

SEQ ID NO: 45943 - DNA, 1419 bp, Acinetobacter baumannii
atgcagccatctgacaaacaactagatgctcagcatcagaacagtactgcacctttaaaaagagccatgagtactcgccaccttgtcatgttatcgctaggtggagcaatcggtactggtttatttttgggttcaggggaagtcatttcacaaactggacctattggcgcaattattgcctatattcttgggggtgcaattgcttacatggtcatgctctgtttaggcgagctggctgtacatatgcccgtttcgggttctttcggcgcatacgctcgaaagtacattagtccaagtacaggttacatgatttcatggatgtactggctaacatggacagcaacgctaggaaccgagtttaccgccgctgctctacttatgcaggaatggtttccacaaatttcaatgtggatctggacacttatttttgcagtaactattttcgggttaaatatcagttcaacccgagtatttgccgagtcagagttctggctagcgctagttaaggtcattaccgttattgcttttattgtgcttggattattagcaatttttggtttaattcctttccacggcgctcaaactgctccattgtttagtaatttaactgcccaaggttggttcccacacggttttcttcctattttcaccactatgctcattgtaaactttgctttctctggaacagagttaattggcgtagctgctggcgaaactaaagatccggctcagaatgtccctaaagcgattaatgctgcaatctggcgtcttcttatcttctttgtaggcaccattattgtaattagtgcattacttcctttccaacttgctggtttaggtggtgacaacgtaagtaatagtcctttcgttaccgtatttaattacatcggtattccatatgcagatgacatcatccgttttgttattattactgcactactctcagccgcaaactcgggattatatgcagcttcacgtatgatgtggtctttatcagagcaaaagctccttccgggtgtatttgcaacactttcaaaaagcggaacacctattgttgctttagttgtaacgatgttcggcgcaattccaggcttattatcagagcaatttgctcctgaaaccatctttaaaaacttgctaggtgttgcagcttttaccatggttattgtctggatgagtatttgtttaagccagttcaatttccgtcgacaatggtaccgttctggacatacggttagcgatttaaaatatgcagcaccgttattccctatcgttccaattttaggttttcttttctgctttattacatgtttaagtatggcagcagatcctgaaatgcgtgctggctttataggttgcttaatttttactgccttgtgctatctcagctactttattttctatcgaaataaagcttaa

SEQ ID NO: 45944 - DNA, 885 bp, Acinetobacter baumannii
atgaaaattatatttatccatgggatgaatcagcagaattacaccgcacatcgtttaaaagagcactggctaaaagtatttaaactgggcttaaaacaattgcactgtagagttaatttaagagatctacatatacatatgccattttatggcgatttaatgacgaagtatcaattatccaatcaacttgatcttaatactttacttccaaaaacttttaattttcatttacccatccatttacatcatcaaccatcaacacctaaggaacatactccttttataccccacctccctctttcacccgatcaaccagcgcaaagcttatcagagcgtttatatttaacttcacagatggtgaaagatcgcgttcttaaggagatggtggttcttttaaataattttccaaaattacatgaaagcttaattcagcaattcttgattgaaacttatatgtacttatctaatcctgattttatgtatgaggttcatcaaagaattttaaaacaaatgcatgatgatgaagattgtattgtagtcgcccactctttgggttctgtgattgcctatcatttattatcagatccttcttatcagttttcagtacagcgctttattaccttagcatcccctctttcttttcgcgtcatacaaagcaaactccccactcccattgaacgtcctaaatgtttaaagggcgactggtataacttttattctaaagatgactttttaaccgcttttccattaagtgaggcaccttttaattttactccccccattattaatcaagagatttttacttttgccaaccaacctcatgaaattgtcggctacttacaacatcatgctgtggtaaaaacaattattgagcctttccaataa

SEQ ID NO: 45945 - DNA, 3159 bp, Acinetobacter baumannii
atggacattaataaacctgatttgccaaaggctgaaggtttgtttgatcgaattattcagttttcaattaacaacgccatttgggtcatgatgtttgttattgcttggattggtgtcggaatttatagctatcaaaaactttcaattgatgctgtgcctgatatcaccaatgtacaggtacaaatcaatagtcaggccaatggttttacagcaccagaagttgagcaaaggattacttatccgattgaaaatgccatgtctggtattccaaatctggaacagactcgttcaatttccagatatggtctttctcaggtcacgattatctttaaagatggtactgacatttactgggcaagacagctgattaaccaacgtttacaagaagctaagagtgctttaccagatagcattgatccgcaaatgtctccaatttcgactggactcggtgagatttatcaatgggtggtaaaagcagagccaaatgctaaaaaagcagatggctcagcttatagcgcgatggacctgcgtgaaattcaagactggattattcggccccagttacaacgtgtacaaggggtagccgaggttaatagcattggtggatataataaaacctatgtggtctctccagatctgacacggttacagcagttgcagattccacttaccgacttacaggatgcgcttcaaaataataatgaaaaccgtggtgccggatttattgaagagaacggccagcaactcaccgttcgtgttcccggcatgctgatgtcaatacaagatatccagaatgttacggtcgccactaaaaacggtttacctatacgggttgccgatgtagcgtcagtatcgattggtcatgatttgcgtacaggtggtgctacctataatggacaggaaactgttttaggtatcgccatgatgatgatgggtgaaaacagtaaaactattgctaaggcgattgacgataaagttcaggaaattcaaagatcactccctcagggcgtggtgattgaaacagtctatgatcgtagtagcctcgtagataaagcgattaaaacagtagctaaaaatttgattgaaggggcgattttagtcatcgttatcctttttatttttttagggaactttcgcgccgctttaatcactgcttgtattatcccattggcaatgctttttaccttaacaggtatggcggaacaaaaaatcagtgccaacctgatgagtctgggcgctttggacttcgggatcattgttgatggggccgttgttattgttgaaaactgtattcggcgtttagctgaagcgcagcatttaaaaggtcgtttattaacacgttcagagcgtttcacagaggtttttctcgcagctaaacaggcacgacgcccattaatctttggtcagatcatcattatggtcgtgtacctaccaatttttgctttagcaggcgttgaagcaaagatgtttcatcctatggcaatgaccgttgtcctagcattattgggagcaattattttatctgtgacctttgtcccggcagcagtagctctgtttattacgtgtgaagtgaaggaaaaagaaagccgctggatgatgacgctgaaaaaaggttatgcaggcttactcgataaagcatatgcctttcgatatgttgttgtcacagcagcggtcagcatcttaattttgacaagtgctattgcaacaagagtggggagtgagttcgcccctcaactcagtgagggtgattttgcattacaactcatgcgtgcaccgagcacaggcatagaagagtcgcttaagattcaagagaatgtagaaaagcagttactgaaagctttccctgaaattaaagccatttttgcaagaacaggaacagccgaggttgctaccgatgtcatgcctccaaatatttccgatggtattgttctattaaaaccacatgatcaatggccaaaccctaaagaaacgatagatgaattgcgtaccagaatgctgcaattcgtgaatcagattcctggtaataacagtgaattctcgcaaccgattgaactacgttttaatgaactcatttcaggcgtccgtagtgatatcggggtgaaagtttttggggatgatatgcaagtcctcaatcaggaagcggaaaaaatagcccaacagctacgtagtattccaggtgccagtgaagtcaaagtcgaacagactgatggtttgccattacttaatgtagatgttaatcatgcactagctgctcaatatggattatcagtcaagtctattcaggatattgtcgctgcgagtattggaggacagagtgtagggcaaattttacagggcgatagacgtttcgatttcgtgattcgcttacaggaaaacatgcgtacgcctcagcagctagcacaattaccgattcgcttaccaaacggcggtctgatccagttacaagacgttgccaaggttgagaatattctgggccttgctcaagtgagccgtgaaaatggcaaacgccgagtgattgtgacggcaaatgtgcgtgatcgtgaccttgggtcttttgtacaagagatgcaaagcaaactggcgcagcaaaagctacctagcggttattggttaggctatggagggcaatttgagaatcttgcttctgccactgcaagaatgcaaatcgttgtgccgatggcgctcatcatgatctttgtattgctgatggcggtatttagtaactttaaagacagtttacttgtatttagcggggttcctttcgctttgtctggcggattagtggctttgtggctgagagatattccgctttctatgtctgctggagtcgggtttatcgctttatcaggtgttgcggtattgaatggtttggtcatgctcacattcattaaagagctaagagcaaccctagatgttcatgctgcaacttggaaaggtgctgtactgcgactacgccctgtattaatgacggcatttgttgcttcacttggttttattccaatggctttggcaactggaactggtgcagaagttcagcggcctttggcaacagtggttattggtggcattatttcatctacgatattaactttggttttattaccggtcatttatcgatggatgaatgaagacaagacgaaaagtgttgagcattcataa

SEQ ID NO: 45946 - DNA, 1209 bp, Acinetobacter baumannii
atgtcagttaaaaaaatgaaaaaccaatggcttattgctattttgctgctgattgtctgccttgctttaagtgcttggttatttttctctggaaaaaaacagcctaatactgagaaaagtgaagaagcgcatgcagagggtgaagctggtcatgaagaatctgaaaaagaggaaggcagtttaaacttaacttctaagcaactggttgaatatggagtgaagttagagcaagtaggacgtggagaagttgagcagaatctctcgtatcctgccaaacttgttgtaaatacagaccagcaagcacatgtctcttcaactttttctgcgcgtgtagatagtgtaaatgttgcgttgggacaacaagttgaaaagggtcaggcgcttgcgactttatttgtacctgatttagtcgatcaacaagctaacttaagcatggcacaagaagcactgacattagcccagcaagattatcaacgtgaaaaacaattgtgggaacaaggggtttcagcacgtcaagattaccagcgcgcttacaatgcttatcgtcaggcgcagattcaagtgcaggctgcaaatagccgtttatctgcattgggagcaaatcgctcaagtaaaggtcgatatgttttaactgcacctttaagtggtgtaatcagtagtaaagatattgtcattggtgagcaaattggtcctgaaaaacagttatttgttattgatcgcctagatcagttatggattgaatttgtgctaccaagtgcaaatactaatattcagcctaatcaggaaattgaatttaaatcactgcaaacgaataatatttttaaagcacaggtacaaagtttaacttcagaagcagatactcaaactggtcgtctacaggttcgtgccaaggtactcacaccttcaaaagaattacgccctaacttaatggtcaatgtgttactgaaacaaaataatgcagcgactgtattacgagttaataagacagcgatacaacagattgatggaaagaatgtcgtctttattgcaaaacaggagaaggacaaaattcattttgctcctgttgcggtagagttaggcaattattcttcagatgcacaatgggtagaggttaaatctggaattactgaaaagcagcaatatgtgactcaaggtagtttcttgctcaagtccgaacttgaaaaaggggaggcagagcatggacattaa

SEQ ID NO: 45947 - DNA, 1410 bp, Acinetobacter baumannii
atgtctatttttttatacaaaaaaagtttcgttagtctgagtacgtcttgggtacttaaatcattagttgttgctgttgcactttcaactggtgtcgtaacaaacgcagccagttcaaatcagaaccttgctgagaatacacaactacagcgtgtacagaatgttttaacttttgaacaggtgctcgatcaggttaagcagtttcagactcaaacaggaatttggcaaactcaacaagatatcgccgagagcaatatcaaacagagccagctatgggaaaatccgacggtttctgtacagcaaacgggttttaaatctggaaaagatcaggaattagaacttgggatctcgcaaaaactagatatttttggtgtacgttccgcagcaaaaaaactagcaagtgttcagcaaaatcaagttgagttaaatcaggttttatatgaggctcaactgaagctggcggtaaaatatttatggtcacaagtatctattttagagcttgaacatgaagttgctaaagcccagttaagaacgagtaagaaccttttagatgctacccgcttacgctttcaggcaggcagtattgctcaggttgatttagatcgaactctcatgacgcatgttgaaaatcagcgtttatatcaggaagttgaattatcactgagtagtgctaaaagaaaattggctaacttatggggtgagacagaagataacttcacgttacgtccagatataaaaagtacgtggcctttaaaaaatgaaagtgatatcgaccaatatttgaaacagaatttgttagaacagtccctacggcttcaagcaatacaacaaaattctgaaattaattatttaaaggcaaaaaatcggcctacgcctactgtaaatatgggcgtggttcgtagtaaaaccgcagaaacgagcagtaccgaaaatcagatccgagtaggtatagcggttcctttaaacatttttaatcgccagcaatatgccctaaaagttgctcaaagcaaactcgatttaattgaccagcagcaaagcttttataaaaagcaaagcgagaattctattcgtactctacagtacgagttagcgggtttaaagcagcaatataatttaatgaatgagcagcaaatccctttatcagagacggtacaagagaaaatgctgcttggctttaaagtcggtaaatttgcaattaccgatgttcagcaatctacccttcaattacaagaacaacgcttgaaaaaagttcaacttcttaaatctgcttggcaaaaagcaattgaggcagaaagtttagctctcgggatcgatccaaatatggtgatgtctggagatgcattaaatcaaattaatcaaaatttatggcaagacacctatcagttgccgacagttggaggggcagagtaa

SEQ ID NO: 45948 - DNA, 372 bp, Acinetobacter baumannii
atgtccgtcttattctgtttgcttatattccaaagtttatggaatgtggcagcggcattttgcgcccatgaaaatcaggaaaaggcattacatcattttggtcatcatgcagcgttgagttatgaagcttcacagcatagccatacggaaaagacagatatcgcggggactcataaagctccgttaaacttgtccgatcatcatgaccatttaccttcatgttttcatgttgtgattgtagaagcacaagaaaaaattgtttcaccgttaatacagtcatctgagccaaaacaacaatattattggtctaattcttataagtcccctcatatctctaaacaagacccgcctcctgttttaaccctgctatag

SEQ ID NO: 45949 - DNA, 612 bp, Acinetobacter baumannii
atgaatattttatttaccccccgtgttagaactgtgagctcccgagtgattgggctgattttagctattattcttgctttaagttttagtaaatggcatttccaggcggcatttatagaacatattttatggttctttggatggttttttgtgggcataggagtaatgggaagaatatggtgcagtctttacatttccggatttaagaatgctaagttggtgacagacggtccctattctttatgtagaaatccactctatctgtttagttatctgggtggagtcgggatcatgttgattacagagacgtttatctttccaatagtattcacgctttattttctctgttactaccattttgttatacgccaagaagaagcattcctaagtgaaaaatatggaactgcatattcagattatataaagacaattccacgctttttaccaagtttcaaaaattttaaagagcctgagttctatcaggtttcaccgaagcatttccgtatttttttgacgcaggtggtgtggtttatctgggttgcggccttagtccaactttttgatgagttgcgactgcacggtgttctcccttcattgtttagttggttctaa

SEQ ID NO: 45950 - DNA, 195 bp, Acinetobacter baumannii
atgcttaattatatgtgcaaacaaagcgcagcaatcttctatgtagattactcgcttaaacattcacgtctttatgttaatgacaaggcgggatataaggttctgtcaaatttttccggaacacaaaaatatcattttaatgaatcggttatcttatctctgatgattcacagtgatggaggtttatggaaatga

SEQ ID NO: 45951 - DNA, 1758 bp, Acinetobacter baumannii
atgattgatagtaaagcagtggttcaagcccataatttattcatgacttttaaagccgaaaataaaaattcagcagatattagtgcaattgttgatttgaatatgcaaatcaaaaaaggagaacttgccgctttagtcggcccagatggtgcgggtaaaacaactttattaaggttaattgcaggattatataaagcgagttcaggttctcttcatgtgctcgggtttgatattgaaaaacatcctcaagttgtccaagaccgtattagttatatgccacaacgttttggactctatgaagacttaagtgtacaagagaatctaaatttatatgccgacttacacggcgttccaaaaaatgtacgtaaccaaagatttaaacgtttattggaaataacggatcttactcagtttactcaacgtctagcagggcaactttctggtggaatgaagcaaaaactaggattggcatgtactctagttcgttccccagagttactcttgcttgatgagcctagtgttggagtagatcctttatcaagacgggatttatggatcattatcgaacaacttgttcaggaagaaaatttaagcgtaattataagtaccgcttatatggatgaagcagaaaagtgcgcttacgtatatatcatgcatgaaggcaaaattttaagacaaggttcacctgagcaattaaaagcgttagtacatgagcaaacatggcaaataaaaccttcagagcagattaagactcggattgtacaagcccagttgcttggaaattctggagagattattgatgcagtgccaaggggagagcaagtaaactttattagccgccaaaaagaactatcaacaaatattttacctctggggctagtggcaaataggcgaccacctgaactcgaagatgcttttatgatgttgttacagcaaaatcaaaaacaacaaatctctatttctcagcaggcttttcgatccgaacaaaacaataattcgcaatcagaccaagcggttattgtagttaaagatttagtcagaacttttggagattttactgctgttgccaatacgtcatttactgtacagcgtggagagatctttgggttacttgggccaaatggagctggtaaaaccacgacattccgcatgttatgtgggttactaccggcaagtagcggttacctagaagttgcaggtaaaaacttacggacggcccgtgctgaagcaagagctaaagtaggctacgtctctcaaaaatttgcactgtatagcaatttaactgttttagaaaatttgaagttttttggtggagcctatggtttatcgggcaaaaaactaaatcaacaaattgataaagctttacaacaatatgatttaaagccgcaaattaaaagcggtgatttacctggtggttataaacagcgcttatctatggcggctgcattattacatgaaccagaaattttatttttagacgaacctacgagtggaatagacccgcttgcacggcgtttattttggtacagcattggtaaactcgcaaatcaaggcattaccatcattattaccacccattttatggaggaagcagaatattgtgaccgcattgccatactagatgcaggaaagttactagccctaggttctcctcaacaggtccgcgaattggcaagtaaagataaacatattgttgatatgaatgaggcttttattgcaattgtggaacaagcacgtgcattaaggcatgcgggttag

SEQ ID NO: 45952 - DNA, 894 bp, Acinetobacter baumannii
atgaatacaaataaagcgttcactgaagttgaatttggtcaacagaaagttaaagttccaaaaggtggttattatgaccgctttagaatgaatcctgatttagatgaagttgcaaaagatcctgcagctggaaatattgattttttccgtagcattcctaaaaagttagttgaatcaagagttggacctgtctgggctcccaacttttattatcgtagcggcaatgtgcaagttttgatgcttgcacccgttaagctgttaaagaaaaaattaccttcgcctctagtacccttggaagcttttccaggttatggactagttgcactcacctttttcacttatacagtttgtgataatgatccatacaatgaagcgtctgtagctattgtcgtgcgtaaacctaaagctcatggtccgcatgctttagagctgattaactcgattcgtaaacatcacttttatgcgcatgtattagctttacctgtcgacactgaaatagcacgtgtacgtggcgtatatggttatcaacttccaaaatggctagccgaaattgatgtaaagattgataagaaaaaagttgaagcaacactttcaacttacaacaaattagatattagcctaacaaccgcaactccgtcattaaaaagagttaagtctgaatcccgcatgggtaaagccacgatgttgcatttagtcgataacgagtggcatcaaactctagtgcaaaccaatgttctctcgtttggtgaaaaacttttcccgcgcaaggtaaaagtgacacgccatggcggccatgtgagccagcttctagaccagttgggcgcatctactattcttcgtctcgatgtgattgaagatgctcaggtcgtattaaatctaccgactaaactttaa

SEQ ID NO: 45953 - DNA, 1446 bp, Acinetobacter baumannii
atgaatactctcaatgaagtaagcagcactttaaatgcatcagagatactctctcgacaacgcaaagcatttttgaaagctgaaccaccaacacttcaacagcgtaaagcaagtcttgcaaaacttcgtgctgctgtcattgaatatcgtagtgaattacaagttgctgcaagtgaagactttggacaccgttcatatcatgaaacagatgtcatggaacttgttggtattgttcagtccatcgattatttaacgcgtaatttacgccgtttcatgaagccagaaaagcgtcatgtcagcttattctatcgctcagctagtgctcacatagaatatcagccgaaaggggttattggggtcatggctccttggaactaccctatttctcttacgcttattccttttgctacagcgattgctgccggtaaccgagcaatgcttaaaccctcagaactcacccctcgaacaagtgaagtgatttcacgcatgcttgcggcgaacttttctatagaagaagttgcggttattttaggtgggcctgaagttggtgctgaatttagtgcactacctttcgaccatctattgtttacaggaagtacacctgtgggctgtaaagtcatgaaagcagcaagtgataacctcgttccgctcactcttgaattaggtggtaaaagtccagcgattgtaggtcgagggcacgtaaactcgagaaccatgactagtattgcctatggaaaattatccaatggtggacaaacatgtgttgctccagattatgcccttgttcatgaagatgatttagaaatatttattgaagaatacaacgcgacagtctctcgattctatccaaacgggccagactgtgatgattacacttcaattgtcaatgaacgtcattatgctcgtttacaaggcttacttgatagtgcaagacaaaatggcgcacgaatcattgaactaggagtcaaatctgaatcggcaaagaatcgcactcgtactcttgttccaacacttgttgtaggagcaaaagatgatgatgcaattatgaaagaagaaatctttggcccaattctacccgtgcgtacctaccgtgatattgatgaggtaattaactacatcaatgaacgagatcgtccactcgccttatattattttggtgaaaaagatgcagattgcaaaaaactgctacgacgtacgacttcaggtaacgttggtattaacaataccttaattcatgtggcacaagacgatctaccgtttggtggtatcggtccaagtgggatgggtgcttatcacggaattgaaggtttccgttctatgagccatgcaaaaggtgtctttgatcagggccgctggaatttcccaagcttcttacatgctccttttggaaaattcatggagttagcacttgccattaccttgggtaagaaaaaagctaaatcttaa

SEQ ID NO: 45954 - DNA, 987 bp, Acinetobacter baumannii
atgaaatgtatcacttttaaaggtgctggcggccctgaagttattacggttagtgaaagacctatgcctgagttaacagatgatgggatattaattgaagttgttgcagcaggtattaacggtccagatgtaatgcaacgaaaaggtttgtatgcaccaccgcctggtgtaactgacattcctggccttgaagtttccggaattgttaaacaagtaggcaagcaagttactaagtttaaagctggagatgaagtctgtgcattagttccgggcggtggctatgctgaatatgtagttgcccatcaagataatgtactcttcattcctgaaggtctgacattaattgaaggtggaattttattagaaacttttatgacagtttggtcacatcttttccaacatgcaaaattccgtccaaacagttcaattttaatacatggcggtacttcaggaattggtactaccgcaacgatgttaactcgagcttttggagcaaccaaaatttttacaacagtttcgagcaaagaacatcaagaagcgagtttaaaaattggtgctgatgtagccataaattataatgaagatgactttgttgaagttgtaaaaaaacatactgatggtaaaggtgtagattttgtcttggatattattgctggagattacatccagcgaaattatgaagtcgctgcaatgaacggcacaatattgcaaataggtgtgcttaaaggcttagcggacaaagtcaatatttttccgatgcttgctaaacgcctaactcatacaggcgctaccctacgctctcaaactgcagaagcgaaagcagaagtgatggcagcactgcaagaaaaggtatggcctttaatttcaaaaggacagataaaacccttgttatataaaacatttgatcttgaagaagctcgccaagctcatgaattccttgatcaaggacaacatgttggtaagttagctttaatcgtcaaaaaataa

SEQ ID NO: 45955 - DNA, 1653 bp, Acinetobacter baumannii
atgaataaatattttgcttttactattttgaccttatttagctccggtgcttgggcttcacaaagcgagccaaggaattggaccgcaattattatgtttgcatgtgtagttggtatttcactacttattacttttaaagctgcaaagaaaacagtatcgaaagaagatttttatacagcgggtaatgctatttcagctaagcaaaatggtttggcgattgcgggagactatatgtctgcctcaaccttactcggtatttctagtatggttttcttcaaaggctatgatggttttatctatgtgacaggcttttttgtttgttggcccattttaactttcttaatggctgaaagactaagaaaccttggcaaatatacttttgcagatattgtttcgtatcgattagatccacagcgcacccgtattttggcaacgtgtggttcacttattgttgtgtgttgctatttaattttgcaaatggtgggtgcaggtcagctgattaaattattgtttggtctagattataaaattgccgttatgctggtcggttgtctaatgctggtgtatgtcattttcggaggaatgcttgcaaccacatggatacaaatagttaaagctattcttttgctctttggcggaaccgttttagtctttctggcatataaagcgtttggttttagtttaaataatatggctgaggctgccgttaatacacataaattaggacaaaaggtgttagaaccgggtccaatgttatccaacccgattaatacactctctatgtctattgggttgatctttggtttagcaggtttaccacatattctgatgcgcttttttacggttccaaatgctgctgaagcacgccgttcagtcttttatgcttctggttatattggttacttctttattgtagtttgtattttaggtttagcttccatcgccatagtaggcacgaatcctcaatattttgtagatgggcacctcggtggagatttaattggcggcagtaacatggttgcgatgcatctagcaaaagcccttggtggaaatctattactcggctttttatctgctgtagcatttgcaacgattttagctgtggtggctggcttggtacttgctggagcttctgcgatttcccatgatttatttcaaaaagtcattaagaaaggcaaggcaactgaaaagcaggaaatggttgtatctcgactttctgtggtggttctaggtgtgattgccatagcatgtggaatcttatttgaaaaaatgaacatcgcttttttaatgggacttacatttggtattgctgcttccgctaactttcctgtacttattctttctatgtactggaaagatttaactacccgcggcgccatatttggtgggtttgtaggaatcatttccgcaattacctttgtagttttatcacctacggtctgggtaggtgttttagggcatgaaaaagcaatattcccatttgataatccagcattattttcaatgcccctcgcttttttagtgagtattgttgtgtctttgactgataaaagtgaaagagccaagttagataaacagggttttgaattacaagtggtgcgttcagagcttggggctcaacaagggtcgtttgaaaaaatgcctttgcattaa

SEQ ID NO: 45956 - DNA, 312 bp, Acinetobacter baumannii
atgaacatccctcaggaagcaaatatcgttttagatgcgaaatttaaaaagatggtaaagcagagaaatcgattcgccgttttcttaagcttaattgtactcagcatttactttatttttataggaacagccacatttcatcccgaattacttgcaattccattagaagcaagcaaagtcaccattggtttaccaattgctgcaattgttattgtattgagctggattataacgggattttatatatttattacgaatcaatactttgacaaacaaaaagaaaaattaagaaaggaatatcgttatgaataa

SEQ ID NO: 45957 - DNA, 1635 bp, Acinetobacter baumannii
atgacgaatggattaatgatgcattgtaatttaaacattacttcaataatgcagcatgctttgatagtttacgcagatcaagaaattgtaactttgaaagcagatgggataagtaaacaccgatatacatataaagatgctttcgaacgtgtagctcagtttgccaacgcactagaccgattaaatataagttctgatgctaaagtcggaacgatggcatggaactcatttcagcattttgaattgcactatgccattccatgtacgggaagaatttaccatacaattaaccctaaattggcgcctgaacagctcattcaaattatcaattctgctcaagatgaggtactcattattgaaccagattgtttggcattagttgattcgatttatgacaatataaagccagtcataaaacattttattgtgctcggggaccccaataaaaatttaaaagcacaatttgatttcgtcttttatgaagaactcattgctccagagcagtcttattatgattggccagatatccctgaagagcgtgcaagtggtctttgttatacatcaggtacaacaggggatcctaaaggcgttctttactcacatcgtagtactgtattacatgcattaatactaagcatgccaaatgcgattggcttaacgcatgatagctgtatcatgcctttggttccgctttatcatattagcgcatggggaatgccatttaatgcggttttgtcgggggcaaaaatcgtttggcctcattcatttgcgggccaaacagataagattttcgacctgatccaatcagaacacgtagatatttctatggctgttcctaccatctggaattcttttaaaaattatcttgaagaacaccatatttcatcagtcagtttaaaacgtgcaatatctggtggttcagctgcgccatattcgcttattgagtctttgagccattatggaatttctgttgaaaatgcttggggaatgactgaaaccagttcaatggcagcgtgtaaccgagtagaccaaattaaaaataatatcgaaacccaatcgattaaatgcggtaaacctatcttcggtattcaaatgagattgcgtgatgagaatcatcaattacttcctcatgatggtgtgcatgaaggcattttagaagtacgtggtcatacaattgctaaacaatatatcaatcaaccaaaagcaggagaagaagagggcaaatggttcgatacgggagatatcgcctgcatagatgaatatggatatatgcatattacggaccgtgccaaagatatgattaagtcgggaggagagtgggtcagcagtgttgaagttgaaaatgcagcgatgggatatgaaaaagttgcagaagccgccgttattgctgccaatcatcctaaatggggagaacgcccacttttaatattggtgccaaagtctccacaagaaaaaattgaacattcagaaattgtcatttttctatcatccaaattacataaatgggccattccgtcagcaaccatattggttgaagaaataccgcatacgcccactggaaaaatcagtaaaaaaatattgagagaacgttatcacgactatttcaccaatagtgcttttgctgaatgtaaataa

SEQ ID NO: 45958 - DNA, 1884 bp, Acinetobacter baumannii
atgctgaatcgaaaaccaattaatattttggtcacctatattaaaaaacctaatattaatggttttcgttctttggttgagcaggcgattagtgaagtagagtcgaacgaaattgatttggtggaatgccatatttcagatgtacaagatgttgctcaaagcttagtagaaaatggctgtcagattcttctatgtacgggagcgaccgcgagttttctacagaagaaattaaacattgatatacaggtcattcgaactggtacttttgatgtcattcaagccatatcaaacttaaaacaatataagcgaattgctttggtgggtaatacgtccacagtcgatcttgagaactactctgatatttttgctttagatatacaacagtttaactatgactcatatttagatgctaaaaaaacaattcatttaattaaaaatcaaggctttgatgccattattggttcgcctgttgcagtagaattagctctgaatgaaaacctagtcggacatttggcgattagtgtgccgtctttaaaagaccttctgcaaaatgccttacgtacccttgaaaagattcgtagagaacagtattcaaccttacgtttaaccgagatctttaatcacttaaatgaaggcatttgttttattacaaagcaaaaaaagatttctttaattaataattcaatgagttcgttacttgaaaaagactcttcagacgttttaaacaaatcagcactcgaaatttttgaaggtttaaactttgatatcgatcaagaaaatagtcatcaactcgtccaatttaaaaatttaaaacttgctgtatatatttccaaattaaaaaatgactacatagatggctatatcttaagagtgcaggaactaaatgcattagagcagtctaatagtcagtttagaaaggtttcatcaaagaattttaatacaagatatacctttgaccagatcttgacgcaaaatccaaattttcaacaaatcattaagttatccaaagcatatgcaaaaaccgatagtaccattctcattactggtgaaagtggtacaggtaaagaagttttagcacaaagtattcataattatagcagtcgttataaagcgccgtttgttgcaatcaactgtgcatcttttccggaaagcttgttagagagcgaattatttggttatgaagaaggtgcctttactggggcgaagaaaaatggacgtattggtctcattgaagcagcacatacgggtacgctttttttagatgaaattggagatatgccattacatctacaaactagatttttacgggtcttacaagaaagacaaattaaccgcttgggctcagtggtaagtcatcatttagatatacgtgtgattgctgcaactcatgcggacttagaagaattggtacgaaatggaagctttcgggcagatctctactatcgtttaaatattttaagagtgtatacgccgtctttaaaagaacgaaaagaagatatcttgtatttagcaaattcctttctagagaaatatagaaaaacactgaatgatttgccgagtattttacagaaggcttttttacactattcttggccgggtaatatccgcgaacttgaaaatatcgttgaaagaatcaatgtgctattacagcttgatcatgaaattttaactccagaatttttaaagcaacagttacccgagctatttcaatctcaaaatcaccacacgacgcaacctttattaaaagaagtaaaagttaatcaagagttgagtttaattgagcaaacacttgcagaagtagagggtgatttagaccttgctgcacaaaaactcgggattagccggaccactttgtggcgtagaatgaaactcataaatcattaa

SEQ ID NO: 45959 - DNA, 252 bp, Acinetobacter baumannii
atggcagtagagttggctagatttggtataaatgtaaatgccatcgctccaggttatatgattactgaaattaatgaagaatatttaacgagtgaggtaggccaacagcttttaaagaaaattcctacaaggaagtttgtagagtttgatgacttaaatgggccattactgttacttgcttcgcaagcgggacaaggcataacaggtatcgaaattaaagtcgatggcggtcatagcgctgcgcctatataa

SEQ ID NO: 45960 - DNA, 411 bp, Acinetobacter baumannii
atgaatatttttgatgtaaaagataaatatattttaattactggtgcttcaagcggtctagggcatcacatagctgaattatttgcaaaagaaggtgccaatatcgttatttgtgccagacggttagagcgattgaaagaattagaatcgcatataaaaaatgaatatggcgtacaagtttatacctttgcattagatgtaaatgatcgttccgctgtgaaagatatgcttagttctttagaagctgaaggagtcactatagatgtgttaattaataatgccggggtgagtgataccaagcgtttcttagactataacgatgaagattgggataagattgtagatactaaccttaaagccccttggcaatgtgcacaagaagttgtgcagcatatgattaaagctgaatga

SEQ ID NO: 45961 - DNA, 1161 bp, Acinetobacter baumannii
atgatcacactatctaatgaattattagagctacaacagaaagttagagaatttattcagcaagaggtgattccattagaaagtgatcctcgccaagatagccatggccctagtgaagctttacgccaagaattggtgagtcgggcgtgtagttgggggctgctaactcctcatgcaagtcgagaaatgggaggacttggttggtcgcatctgcaaaaggctgtagctttcgaagaagcaggatactctgctttaggcccaatcgcgttaaatattcatgcgccagatgaaggaaatatccatcttttagatgttgtggcaaatgatgcacaaaaagaaagatggttaaaaaaactggtagctggagaaattagatcttgctttaccatgacagaacctgcaccaggtgctggctcggatccatccatgcttcaaacaacggcaattgcagatggcgatgactatattattaatggccgtaaatggttaattacaggagccgatggagcgagcgttgcgattattatggcaaaaatggaagatggctctgcttcaatgtttctaacagatacaaacgttgaaggctttatattagaaaaaaatatgaatgctatggactcatgcttttcaggcgggcacggtattttacgctttgagaatttacgtatacctaaagaaaacgttttgggtgaaattggtaaaggatttaaatatgctcaagttcgccttgcaccagcacgtttaacacattgtatgagatggctgggacaagcaaggagagcacatgatatcgctactcaatatgcacgagaacgccaatcttttggtaagagattaggagaccaccaaggcgttggttttatgcttgccgacaatgaaatggatattttaacaactcgattagccgttcactattgtgcgcaggttttagatttgggtgagaaaggaaattacgagtcgagcctagttaaagtgatcagctctgagggtatctggcgtgtggtggaccgatcagttcagattttaggtggacaggccatgacggatgaatcagtggtctgcaagatttttaaagatgcgcgaggttttagaatttatgatggcgcaaatgaagttcaccgcatgagcatagccaaaaaactattagggaaacaggcataa

SEQ ID NO: 45962 - DNA, 729 bp, Acinetobacter baumannii
atggataaatatcggctacgaatttatttggttcgacatgggcatgtttcatactttgatgcagctaataatccgattaatccgaaatttgcacagttatccgaacgaggaatagagcaaatacaacaactggctcatcaattacaagttgttaattttgaaaaaatttactcatctaccatgcctcgttcgattcagacagccgaaattttgaagcgctatcaaaatgagtataaagacattcagtcattcgatgatattcgagaaataagagcaggacgtttaagagaaatttcgttggatcgcgctgagctggaaatcaaaaaggcctatcagttccataaaaataaccttgaattatttgtacaaggcgaaagttggactcactttattagtcgtgtactgacttggtttgaaggcatgatattaacggcaaacaaagaccagaatatcctcatttcttcacacgatattgtaaatcgaatactcattaattgggtttatggacatgacttcaaagatgtttattcgcaggaacaagattatggctgcttaaacattcttgatctgacgattgaaaatcaaaaggtaataagcaaacgaatcaagcttcaaaatttcacgccgtacaatctgattaaaaatgagctatttaatagcgctatggatgatgtgtatgaaacttatatcgcgactcaaggctttaaattaaaggagctcagctcatga

SEQ ID NO: 45963 - DNA, 345 bp, Acinetobacter baumannii
atgagcgagcaaaagataattgacctgatcaaagctagccaagccgtcattaaaaatgagcttttaccgcaatcgggcagtcagaaatataacttgttaatgctcatgagaagcttagaaattttgcaggcttatattttgcaaaaagatacctgtacattgcatcgttcaggcattttacaagattatttttcatttccaattaaagatattgatgaggcaactcaattgtttattagcgatatccgtgaaggtaaacaatcggatcaaacttttgagacattaaaagccctgaatttggaagaattaaaaattactgaaccgaaggtggccaatcatggataa

SEQ ID NO: 45964 - DNA, 990 bp, Acinetobacter baumannii
atgaatgcgaatcatatactgcaattgagcggaatattgcagcagaatctagggctaatccctcatgaaattcagttaaaaaaaatgagtggcggagctatccaagaaaattggctagttcaatctgaagattttgcattagtactgcgtaaaaatgctgaatctagtgtagaggctagttcagatcgggagcaggaatttttacttttagatcggttatatcactttggcattaaagtgccagagccactttatttcgagaagtcacctaactttttaaacagtgatttcttcattatgaaaaaaattgatggtgttacagaaggccataaattagttcgaattacagaagaagaaaaacgtaaaaagattactcaagacattggtaggcaacttgctttaattcatgccattcaatcagatgaagtattagagaaactacttcctaagccagataaagatcaatatttagaaaaaaagcttacagtttttctagaacaactggatcacttaaaaagacaacgtccaatccttgagtacgctattcaatggatgtttaacaatcttccaaaagtcgatgatttggtcttagtccatggtgattaccgcattggtaacatcatgattaatggcgatcaaatttcaggaattttagattgggaatttacgcaatggggagatcgaagagaagacttaggatggtttacctctaaatgttggcgttttggtcaagatgaaaatatagctgggggaataggttcatataaggactttgcgaaagcttacgctgagatttccgatatttatatccctgaatttgaaatgaagttttggcatgtcctgtctcatgttcgatgggcaattattgcgatgcagcagtctgaccgaaacaatgaaatggatactccatcactcgaattagccctaacggaatttttagttccccgccttgaaaaaaatatcttggaaatattgggagaaaaagaatga

SEQ ID NO: 45965 - DNA, 705 bp, Acinetobacter baumannii
gtggttttaggctgtggtcagttctgtaccaatccgggtttaatcttgggaattaaatcagctgaatttagtcagctcattaacaacctgaccgacattatgggggctaagcctgcgcagactatgctcaatgccggcaccttaaaaagttacaccgctggtcttgagcacttgacccagcatcaaggcattaagcatttggctggcaatactcaacaaggtaatcaggcgcagccacaactgcttaaagctgatgttgagcttttactggcgggtgaccagcttttacaagaagaaatctttgggccaaccacagtcgtcattgaagttgaagataaagcccaactcattcaggcactacaaagtatgaatgggcaattgactgcgactttaattgccgatgaagctgacttaaccgagtttgcagatgtagttccagttttagaggaaaaagccggtcgattacttataaatggctacccaactggtgttgaggtctgtgatgccatggttcatggtgggccatacccagccacttcagatgcacgaggtacttcagttggaaccttggccattgaccgttacttgcgccctgtgtgttaccagaactatccacagagtctattgccggaagccttaaaagacagcaacccgttgcagattttaagattggtcaatggtgagatgaccagagaagcgatctaa

SEQ ID NO: 45966 - DNA, 1086 bp, Acinetobacter baumannii
atgacttcttcttatcatcaacaacttcaagctaaaattgatcgcattactactcaattttctgaatttacaccgcctacattagaagtgtttgaatcgcctgaacaacatttccgtatgcgtgctgaatttcgcatctggcatacagaaaatgatatgttttatgccatgtttgaacgtaatgacgatggcaagcaaaaaaccgttgtacgcatagatgagtttcctattgcagataaaagcattaatgacttaatgccacttcttttagcagaacttaaagccaactctttactttctcagcgtttatttgaagttgactttctcgcaactctaagcggagaaatgttagttaccttgatttatcaccgcaagcttaatcaggaatgggaacaagaagctaaagcacttgctgaaaaattaaatattaaaattatgggtcgtagccgaggccagaaaattgttattggtgatgactttgtggtagaagaatttgaacttttaaaccgttcatttaaatacaaacaaatcgaaagtagctttacgcagcctaatgcacaagtttgcaaaaaaatgctgcaatgggcatgtgatgcagctgaaggatcaaaaaaacacctgttagaactttattgtggtaatggtaatttcacacttccactctctttaaaatttgaaagagtgcttgcaactgaacttgcaaaatcatcagtttatgcggcgcagtggaatatcgaacagaaccaaattgataatattcaagtagctcgcctctcggctgaagagttcactcaagcctatcaaggtgaacgtgaattccgccgtctacaagaagcagatattgatattcaaagctacgacttcgatacagtattcgttgatcctccacgcgcaggaattgacgatgaaactttaaaactattgcagagctttgaacgtattatctacatttcatgcaaccccaacactttatatgaaaatttaaaaacgctcactcaaactcatcgcgttactaagtttgctttatttgatcagttcccttatacgcatcatgtagagtctggtgtcttacttgagaagatttaa

SEQ ID NO: 45967 - DNA, 756 bp, Acinetobacter baumannii
atgaaaaaatatttaatcagtattgaatctacgaatagtgaacgtttaaaaaagttgttctctcaagcaacattttataaatatcgagatgaatttaaacaatttggggtaattgggaaaaatttaagtgttagtgagtattttcaacaaggggtagcaggcaagaagaaaccgatgacgcctggtgaactaggctgtgccatgtctcatattgctgcattaaaagattttttaagctctgatgaagaatatgccattatttttgaagatgatgtaatcgaacgttttgaaattgattttcaagatttagaaaaactcattcgttctttgaattttggtccttgctttttcctaagcttgggcggtattcaaatgaaaatatgtaatcgggttcgaggaaaacttttacctgaagaattgtataaccaaaaaattcttaaagtggattacgattatcttgaaaaacttgcttatgcttatgcatatgttgtagatcgtaaaatggcacagatgttggtcgactatcatcaaccgataaaaatttacgaccattggcaagaccttgtagggcgtggtgaatttagtttttatgtcagtttcttattcgatcatcccattattgagaacaatgatgctttaagctatttggagaaggaaagaagcttagtcggttcgcattctcaagacgatagtgattttttgcgataccttagagttaaattaaagaaatatatacttaataaatatataatttag

SEQ ID NO: 45968 - DNA, 1029 bp, Acinetobacter baumannii
atgaaaatattgcatattgcaaattttggctttaataaacaaggcgcacatttttactgcacagaccgtaaaatttctgccggattaattgaaaatggccatttcgtttatgattttagtttccgtgacatggctcgaatgggaacaatctttaaaaccaaaaaattaggggcaaagtgggccaataaagaagtactcaaagttgttaataatattgaacctgatttggtattgattggtcatagcgatttgatgagtccagatgttttaagacagattaaagagtcttaccccaatactaaaattgcattttggtatgttgatccgctttatcttgaaaacaaactcgactttgtcaaagcattttcaccttatctagatgctattttctgcacaacaggtggagaatatctccaaaagttaaaacagcctcatttaagtgtggcttatatgccgaatgttggtcatcgcaatgtagaaacactacagcaattttcaaactcaaaaactgacaaaacttttattttctgcggtgttgtttataaagagcctgagcgcgagaaattcttaaaagatttagcagaggctttgcaacaaggccatgtaaattatcaatattatggttgttttgaacagccaggtgtatatggtaaggcttattataaggttctgtctgaaacaaaaatggggctcaattactcacgccgtaatgatgtaaccttatatagctctgatcgtattgttcagctgactggtaatggtttacttacctttagcccaagaattccaggctttgagaaactctatactgagcaggaagtggtttactttgatgatcagtttgacttggccaaaaagatccaattctttgatcaaaacccagagcaagctgtaaaagtagcgaaagagggctgggagaaaacacgtaaatctttcaatgctaaacgcatcacccaatttatggttgaggtgacgtttaaacagcccctttcagaagattatgaatggtcacatgaggtttatgcatga

SEQ ID NO: 45969 - DNA, 552 bp, Acinetobacter baumannii
atgaaaaattatttaatagggttagttattactttgggtattagtggatgtgtatctataccgtccatagacttttcgcagcaaaaagttgaaaggtttaatccagttaaaaattggattagtgttgataccgctccagtcaaggatatgccaaatggcaaagaaatctttaaattgaaagggggaagtgaagtttatgtattctggtaccaagatgaatgggcgttattaaatccaaatatggatagacaacaatggattgatactaaatatttgtgcagttttgctggttgttatactccaccagtcacctatagatattcaaaagggagttttgataacaggcagcctgtttactcaactcctcaaagagaatcaaaaggctataataatactagaactagaagttctgctactacacggactccaagaagttatagtaaaacgactaataactcttgttactgcacatctggaacttattgtgttgggcctagaggtggacattactgccttaatagcacaggttcaaaaagatatcttccacgataa

SEQ ID NO: 45970 - DNA, 234 bp, Acinetobacter baumannii
atggaacaccaaacacttttagacgaattaaattcgcagattgaatattactcaaaaagaactgactgcccaccaactagaattcgtattgggtataaaacctattacgaattaatgcagaatcctaaatttgccgatgaagtatcaaactccgctttagatccaaacaaacgcaaatacaaaaaattaaaaataaaagttactaaggatgacaatcaacttgaacttgaatga

SEQ ID NO: 45971 - DNA, 345 bp, Acinetobacter baumannii
atgaatgagaatgtagagctaataaattacattgatgtagctgagacagtttacgaacgggtatatgaaaataataaaatttcaaataatttgattgttaatctaaatcgcattatggctgagataaagaatcaagctgcagaaaaaagactcaaattgaagtacagctcaatagactttgaacattgtttaagtttgcctttagctgatcgcaagataaaagtagatttaagtcttatacctcattttgaagatcgtgaagaaagtattttgtggttaactaactttattggaaaaatttgtgagcccagaaagatgcaaagacagaaaaaaaaacttcattaa

SEQ ID NO: 45972 - DNA, 237 bp, Acinetobacter baumannii
atgacaattatcacattgctcgatgttaagacgaagaagaaagtgatagttcggtccgtaatagacccaatagcaagaatagacaaaaaagggaatatacaaattattcaaattcataaatggctatatgatgaatctggagatttcgttgatgaagacttatatgaggcactcaacaatggagaagttggaatatacttaactttgcagtatatgatcattgatattgaaaattaa

SEQ ID NO: 45973 - DNA, 468 bp, Acinetobacter baumannii
atggattctacagaatacttttggcttactcggaaaaaagaacctaaaaccaagcctaaatccagaccgctacctaaagctactcaaaagtacttagaggcagaggaagaatttactgaagctttagacaatctggaaattaagtacgaaaagaaattccagtttaagtctactaagcattggcgttttgattttcatttaattgaacatcacatattagttgaaattgctggtggcccttggtctggtggtcgaaagggtaagctaaaaaacaaagcttggagtcttgatcgttacgatgtggctgaagagatgggttacacagtaattcgcatagaggcagcaccaagatttaagattaatgaatctggtccattacagatccaagctcatttcgctagccaatggcttaaaaatttaaagaggcaaatatttaatggatcagatcagaccatttccaccgactga

SEQ ID NO: 45974 - DNA, 642 bp, Acinetobacter baumannii
atggatcagatcagaccatttccaccgactgattttattgatcaagcagatgaagaagaagcaataagactaacaccagcaccagatctaaaaaaatgggttgttgctaattacttaactattggtggccctttgcataaccctgaccatgaccatattgctgaactaatacatgacaatgaggagttcttggcttttgcttgggcatcatcggcttgtatggctaaaaagcgtatggttttaggccaatgtgaaaaagttatgtttaatcagggcgggtggaaaaaagctcgtcaagagcagcaaatgcgcgattggtttggctatgtgcctgtgtacctcatcacaattgatgcaagttattgcgatcaggcgactgatcgtgatttctgtgcattgatagagcatgagctttatcacataggtgttgaacgtgatgaggatggtgatccgttaatcagtgaaatgactggtttgcctaaacactatttagcaggccatgatgttgaagaatttgttggcgtagttaaaagatggggagcggacgaaagcgtgaagcgactaattgaagtggcgaagcaagcgccgtttgtatcagatgtgaatatttcaaagtgctgcgggacatgtttaataagttga

SEQ ID NO: 45975 - DNA, 558 bp, Acinetobacter baumannii
atggcgacattaaacaagaagcagaaactctttattgtacaatcgcttgctgtatttaataccccccaagaaacagtaagtctcgtcaaggaagaatttgacattgatgtttcgagacagcaggtagagtcttatgaccctacaaagtttgcaggtagagacttaagtaaggagctcaaagaattttttgaaaaaactcgggaagagtatttgagtcagccactaaataaaattagtggagcaaatgacattgttcagttgaagattttaagtgatttactttgggctaaaaaaaacaatgtgaccatgacaattaagatcgtggaccaaatacaaaagatcatgaaagggttttatgacaagaagggggaacaaaataataaaggtggtaatcctgaagcgaaccaaaccaaagctgaagtagaacttgagattaaaaagcttgaacttcagaagttacagcgtgaagtgaatccccctgagtatcgtccacctgaagaggattacaagcttgtgctgaatcctgatgaggagataccaaatgagccaattctttaa

SEQ ID NO: 45976 - DNA, 1317 bp, Acinetobacter baumannii
atgagccaattctttaatcctccagaaggttcagttcaattaactcctaagcaagccaatatttatttatggggctggcaaaaagaagcccggtttcgtgatgccgtttgtggccgacgtttcggtaaaacattcttggccaaagcggaaatgcgaagagccgcaagactagcggctaaatggaatgtttctgttgaggatgagatctggtatgccgcgcctacatttaagcaagctaaacgggttttctggaagcgattaaaacaggcaattccggcatcttggcgagctggaaagccgaatgaaactgaatgttcaattaccttaagaagtgggcatatcatccgtgttgtaggtctagataattatgatgaccttcgtggatctggtttatttttcttaattattgatgaatgggctgactgtaaatgggctgcatgggaagaagtacttcgcccgatgctttctacttgtaagtatatggtgaatggcgagcagcgagtcggtggccatgttttacgtattggcacacctaaaggctttaaccattgttatgacacattcatggatggtcagcccggtcatgaaccagattgtaaaagcttttcctatacatcccttcagggtggaaatattcctgagtctgaaatcattgttgctaagcgcaaaatggatcctaagacttttagtcaggaatatgaagcaagctttgagagctatcagggcgttatctactactgttttaaccggttgctgaacgcatcaactgaaacagttaagccaaatgatgtgcttcatattgggatggactttaacgttaccaagatggctgctgttgtgtatatacgccgtggtgaacatatgcatgcggtcgatgagttcgtaaatctgttcgatactccggcaatgattgaggctatccaagaacgatatcctgaccatgaggttgcagtttatcccgatgcttctggtgagaaccggaagtcgagcaatgctagtgaaacggatctggcgttacttagaaaggctggttttaaagtccatgtgaacagtagaaacccagcagttaaagatcgtattaactctatgaacggtatgctctgcaatacattgtctgagcgcagattgtttgtgaatgttgataaatgtcctcactttgctaaatgcttagagcgacaaatctatgatgattatgggcaaccggataaaactgccgggtttgaccatatgaatgatgctggtacatatccaatcgcttatttattcccgatcgacaaaaaatccgttggagttcgtaggattcgagggatgtcttaa

SEQ ID NO: 45977 - DNA, 1347 bp, Acinetobacter baumannii
atggcagttactgataaacatccgcagtatattgctgcacaaaaaagctggttgattatgcgtgacgccgttgctggtgaagagcagatcaaacaggcacatacaaagtacctagctaaatcggccggaatgattgaggctgaaaagcaaggtgatacgactggagagatttataaggcctatctaagtcgagctcagtatccgctatgggttcaggacgcattacgcacaatgatcgggttagtttcaaagcttgagccgaatatagtgattgaaagttctctacttaaaggattgatagagaatgcaacaaatgacggttttgggcttaaacagctctttattcgcatttgttcagagttgctagagtttgggcgctgtggtctgcttgtcgatgttgatgctaacggagtgccatatttcgccttatatgatgcgttatctattatcaactggaaggaaaacagtatcggtggtcgtaaagatctaaaactgttagtgctcgaggagcaatttgataatagtgaagatgaattcgggcacgaaactaaaacggttcaccgcgttctatctatggatgatggagcattagcggtccgattgttcgatggttcaaatgtggaggataaaactcccgatctcggcggtaatcaactttctttcacaccatttgttttctgcggtgccactagtaattctccggatgtaggtaccataccgcttttgacaatggccaaggctgctctgaagtattaccagctcagtgcagattattaccagtctcttcaccatacggcccatccgcaaccttggattagtggccttgatgatgacgatgatgatgatattagcgttactggtgttatggctgtctggagtcttcctctaaattcacaatgtggttatttggaaatttcaggtaacggcattgaactcactaaaaaggaaatggatgcgcaaaagaattcagcattagaagctggggctaaagtagttgataccaatacacaagaatcaggtgaggcacgccgtgcacgtcaggatgaccagcaggcaagtcttcacagtatcgtgatgtgtgcagctgcagcaattgaacaagccattaagtatgcagcgcagtggttaaagctggattcgacaaaatattcatttacggttgaacctgagtttattgtgcaggtcacggatattaatcttgcaaaacagctttatgagggtgctatttcagggaaaaactctttccgcacatattgggaatacctaatgacaggtaaattaccagctcacgactatcaggaagaagtgaagcgggtagaaatagagcgagataacactcctttgtag

SEQ ID NO: 45978 - DNA, 192 bp, Acinetobacter baumannii
atgccaagccctattatccaatatttccaatatgaacatttacctgaacatttgcagcaagttagtaagccaattggtgatttagctcggcaaatggatgagcaacttcctgacgggcctgaaaaatccacaggattaagaaagctacttgaagcaaaagatgcatttgtacgccaagctttaagtaaataa

SEQ ID NO: 45979 - DNA, 1329 bp, Acinetobacter baumannii
atgaaagggatgaagccatttaatacccggtttttaacacttcgacacgccttgtatttaggcgtgttgttggtgtcgaatacacatgccatgactttagatgaggctttgtcagctagtttaaggcatgaaagccagcttgaagtgagccgtttaaatgtgaaccagtccaccgctatgcttgaacaggccaagcaacgtgatggactcaaagtcaatttagtcgggcaacttgactatgaaagaataaatacgccttcacacgtcttgtttccaaccgaaggaaaccgtaaagggcgaagtttgcaattgcaggccgattatccgatttatacctctgggcggcaccgtttagggatagatattgccgaaagtcagctttctgcccaacaccaaggcttatcagatcaaagatcggaaaccattttaaataccgtgatggtctataccgacgtattaaaaaagaaagccattttagaactcagacaaaagactatggcaaatctgcaacggtctttatatgaatcaaagcgccgttttgatgtcggtatgattacccgtgcagacttggctcaggttttagctcaagtcgcacaaggtcaagccgatattacacaggcgcaatctaacttaaccgtaagcgaagcacagttttatcaagtgacaggtataacgcctgacaaccttgttccaatcaatcaattacccactattcccgctaacctagatgaaatattggctcaaaccaagaaccatccggctttaatgcgggctaaatatgaaaagcaagccgccgagaaacaatacgctttaactaaacgcgaactctggccaacggtcatgctgaccagccgtgccggaaagcaagatgaagcgagctatattggctctgaaagtaataactatatggttggggtacagctcaatgtaccgctttatgacgatggtttaaatcgggccaatgttaaaaaagcacaggctgatatcgatttggctgcgcaaaaaattcgaagtcttgagctggacttgaataagcgtacccgtaccacctatgcgcagcttcaaaccattcgacaaaataaagacgcattggcaaatgccatagaggcagcgtctattgcttttgtctatacccgtaaagagttcgatgtcggcaccaaaaccacgtttgatttgctcaataccgagcaaaagctactcgatgcccaaacccaaaaaaccgtaaatgaccaagacgaagtggtgtttgtctatcagctactcgaccaaatgggacgtttaagcaatttggttcctatgcagaccgcacaacaggtgaataatgaataa

SEQ ID NO: 45980 - DNA, 1524 bp, Acinetobacter baumannii
atgcgagctacatcaggagtctttaaaggacttaatccgacagtgactgtcgcttctaaaatattagttatctcttttgttttattctgtgtcttacaagcggaacaagcaggtaaagcctttgaaatggtttctggcattttacttcaaaatgttaaatggttttaccttggtttattaacagctattttaggttttttattttatttaatgataggtcgtttcgctcacatacggcttggaaaagataatgaaaaaccagagtttacctttactggctggatttctatgttgttttcaggtggcatgggggtcggactagtattttggtcggcagctgaacctatgtggcactacgctagcaacccttttacaccagggttaagtgatgagtccgctagtatggctatgcaactgacttttttccattggggtttgcatccatgggctatattttgtatcaccgctttagctcttgcttatttctcttatcgtaaaggtcttccatttagtttacgctcaattttatatccaattatcggaaaccgcatttacggacctattggccatacagttgatattttaacaattgttattacagcttttggggttgctcaatcccttagcatgagcgtacttcaaattaattctggacttaatcaagtttttggttttgagaatagtttaagcttacaatttatcatgctgactattttatgtggaatagcaactatttcagtagtcatgggtattaatagaggaatgcaaagactatctgagcttaatatgattttagctattctattgatagctattttacttattattggacctactcgttatttatttaataccttatttgaggctacaggtaactatacacaaaatcttataagcatgagcttatggagtgatgctcaaaaagattctggctggcaaaattggtggacagctttctactggccatggtggatgacatgggggccttttgtaggtatgtttattgctcgtatttctcgtggacgtaccattcgagaacttattgcaggcgtacttattgttcctacacttgtaacagctatatggatgtctgtagtaggaggatcagctctaaaagtagaacaagatgctcgtcatgcttatgaaaaacatgctgctgctttagttaaagctggtgagccagctccagaaccatttacaggtgggccaatagtaaaagcgactcaagctgataatactcgtgcgctttttacaatgtttgataatattgatagtggtacactcggtaaagctcttagtatcattacctgcttattactggcgacattccttattacatcaaccgattgtggtacacatgtattatgttatatggacgcagaaggagctacggaaacaccaattaaaattcggatcgtctggggctcacttattgccattctggctggcgtattactttatgctgggggtttaaaagctgtctcttatacacatctgacgctgccgacgagcgatctagtgtag

SEQ ID NO: 45981 - DNA, 1191 bp, Acinetobacter baumannii
atgaatagtcgagttagccagcaattaattacggttcagcaagtcgataatgttttgaaccctattactgaatcaaatggtatgccaaatttagcatataccagtaatgaatattttaattttgaacgtgacaatattttaagtaaaacttgggtatgtgttggttttgcttcagatttacctaaaaagagctatgtgaagcctgttaattttatgggcatgccattggtaatgatgcgcaacaaagaaggggaactacatgttttccataatgtttgtagccatcgcggtatgattctagtgcaacaagaaggcactattgagggtgtgattcgttgccagtaccactcttggagttacgacttaaacggtaacttaaaaggtactccacatgttggtggaattaaccagcataaagatgagcgttttaaatgtgaaaagcatggcttaaaagctctccgttcagcagtttggatggatatggttttcgtaaatatttctggtgatgctcctacttttgaagagcatattgcgccactagttgaacgttggaagccattcttgggcgaaaacgggttagagcttattcgtagcagtaaagtaggttcaacttttgagttacctgtaaaaagtaactggaaacttacagttgaaaactattgcgaagcttatcacttgccatgggtacatccagcattaaatacgtattcaaaacttgaagatcattacaacattatgttcgaagatcgctttgctggtcagggcagttataaatataacttgtcagctactgcgggtacgcatttaccaaaattcccaagctggccagaagatcaattgcgtcatgcggaatatgtagctgtgttcccgaacgtattgttaggtattcaagctgatcatgcatttgcaatgatgattgatccaattgctccagaacaaacaattgaaaaattacgcctctattacgttggtgatgagtcacttgaccctaaatatgatgcatgccgtgaagcaactttagaatcatggaaagtcgtatttgctgaagatgtgtttgcagtagaaaccatgcaaaaaggtcgtcattcacctggctttggtggtggagttttctctccagagatggatttaccgactcacttcttccaaaaatggttggcgactcaagctaaaaaagctttggaggcataa

SEQ ID NO: 45982 - DNA, 1431 bp, Acinetobacter baumannii
atgcaacactacctcaactacgttgatggccaatggcgagatgcttctcgccaattggaagttatcaatccagcaactgacaaagcttttgcgacagtggctcgtgcaagtattgaagatgcagatgctgcaatggctgcagcacgtcgatgtgtgaatagcggagctttaacagatgtgcgtcctgcgaagcgcactgcatggatgttaaaagctgcagaagcgattcgtgaaattgctgaagagggtgcattaatcctatgtcgtgaaaatggcaaaaatattgatactgcacgtgaagagttcgatgaagccgctcgctattttgaatactacgcaggtatggcagataaagttgaaggtatctcggtacctttaggtaaagattatgtcgacttcacctcatatattccaatgggtgtatcggttcaaatcgtaccttggaactttcctgtttcgatctgtgcacgttcattagcacctgctttagcggctggtaatgcggttgtaattaagtcacctgaagtttcacctttaggaatggttttactcatcaaagctattgagaaagctggttttccccaaggtgcagtgaacttactttgtggtaaaggttcagaagttggtactcatcttgttaagcatcaagatacgaatcaaatcgtatttaccggttcagtaccaacaggacaacgcattttgaaagatgcggctgaacgtgcaacaccttcagttatggagttaggtggtaagtcagctgcaattgcttttgctgatgttgatcttgagcaattactgcgtagcgttaaattaggaattttctataactctggccaagtttgctcagcgatgtctcgcttattagtgcaccgcagtcgctatgaagaagttaaagcagctgttgtgaatcttgctgagagcctaactgtaggtattggcgaaagtaatgccgaacttactccagttgtatctaaagatcagcaacaacaaattcttgccatgattgataaggcacgtgaagaaggtgccaatgttttaacaggcgggaaagcagcagatttagaaggttactttgtactacctactattatcgaagcaacagccgatatgtctattgctcaagaagaagtttttggacctgtaatggtgatcatgccattcgatgacgaagaccaggccgttgcaatcgcaaatggtacggactttggacttgttgcaggtgtatttggtgaaaatctgaatcaaacacttcgagtagcaaaccgacttattgctggccaagtctttattaacgaatggtttgctggtggtattgaaacaccatttggtggtgtgggcttatctggttttggtcgcgaaaaagggcaggaagccatctacagttatgttcaaactcgcaatatcggtatccgtttgaaacatagcgtgtaa

SEQ ID NO: 45983 - DNA, 1356 bp, Acinetobacter baumannii
atgagaaagtggttatgtattgtctgtggctggatctatgatgaagctaaaggctggcctgctgatgggatagcaccagggacaaaatgggaagacatcccagatgactggatgtgtccagagtgtcaggtgggtaaagctgatttcgaaatgcttgatatcacagatattgaagaggacgaaatccctcaagtagcagccgctgcagttattgaaccagttgttattattggtagtggccatgctggctatcatgtagcttcgaatttacgtgcacaatctccagacttgtctattaccgtatttactgctgatgatggcgccttatatagcaaaccagctttatctaatgcactagcattaggtaaagacggagatagtctagttcgtgaatctgctcttagttgggagcaacgtttaaatatccgtgtttatccacatacgaaagtgactcatattgaccgcgccaataaaaagcttcaaaccactattggtgattactcttatgggaaattggtgatagcaactggtgcaacgccaattgttatacctattgaaggtgattcgtctgcaacattaagcgtaaatgatctggcagattaccgtcgtttccgtcagcaattggcagataaaaaacatgtcaccattcttggtgatggtctaatcggctgtgaatttgctaatgatttagctgcacatgggattaaagttactgtcgtcggacttggtaaatgggcaatggaacgtcttattccagaacctttaggtcatgctctacaaaatgcgcttagccagttaggagtagagtggaaattacaaaatagtatccgctctattcaatctgcaaatggttgttatcagttaacactacaagatggccaaataattgaaactgatttggtattaagtgcagtaggtttaagaccaaatattgctcttgctcaagaagcaggtctagagacagcacgtggtatctgtactggtctggatcatcgtagtagtgatccttcaatttttgctttaggtgactgtgcagaagtgaacggacaatgggcaccatatatcaatccaatcactcaagcactacctgctttagttaataatcttttaggtcaatcaactgacgcagatctgaaagcgaccccagttttagtaaaaaccccaattttgccactttctgtattgccagcaatggaaacaggtgagtggagagtggaagagcacgatggggagttggcggctggtttttacaatgagcaagataaattaataggctttgccttactcggtcgtcaattacaacaccatcgtactgaatggcttgagaaattaaattcgtgcccatccacagtttaa

SEQ ID NO: 45984 - DNA, 1317 bp, Acinetobacter baumannii
atgattgctttaccaaatgatgataatacttgtgggtggtatgcagcattgcctccagccggtcctgctaaaaagttaataggtctacaaaaagctgactatgccattattggagcaggctttgcaggattggcagcagctcgaagattagctgaactcaaaccgcatgcccgtattattctagttgatgcacaacgtgtagctgaaggtgcttctggtcgtaactcagggtttgtaattgatttaccacataagtttgcattatcgcatcctgacccttctcataagcaaaagttattaagtctgaatcgttcagcaattgctcagttacaaggcctagtagagcgctataacattgattgtcaatggtctgcagctggtaaatatcaaggtgctgtaggtgagcgtggcgaagcacatctcaatcattttgagcatctaatgaaagatttaggtgaaccatatcgttgggttgaaaaagcagaacttaaaaaagttttaggtacagatttttatagtcgtgcgatttttactcctggttcatatttgatgcaaccagcagctttagtgcgtggtatgggtgaccacttaccagacaatgtggagttattagagcaatcaccaattcgtagtttgcaaaaaagtaataaccaatggctattacagggtgaccatgggtcaatcacaacaccgaaagtattgctggcaactagtatttttactcgtgaatttggttatttgaagaaccgtttattaccagttatgacctttgcgagctggacgcgtccattaactgaccaagagatgaaagtttatcagggtgagttagattgggggcttactccagctgatcatgctgggacaacgttaagaatgacagctgatcgccgtattctaatccgtaacacttataagcatgtcccaaaatacggtgcaaatgtaagtgatgataatcgtcgttggatacaagaagatcatcgcaaggcatttttagctcgttatccgaatttagctaatgttccatttacccatacatggggtggtgtttatgcgatttctcgtaatttcactaacttctttggggagttagaagaaggcgtttatgcgagtgcttgcgacaatggtgtaggagcagcatggggcacaatttcaggaacgttattggctgatctcgttgttggctcagattcccaagctttaaaagatattcagtatgtaactggtatgcctagtttaaatccaccagaaccgttcttaggtttaggtgttagaacacgtatcagatttgaaaaatggcgcagtcgtagtgaattgtaa

SEQ ID NO: 45985 - DNA, 354 bp, Acinetobacter baumannii
atgaaagaagtaaagttagttgatagcgctcaacttaatttcaatttacgtggcgaaacaccagatggtacggcttatgttgcaagagcattaggagctgatgtttccccaaatatgggtattggttttgcacgttgggaaggggcagaggtaagttggaaattactttatgacgaagtcatttttgtaattgaaggctgttttgagcttactgctaacggtcaaaaatatgaagttcgtccaggacaaatgttgtggattcctgaaggaaccgagctaatttatggtggacatgcggtatttggttacgtagtacatccaggtaactggaaagagctgcacggaattgcataa

SEQ ID NO: 45986 - DNA, 1173 bp, Acinetobacter baumannii
atgagcaaggtctatttaacacttggatttgggttaatttcagttggaatggcgttacctgcttttgccggagtaacttttggagatcctaaaagtgatacgggtgctttaacaatttcaggtgctttacgtgggaattatcaagataaggattacggcgagtctgcatcagatcagaaaataaaatttgatgcagctattttaaggctaggttatgagtcacccgactggtttggaaaagtcgaatatcgttgttatcaatacgataaattctgtgatttctcgactctagtttatggctatgctggctaccatttaaacgcgacagatcatattactgtaggtgtgcaacccattcctttcggtccaggtcgtttttgggatagcagcttttatgctggtattaacaacacaatgggtttgcaagatgcttccaatttaggtgcgaactatcactttgaattaccgtctgctactaaagtagatttggcttattttgcaactgatggtggtaactaccacggaagtagtaaagactcagcacgttatacggctaatgttgttacctcatctgatccactcaaaacaaacctgaatgaaaaaaacatgtggatggcacgtgtcgatcaagatcttaagtttttaagtacagatgatctcaaagtatcggtggggggaagttattggtattcagacattgagaataaaaaaacttctgcagatggtacgagaaatacatgggcgctatttaaccgtattaactataaaaatctgaatgtcgtgcttactggagggcgacaatcgattagtaataaagatgcattaagtccagctagctcaactttcggttcttttgatggcgaatatgacattgcgaacaaaggatatttctatactgttgatacgagctatgtttttaagaatgttaaagattcgctcaatgttacgccgtatgttgtttttagtggttttaacaagaaagaaaatggatttgatgactctcagcgcaacattgttggagtggcgtgggactataaaaatatttctttatataccgaatatgtgatgagtaaaaacgatccgtttgttggcggcaatggtagttctcttgcagcaggtgatgatgggaagtggaacaaactcctcaatctaatgttgatttatagcttctaa

SEQ ID NO: 45987 - DNA, 615 bp, Acinetobacter baumannii
atgtcttcaccatttattagtacatttattttatttttctcattacttaatccattcctcatgagtatctatatgattgggctaatccgtcatacagaaaccagagtatttaataaggctttgattcaaggaagcctcattgcatatgtggtatttcttttatttgcatggggtggtgaagcaatttttaatcggtacttaaatgtaaggtttgaatcatttctaatttttggtggcctgatttttctggtgattggatatcgctatgtatttcagggtgccgatactattggagaaatgcgaggagcacctgaacatttggctggcacagtagctatgccatttatgattggtcctggaacaattagtgcagctgtagttacaggcatgagtatgtctcttttagaggcggctatagtgatcgccttagtactatttgtgagctgtagtgttttgatagcaatgaaattttctcatgatcacttacgttatagccatgccaaatatattgatcgttattttgatattgtagggaggttagctgctttattaattggaacaatcgcagtcgacatgattgtaaatggtgttacacgtttgattgataaagtttga

SEQ ID NO: 45988 - DNA, 513 bp, Acinetobacter baumannii
atgagccgccaaatctcaactttaatcggtgtttcagctttattactttggtccactttagttggcttactcaggctttctacagaaagttttggtcctatctatacagtgacttatgtatataccatcagtgctattattttatttttaacatatggcctgcccgatttaaaaaaggtttcaaagaagtttcttattttatctagcttgctttttgttgtttttgaattgtgttttgccttttcaattactctagcaaattcatcagaaaaatcgattgagatgaatattatttttaatatgtggccaactttaattattattatgttggcagtattaaaagaagaaaaagtaaacttattgaccatattaggagtgatcgtaagttttgcagggatagttgttatcaactatcatccaaatctaaactttattgataacttttcaaaaaatccgattagttacttgctcatttttttagctgctattctttgggccgtttattgtatttaa

SEQ ID NO: 45989 - DNA, 1284 bp, Acinetobacter baumannii
atgcctttttcagcaaaccgaaactttgctaaagacccacgtatgattgtgggtgccaaagggtcttatctgattgatgattctggccgtgaaatattcgattcactttcaggcttatggacgtgtggtgcaggtcataccttgcccgaaattcaacaagcggtgagcgctcagttaggtcagctcgattactcaccggctttccaatttggtcatccgctttcttttaagctggcagataaaattgttcagcatatgcctgaaaaactacaacacgttttctttaccaactcaggttcggagtcggcagatacgtctataaaaatggcacgcgcctattggcgcattaaaggcaaaccaagtaaaaccaaattgattggtcgtgcccgtggctaccatggcgtaaacgttgcgggaacaagtctaggtgggattggcggcaaccgtaaaatgtttggtcagcttatggatgttgaccatttaccacatactttacagccgaatttaacttttaccaaaggctgtgcagaaacaggcggggtagaacttgccaatgaaatgcttaaattaattgagctacatgatgcttcaaatattgcagccgtcattgtggagcctatttccggttcggcaggttgtattgtaccgccaacaggctatttacaacgtttacgagagatctgtgatcagcatgacatcttgttaatttttgatgaggtgattacaggttttggtcgtttaggaacatggactgcggcggaatatttcggagttacgccagatattttgaactttgcgaaacaagtcaccaacggtgccattcctttaggtggtgtggtggcaagccatgaaatttactctgcgtttatgcagcaagacttaccagaacacgccattgaatttacccacggctatacctattcggcacatccggttgcttgtgctgccgctttagctgcgcttgaaattttagagaagaaaaacctgctggctcaatcggcagcgttggcaccaagttttgaaaaaatgctgcatggtttaaaaggcgcaccgcacattttagacattcgcaactgtggcttgattggtgctttgcagttagctccgcgtgatggtgatgccaccatccgaggctttgagcttggtatgaaactctggaaagaaggtttctatgttcgctttggtggcgacacgcttcagttcggtccaatgtttaacagtacagaagcagatattgaccgcttaatgaatgctgtgggcgatgcactttatcaagtgaattaa

SEQ ID NO: 45990 - DNA, 1911 bp, Acinetobacter baumannii
atgaatgcacttcagcccgtttatcaagtaatggaccaaggaatcttacaggattttatcaatagccttctggttgaaacgattattcctgaacagtttatttttgattttgcgactgcccaaactgcgctaaatcaacatggcaaaaatcttcaagaagtatttaaaaacacgtctgaacaattttcttttgtgctattacacgaagagagtcggcaaggcttggtcatgtttgcggtacaaaaaggtattactcaagcctggaagtttgctaatgaaacagaagtttttctattggaacgcacaaatgatcatgttcagatcaatgtgattgggataatagaactttttgagtttattcaagcgataggtctttttaatcagtgtagcactgataaagttcaagccttttatgagcagctgcaaaaatgtttaaagcaatatcatttattacaacaacatcgggtaaatgcacatgatttattgaatcaaagcttggcacatagattccgcattttagagcaatatgcaggttatcgggaccgcccatatcatcctttagccaaattaaaagaaggtctcagtcagcaagagtatatgcaatattgtccggaatttgctcaagaattatctattcattgggtggctgtacataaggataaaatgatgtttggtgaaggggtagaaaatattttcaaacaacagccaagcgaaatttttattcctcgtgctgagcgatatcaattaaaacaggaaatgtttcaacgtgggttaaatgaaacccacattgcaatgccaattcatccttggcaatttgagcatttatttcccaagttctatgcggatgatattgccgacggtgtttgtcatcctttgaattttatctctaaaggaatgtatgccagtgcgtctatgcgtagcctcttatcaaaaaatgttttagaagaaagtctaaaattaccgatagggattaaagctcttggttcattaagatttttgcctattgtgaaaatgattaatggtgaaaaaaatcagaaattattacagcaagccaaggcaaaagatgctgtcttaaaacaaaaattatggctttgtgaagaaacacaatggtggtcatatttacccgagaagcaaaatgatcggacagcagacaatgagtggttatttgtagagaaacctacccatttggcagctcagcgccgtcatattccagctgaattattgcaagaaccttatcaacttataccaatggcaagtcttggacatacaattatgggtgagcctgccatttttgattatattttgcagcttcaacacaaggacataaactccaagcagatacttatcgagtttgagaaactgtgtacatgtttctttgatgtaaatttgcgattattccgcttagggcttatgggtgaaattcatgggcaaaacatatgtcttgtgttgaaaaatggcgaatttgatggattgatgttccgtgatcatgattcattacgtatttatttaccttgggtagagcaaagcggattgaaagatcctaattatttgagtccccatgattttagaaatacgctttatcatgaatcggtagaggctctgttattttatattcaaactttaggtattcaggttaatctagggtgtattgttgataatttagcgagtcattatcaaattgaagttaaggatctatggtctgtacttgctcatgcgttacagcaagttattcaaaatctaaacttccagccagagattttgacccagctccaacatttactatttgaagtgcctgaatggccatataagcagttacttcgacctttgctagaacaagatacacggattggtagtatgccaacgggaattgggaaaacccgaaacccactttggtatgccttaaattgttag

SEQ ID NO: 45991 - DNA, 1842 bp, Acinetobacter baumannii
atgggacaattacatccagttttatcaaatacacatgtgattcaaaatgctttacaggcttggcaacatccaaattcggatcaggcaaaatatgttgagcaacgtgttattaagcaattacttcaagctttaatttttgaagatattattcattcagaatatgatggaaaaaattttattatagaagtacaaaatagtcagcgccaaaccattcgttatgtcgctgcagggcaaagacaatatagttacaaactggtacgccttgcccgtaatcaggatgtatttcgtcaagatgaaaacggtcattatcagattgctactttaaatttagttattgatgaaattcttagaaccataaccgatgcagcaaaagttgaagattttatttttgaattaaaacgaacatttattcatgatttacagtctcaagcatgttttgatcactatgctttgccggcaattcaatatccatatgatattttagaatcatatttaatggatggtcatccatatcatccgtgttacaagtcacgtgtaggttttagtttacaagacaatgtacgctatggtgtggagttcgcccaaccaatcgccttggtctggttggctgtgcatcaggacattgttgcaaaaaaacattcagaagatatagagccagatttattttttaaggagcaattgaattcacaagaccaagagctattcctgcaacatctctcagatcgtgatttgaaggctgatgaatatatttggattccggttcatccttggcaatgggaaaaccatttaatttctatttttgctgaagaaattctaaatggcaaaattgtttatttagggcaaagtcaggatcgctatttagcccaacaatctctacgcactatgactaacttgcagcatccggaaaagccttatatcaaactgtcgatgagtctaactaatacatcaagctcacgtgttctggctaaacatacagtaatgaatgggccaattattacagactggttgcaacgcttaattaaacagagcaaaaccgcccaagagcttgattttgctgtattacgtgaagtgtatggtttaagcgtggattttactaaattgccaaaatcacatgctcaacaggcctatggtacaattggatgtctatggcgtgagagtgtgcatcaatatttacgtgaaggtgaagatgcaataccgttaaatggcgtgagtcatatccaaaaagatgggcaagcattaattgcaccatggttacagcaatatggtgttgaatcatggacacgtcaacttttgaaagttgtgattactcctttgattcatttactttttgcggagggaattgcaactgaatcacatggccaaaatattattcttgtacataaacaaggttggccaacgcgagttcttttaaaggacttccatgatggtgtgcgctatagtccagcacatttagcacaccctgaattggctcctgaactcgatcagttgccgcctgagcatgcaaaaaccaacagtatgtcatttattttgacagatgatttaaatggtattcgtgattttagctgtgcctgtctgttttttgtcgctttaaccgatattgcaatatttttaaatcaaaactttgatcttccagaaaaaaatttctggcaatgggctgcggaagtcatccaaaattaccagcagcaacatccagagcatgcttcacgttaccaattatttgatgtttttgccgaaaaattgcgcattgagtcattaactaaacggcgtttatttggcgatcgtagcatacaaattaaatttgtcgataacccgttagctccttttaaattgcaggtgaagtga

SEQ ID NO: 45992 - DNA, 1440 bp, Acinetobacter baumannii
atggaacgttcttctgtgtccgcggctcaacctcatgagcaaagtttacaacgctacgtacttctgacggttatgcttggtacaggtacggttagtttaaataacagtagtttcaaccctgcaatacctcatttaatgtcctattttcaggtaggtgaggtatgggcaagttgggtagttgttgcctttttattagcaatgagtatcagtttgcctttagctgggttcctaagccagcgttttggtaagcggtcaatttatttaattgccttattgggatttgctttggcttctacagcaggtggtttatttaatcagtttgaatcggtgttgattgctagagctctgcaaggcttttgtagcggattaatgattccattatctcttggactaattttttcagttacgcccagtgaacaacggggaagtacaacaggattatggggtgccatgatcatgctaaccttagcagttgggcctatgctcggagcactggttttggtatggcttaattggaaggccttattttttatcaatttacctgttgcttgtctggcattaattttaggctatgtttttctacctaaagagcaatgggacaataagcaagagtttgactgggcaggattcttttttctcggttcaagcatagttttattacttgggacactgagccaaatccatcaaattcaggacttacttcaacctctatatggtgcgcttttagttctaagtatgctgctttttataagatttatttttgtacaaaagaataagtctatgccattaatcgagccagctttgtttgctacgaaggggttccgctacagcttagtcatttgtgtggcacaaacagtaggcttatttattggcatgttgctcattccactatggatacagcaccttctaaagttaagcccgctttggactggttttgcgctaatgagcagtgcagtagttaccggtatttgtagtcaacctgcaggaaaatatctagatcgttacggtgctgcaaaaatcatgtctcttggactaatgattactgtggcttcttttcttttgcttgcttgggcacctatacaaaatgtctggttcattgtgttttgtatgatattacatggcttaggaatgggactttcttatatgccatcgactacggcaggtttgaacagcttacgccagcagcaacagcatctagttactcaagcggccgctctaaataatttattccgacgtatttttgcagcagtggcagtcgttattgccgcgttatatcttcagctaagacaacaatcattgccgttaaatactcaagcaatatttacatcatttcacactatgcaggaaatctttgtgtgttgtgcaattcttatactttgcactttgcctttcgcatggcgttttcctgaacagtacagaatcgaccaattaaagaaatag

SEQ ID NO: 45993 - DNA, 1434 bp, Acinetobacter baumannii
atgcttgattttattggaattggactggggccatttaatttaagtctggctagtctgttacatgataaaagcgagctgcaatatcgcttttttgatcagcgtgagaaatttgactggcatgctggtatgcaattgcccaatgcgatgttacaagttccttttatggctgatttggttagtatggttgagccaaccagcccttttagttttttaaattatttaaaacaccatcaacgtttatataaattctattttagagaaaatttgtatataccgcgtcaggaatataatcattattgtcaatgggttgtagaacaacttaaccatattgagtttagtagccatgtgctggatattaaaccgattaaaggtggatttgatgtggaggtagtgtgtaatgggcaccaccaacattatcgtactcgacaattggtattgggagtgggtacaactccacatttaccagaaagcttacaaaagatttactcaaaatcaggaacctgtctgcattcatcagaatatttacagtacagctcccagaagttatcaggaaatgtagttttaattggttctggacagtccgcagcagagatttttttagatctatttgatcgtcagtatatgaatggtcgaactacaccagactttcatctttattggttaacccgttctgctggtttctttccaatggaaaatacaccattcggtttagaacattttagtccggattacatgcattacttttaccatttaccatcaggtttaaaggcagagttaccagcgcaacaagcaaatttatataaaggtattagcagtaaaacgatacatgatatttatgagcgtttatatcatcgtagtatcggtggaatgcctacagatgttacgttggctggacatcatcaactgcaatatgcagagctcttagaaaaccagaaaacaaagttgtgttttgaacaccgtcagcaaaataagaattatattctggaggctgattgtgttattgcagctacgggttatcgttatccaaaccctaagtttctacaaaatttacaatctttgatcatacgagatcaggccgaccattggcaggtggcttcaaactttaaagtcaattatcaaggtgagggatctatatttattcaaaatatggaagtttatcactacggcgtaggtacgcctgatttaggcttaggagcatatagggcagccacaattgcaaatcaattggttggtgaagagttattcaaacttgatcattctcagtcattccaacaatttggagtgaatgtaccagcgcaagaagaagtttctgttcgcaatattgcagcctcaaaaataaccgagttttcaagacctttaaataaatcagggccaatgcatcattctgctttgggagcgtatgcacgaagtaaattatctgagcatattgaataa

SEQ ID NO: 45994 - DNA, 1089 bp, Acinetobacter baumannii
atgcaagaccaagctttgccatcattccctcaagatttaaatgaggatcaaagtattacacgtccaccaatttcatactcaggtattcatcattttaaatttcacggtaatgcctcagaatattttggaatttggatcgttaatattcttttaactattattactttaagcttatatgcgccttgggctaaagttcgtcgtttacgttatttctatggaaatacagagttttttgaacgtcgttttgattttactggtattccaaccaagattttgattgggcgtttaattgcattaggaatttacgtagcattttcaatttcatcacagtattcaatgattgcaactgtagttggaatagttgtgttatatatggctgtgccttggctaattcgcgctactttacgttttactgcaagaaatagtaagtatggtaacgcacgcttttattttggtggcactataaaagaatcttataaaattttccttttaagtatattggtatatatctttacattaggaatttttacgcctgtagctatttggctatataaaaaatattatcttaatcacctatatgctggacaattaaattttaaattaaacgcgacctggactgcatatatggctgcagtttatgtacccatttttattgctcttggcatcattgctatcttttcaattatttattttagtattttaggaacactttccgggttctcatcgaattctgtaatctttgggatatttatgatgtatgccattattggattatttatttatccattaattgctgcgcgtcttttcattactacatggaacaatactacagttggaaacagtcaatttaaaacagactgtaatcaatggcgttttgcatggattgtagcatcaaactgggtagtaaaaatcttaaccctaggtttaatgtctgcttgggccgctgttcgcattcacaaatatcaggttgaatcaatgagcttaatcttgctagatgatccagataaaatgatgaatctagctcagcaagaacaaagtgctttagctgaagaaatcagtgatatttttgatattgatatctccctataa

SEQ ID NO: 45995 - DNA, 1092 bp, Acinetobacter baumannii
atgtcccaagcagtagatatcattttctatgatggcatagtgtctaaaccataccgtgctcagatttcagctcaatctaaaactgaagttctgattcgatatggtgagcaattagaacaacagcgtcattatcaatatactgatatgaaattgattggtgctctgggacagttacatccagtaattgaattagatgatgatgcacgaattgaatttcatggtgcattacctgaatggtttaattattcaactaaaaagattcaacattcgatttggaaatttgaacgttctccaagtcttattttttttagtttaatttttgtgattactttcggaatcagtttagtaaaatggggagttcccgccacttcccattatgttgcttttaaattaccagagaatagtttaaagaaactaggagatgaagccgagaattatgtactaaataattggactgcacccagccaattagctcaaactcaaaaagaccaaattactaaacaatatttgaatactgttgctgaaaataaaccagccaaattagtgttccgtaaaggtaatcgattaggggcaaatgctgtagcactacccaataatacaattatcattacagatgaactgattcaaatagcccataataatcaagaaatattgggagtattagcccatgaacaaggacatttagtttatcgccatagtttacaacaaggattaactagtttaggactaagtgtattatacattgcaatgacaggtgataattcagatttatttacgtcattacctgctgctatgcttggtgcaaattactcacgtaaatttgagtccgaagccgatctatatgcattacagctgatggataggaaaaatatagaagtctcacactttgcaaatttcttacaacgtttaaacgataaaacagaagaagatctaaataaagcaagtcagtccacctcaccaacctctcaaaaagaatcttcagataataagctatctatagctgttgttgatgctttatcttctcatcctgcaactgaagaacgtattcgaatggttcatgattttgagaaaaaacaacacgctaattattaa

SEQ ID NO: 45996 - DNA, 1344 bp, Acinetobacter baumannii
atgactgataatgcaactatcttgcagcatgtaccagtaggcaaaaaagttgggattgccttctccggtggtctagacacttcagctgctttattgtggatgaaacaaaaaggcgctgagccttatgcatatactgcaaacttaggccagccagatgaagatgactacgatgcaattccaaagaaagcagaacaatacggcgctgtgaaagctcgcttgattgactgccgcttacaattggcgcttgaaggtattgctgcaattcagtgtggtgcattccatatcagtacaggtggtgttccttatttcaatacgactccactcggtcgtgcagtaacaggtactatgctcgttactgccatgaaagaagatgacgtaaacatctggggtgacggttcaacttataaaggtaacgatattgaacgtttctatcgttatggtttgttgaccaacccaaaccttaaaatttataagccatggttagatcaaaactttattgatgagcttggtggccgtgcagaaatgtcacagttcctcatcgacaacggttttgactacaaaatgtcaaaagaaaaagcgtactcaactgactcaaacatgttgggcgcaactcacgaagcaaaagatcttgaatacctaaatgcaggtatcaaaatcgttgacccaatcatgggcgttgctttctggaaagaagaagttgaaatcaaaccagaagaagtgactgtacgttttgaagaaggtgtacctgttgcattaaatggtcagcgttttgacaatccggttgagcttattcttgaagcaaaccgtattggtggtcgccatggtttaggtatgtctgaccaaatcgaaaatcgtattatcgaagcgaaatctcgtggtatctatgaagcaccgggtatggcccttcttcatattgcttacgagcgtttggttactggtattcacaacgaagatacgatcgaacaataccgcattaacggtttacgtttaggccgtttactttaccaaggccgttggttcgactctcaagcgcttatgcttcgtgaaactgcacagcgttgggttgctaaagcgattactggtgaagtaacacttgaacttcgtcgtggtaatgactacaccatcatgaacactgaatctccaaacttaacgtacgaagctgaacgtttaacaatggaaaaaggtgattcaatgtttacgccaatggaccgtattggtcagttgactatgcgtaacctcgacattaccgatacacgtgcaaaactaggtatctatacagatgctggcttgctttcaattggtcaaggttctgctgtacctcaattagacaataagaaaaaataa

SEQ ID NO: 45997 - DNA, 1263 bp, Acinetobacter baumannii
gtggcgaataggggaaatgtacatcaattactcaaatctaaagaagaaatcgagtatttggtcactctacatacccatcgttatgccaatatgcctttgcccaaacaactggaaaaaaaattctggtgtttaaatcttgatcgaactagacagaacatttcaaagtttctagcaagtggtgtactcacttatttaatttttattttattggccctgccgaccgactatttagtgattggggtaccttatattactttggactttattcattgcttacttagtgcaatgaatattgcacttgccctgttattgttctgggtttttgccaaatttacaaaactctccgagcacttttatttagctgcatgtggcattgtatttttaaccattattattaatgcgatgttattgcttagtgtcggaaatatggcgcttaagaaccagtctatgttgcttctttcatttttatatatgctcgggttcatattaagcggtattaaacctttgcatatgctttgtgttggtttattggcagcatttttagtttttgcttttcttattttgttagacgtaaattgtgactatattgcactgggtcgtgctttgttcggtagttgtattttaggtttctcgattagcagtatgctcatctcaagagaaagaagcctttttttaaataaccagcttgctgaaattaatgaacagatcttacggattgaagcgtcggagttattgcatttaagccagcaggatgccctgactcaaatttcgaatcgacgtacatttgatgagatgtttgattttttctactaccgagcaaatcaagagaagcgtcctttagctgttttatttattgatattgatttttttaaaaactataacgatttttacgggcaccagatgggagataaagtcatctctagcattgctgcagcaattaaaaactcaattcgtcatgtcgactttgttgcgcgttatgggggcgaggagttcgttgtacttttacctgaaacacctgcacagggtgcttattcagtggctgcaaatatctataaagccattgagcggcaagcgattcctcacgcagcttctttagtgtcgaagtatgtcactatcagtttagggtttaccgtatatacgggtgggctaaagatgggacaagataggcttattcatgcggcagatcaggctttatatcgggcaaagcaactcggacggaaccaaatttattatcaaccgttacaagttgccgaaattgcctaa

SEQ ID NO: 45998 - DNA, 1035 bp, Acinetobacter baumannii
ttgaactctattaccctgctccagccagatgattggcatgcacatttacgtgatggtttagcattaaaacgtactgttccagatttggctaaacaattcgcccgtgcgatttgtatgcctaaccttgtaccgcctgtaaaaacagtagaagaagctttagcttatcgcgaacgcattcttgctcatgttccggaaggcaataattttgaccctcgtatggtgctttattttactgaccacacttcaccagatgaagttcgtaaaattaaagaatcagaacatgtaaatgcgattaagctttatcctgctggtgcgaccacaaactccgataatggtgtgagtgatattcgtaaagtttatgcagtcattgagcaattagaagagcatcaagttccgttattgcttcatggtgaagtaactcacaatcatgtagatatttttgatcgtgaaaaacgcttcctagatgaggtattatcacctctattgaaacagttcccgaaacttaaagttgtgcttgagcacatcactaccagtgatgcagcacactttgttttagaacaagaccgtaatgtggcggcaacaatcactccacaacatttattatttaaccgtaatgatatgttggttggtggtattaaaccgcacttttactgtttaccaattttaaaacgtcaaacacatcaaacgactttgcttgaagtggcgacaagcggtaatcctaaatttttcttaggtacagacagcgctcctcatgcacaaaatgcaaaagagaatgcttgtggatgtgcaggctgctatagtgcaccaaatgcaattgagctttatgcacaagcatttgaccaggtcggtaaattagagcgtctagaaggttttgctagccattttggtgcggacttctacggtctaccacgtaatacttctaccattactttggttaaagaagataacctcgttccagaatcttttgattatttagataatcaaaaaatcatcccgctgcatgccgggaaaacgctgcaatggagaaaagtgtga

SEQ ID NO: 45999 - DNA, 1155 bp, Acinetobacter baumannii
atgacagaaggtgttggcctacctttatggttattagcggagttaacttatcgttgcccgctacaatgtccatattgctcaaaccctttagactacgcacagcataaaaatgaactgaccacacaagagtggtttgatgtttttgatcaagcgcgtcaaatgggggcagtacaactcggtttttccggtggtgaacctttggtgcgtcaagatctggaacagcttgtggcgcatgcacaccaactaggcttctacaccaacctgattacctcaggcatgggacttaccgaacagcgtatttcgcatttaaagcaagctggcctagaccatatccaaatcagctttcaagcgagtgatccggtcgttaatgatgctttagcagggtcgaaacatgcttttgaacaaaagtatgaaatgtgccgacttgttaagaaatatgattatccgatggtcctcaattttgtaattcatcggcataacattgaccagatcgataaaattattgaactttgtctagaacttaatgcggatacagttgagctagcaatttgtcagttttatggttgggcgtttttaaaccgtcagggtttattaccgacacaagaacaactcatacgtgccgaacgtattaccaatgaatatcgggaaaagttaaaagcgcaaaatcatccttgcaaacttatttttgtagtgcctgattattacgaagaaagaccaaaagcctgtatgaatggctggggtaaaattttctttacaattgctccagatggtatggctctgccttgtcacgcagcaagacaattaccgatatctttcccaaatgttcgtgaacaaagcctatcaaaaatctggtatgagtctactggttttaaccacttccgtggtgatgcatggatgccagaaggatgtcgtagttgcccagataaagaccgcgactttggtggctgtcgttgtcaagcttatatgttaacaggcgacgcaagtaacgcagaccctgtttgtggtaaatcgctgtatcatcaactcattgaacaggcacgtgccgagagcgaaattgattcctctctgggaaaattggtattccgtaatagccgaaattcaaagcaattcacggttcaacaaaacattccggttcaaaatattgtagatgattag

SEQ ID NO: 46000 - DNA, 2076 bp, Acinetobacter baumannii
atgacatcattgcccactttagctagctcaaaccagcacaatttagaaacgtatattaatagagaactatctttattagagtttcataaacgggtgcttgctcaagccaaagatatagaacacccattactggaacgtttgaattttttaattattttttcgcgtaatctggatgagttttttgaaattcgtgtggcaagtttaatccagaaaattagcttgatgagtcaggcaaccggaccagaaggtttaccgttagtagaagtattaaagcaaatttcaaaaaatgctcatgaggcggttgaagagcaatataaaatcttaaactatactttgttaccgcaactccaaggctatggcgttcattttattcagcacggcgatatattagaaaagcataaagaatggattaaagaatacttttttaaagaagtacaacccgtagttacgccaatcagtctagatccagcacacccatttccaagattggtcaataaaagtctaaacttcattgtaactttagaaggtaaagacgcttttggacgtcaaattgatttagctattgtgccggcaccgcgttcgttaccaagacttgttaaaattccagaacatatttctggcggtgcggagcattacattctgctctcggccattatccatcaacatatttcggatttatttccgggtatgaaagcgacgggctgtcatcaatttcgtgtaactcgaaatgccgatttaaccgtttctgaagatgtagaggacttggctgctgctttaaaaggcgaattatcttcacgccgttttggccaagcagttcgtttggaagtagcaaaaaaatgtcctgaagaaattgctaactatttattagagcaattcgatttagatgcagaacatctttactacgtcgatggccccgttaatttagcccgttttatctcaaactttgatttaccagagttacgctataaaccatatcaacaagttttgcctcagcttttatacactaaaaaaccgatttttgatgtgttaaaagcaggagatgttctacttcatcatccatttgattcttttgcacctgttatcaagttccttcgggaagctgcgcaagatccaaatgtcttggcaattaaacaaaccttataccgtagtggtgccaactcggaaatcgtacagctacttgcagaagcggcgcgtaatggtaaagaagtaaccgcggttattgagttgcgggcacgttttgatgaagaatcaaatattgaagtcgcaaacgttttacaagaagctggcgcagtcgtggtgtatggcattgttggctataaaactcacgctaaaatgattttagtggtccgccgtgaacaagacaaaatcaaaagatatgtgcatttaggtacaggcaactatcatgcagtgaatgccaaaatctataccgattttggtttgctgaccaatgatgcggaaatttgtgaagacgtccataaaattttccaagaactgaccggtatgggcaaaatggcaaagcttaaaaagctttttcatgcgccatttaccttacattctcagctgttagaacttattgaacaagaaattaaaaatagccttgctggtaaaaaagcacacatcatcattaaagtgaatgcgcttactgaaccacagctcatcagcgcgctttataaagcatcacaagctggtgtaaaaattgatttaattattcgttcaatttgctgcttgagaccacaagttgcaggactttcagagaatattcgagtacgttcaatcgttggtcgttatttggagcatacgcgggtttactatttttataatgatggtgatacaaaagtttattgtgcaagtgcagactggatggaacgtaatttgttctctcgtattgaaacctgcttcccaattgaaaataaaaaattaaagaaacaagtcattgaagatggcttaaacaactatttgaaagacaatcgtcaagcatgggaattacaggctgatggaacttgggtgcaatgtcatcctaagccggaagaagaactttatattgcacagcaacacttgatgaacttagctgggtaa

SEQ ID NO: 46001 - DNA, 402 bp, Acinetobacter baumannii
atgacgacaatatcaaaatcattattaaatggattaccgataaaaaaatcgagggtacaagtttttgagattttaaatcagaacccacaaggcttaagcgcggtaagtatctatgcgcaaattaaaaatgaacataaaattacgttaggtaccatttatcgaattttatctgagtttgaaaaccgtaaaatcatcaaaagggtgtttttaggaaaaagtaaaagtatttataagcttagaaaagacaagatgagctgtaacctcatttcgctcaaaacctctgaagccttgaactttgaaaatgagaaagttaaagaattacttcatgaggttacggatattatttttgcaaacaccggagtcgacattagtagtgttgaactcaatctttatactgaataa

SEQ ID NO: 46002 - DNA, 459 bp, Acinetobacter baumannii
atgacaattttaatgattcttctcgccgtcattggcggtgctttgctgagtgtacaggctgcaattaatgggcaacttggagcaaaagttggtgtatttcgtagtgcttttttgactttctcggtcggtgctctaattacggctctccttattttttactttgaacctaaacataccttaacgttattagatgttcctaaatggcagttattaggcgccatgtgtggcgtaccttatattgtcattatggtactggctgtacaaagaattggggctgcagttgctactgttgctgtgatttttgggcaacttttgatgagtatcttaattgataactttggctggtttggcaacgaaacgcttcctttttcactgtatcgattaggggcgctaatttgcttagggattgctttatattttatttattcaagcagtaaggataaaaaggtagaagggtaa

SEQ ID NO: 46003 - DNA, 435 bp, Acinetobacter baumannii
atgcaaattctattactactcctaaccattttaggaggaatggggctatcggtcgaagctgggcttttagggccgttaggaaaggaagtaggtgagttgtgggccacttttagtatttttggtgtgggtgcagcacttacttttttactcatgttgttttttagcccacgcaatagcccttcattttttacacttccatcttggcaattgctgggtggtgttcttggccctgcttacgtcattattttgaccattaccactccaattattggcattgcaatgaccatgattggcattttagcgggacaggtatctaaaagtctgattatcgaccactatggtttactggggactccacatcgaaaagtagaccgtaaacgggtagtggcactcatctttattgttgtcgcacttgtacttgtgtcaaaagcgtag

SEQ ID NO: 46004 - DNA, 933 bp, Acinetobacter baumannii
atggatttaacaaattcgattgatatccgcacgcttcgcttctttattagtgtttacaatgctcaaaacttctcaaatgtagcacgtaaagaagatgtgtctgcctccatgatttctcggactattcaacaacttgaagatgcgttggggcaacaacttttctaccgaaatacacgagcaatcacaccgaccgaatcgggtaaattattttttgaatatgcaaaaagaattaccgaacaatttgatgaagctcaaaaggctttacaagataaaaccatagaaccatctggactcgtccgaattaatgcccctgtgttttttgggcaacggcatattgcgccgtggttggcgggtttatcagagcgttatccaaggcttctaatagaactaattcaaaccgatgaatttatagacccattacgcgaaagcacagatttaatatttcgtattggagcactgactgattcatcatttcatgcccgtatttttggtacacaaaaatatcatttagccgcctctcctcaatatattgccaaatacggtacgctcgaccacccaacagaacttaatcaacacaagtgcctagtctataaaggttttgaaggtcctaaccgctggttagtgagaaagcccaatgaagaatgggtacattatccaattaccccgttactttcttcaaacaatgccgagagtttaatgacagccgcgcttcatggcatggggattgttttatttcctgattggctgatcggcgaagctttaaaacaaggtgacttaataaagcttttacctgaatatgaagtcgcgattaaatcgcacccccagcatatcgcagccatttatcccaatgtccgccatccaccacttaatattagagcagtgatagattattttacagaaatctatggagacacaccgtattggcagaattag

SEQ ID NO: 46005 - DNA, 1344 bp, Acinetobacter baumannii
atgagcctaaaaaaagttcatcgccactcttgggtatcattagtgatttgctggattatctgggtggttgttgcatacgaccgagagttgattttccgcgcagccaatatgatttgtaatgaatttaatttatctccgacgcaatggggatacaccattgctgcaattacactttctttggccgttcttagtattccggttgctgctttaagtgataaacatgcgtctggttggaagcgaggaatttttcagtggcccttagtaattggatttacttttatttcgttgctttcaggcattacatctttaagttcaagtttctataagtttgtaaccttacgtattatggtttctttgggttgtggggtggcagagccagttggggtgagtaataccgcagaatggtggcctaaggaacatcgcggttttgccataggtgctcatcactcaggttatccggttggagcgctacttagcggtgttgcaatggccaccatcattacctattttggtccgcagaattggcgctatgccttttttcttggaattatatttgctgtaccggcattaactttttgggcgatttattcgacccgtaaacgttattcagagtttcaccaatcttgtgtagataatcaattcacaccaccaacagattttgtgcacgatgaaggagaagaaaaaacaagtacggatagtacatgggaacgtttaaaacaaactctaagttctcggggaattgtgtttaccgcagccagtactttaattacccatgtggtttatattggttttttaactatctttcctgcatttttatacaatattgtcgggttagatctggcgaaatcggctggcttgagcgctgtatttacaattaccggcatgatggggcaaattatttggccgactttgtccgataagattggcagacgactcacattgattttatgtggttgttggatggcggtcagcattgcaagtttttgtttaatctcaggcgtggtttccgttattgcaatacaactgttttttggactatctgccaacgcaatttggcctattttctatgcgacagcatcagattatgcaccagccggagcaattggaactgcaaatagtttaattacagttgctcagtatgtaggtggggcagtcgcaccgattattatgggatatttgcttacgagctttggtggctggcatagtcatcaggggtatatctggtgttttctcttaatgtcatgttgcgcgtttattggcgtgattttgcaaattatattgggttatctcattaaaaaagaaaaatcagaacaagttgataatttaagtttgagtgcaaattaa

SEQ ID NO: 46006 - DNA, 879 bp, Acinetobacter baumannii
atggaaattaaagtactggtagatgtaaaaacaaaacttggagaatgcccaacttgggatactgttcgccaacgcctattttgggtagatattgttgatggacgattattctgttgtgatgaattcggtgggaatatacgggcgtgggaagttcataaaaaaataggttcttttgctttacaagaaaattataacggcgcaattgttgcgctcgaagacgggttatatcaactcgactttgaaacaggcaacttaaaatttatttgtaaccctgaaccagacctacctcaaaatagattaaatgatggtcgtgttgatcggcaaggtcgattcgtttttggctctatgaaccgccttgaagatgggaataccgcatctctttatcgattagatgcagactataaaatagaaaaattagaaaataatattaatacttcaaatagtatttgctggagtcctgatggtactaagctctattttgcagatacatggcaaggtgaaatctggtcttatgattatgatcttgaaacaggccaaatctcaaataaaactattttttgtaagatagatacctcagacggtggttcagcagatggctcgacagtagatcgtgaaggttatttatggaatgcaaaagtatattcgggtcagttagtacgttatcgtcctgatggacaaatcgaccgtattattgaaatgcctgtaaaaaaaattaccagtgcagtttttggtggaaaaaatcttgatgtcttgtttgttacatctatgtcgcaaccaccacttccaaggttccctaatgacaaccaattgcgtggtagtgtttttgccatttatgggctaggcattcaaggaatagccgatgctcgatttatggggtaa

SEQ ID NO: 46007 - DNA, 732 bp, Acinetobacter baumannii
atgcttgatgagactgcatttaaaaattttaaattgccaagatatgaaaaggtccgttgggaacttcaaaaactactgatccagtcaaaatggacagtcgaagagcctattccaagtgaacaagagcttgcgcaaatgtatagcgtatcggtaggaaccgttagaaaggcggttgaaggactggttgaagatggcttattagttaaaaagcaaggaaaaggaactttcctcaaacaacctaattttgaaaattcgctcattcgtttttttagattacgtaataaaaaaggcgagttcattcagccacaaggacaaattaaaaaagtagaagtgtgtgatgcaatatcggaagtaaacgccgagttaggacttgggcacactgaaaagttgctttatatcgaacgtgtccgtaagcatgaagatgtcgttgtattaagtgagagaatctggctgcctgaacgcttatttaaaaatctggaagaaattccaatcgctgagtttggtaacttactttatcctttttattatcagcattgtggccaatttatttcttctgcaacagaacggttaacttttgagaaaaatattaaagatagctatttaaataatcaccttgaagaccctttagtgaaggtatgccgtattgcaaaaaatcttgaaggtgtagcggtcgaataccgtgagtcttatggtttggctgataattttcattatgaaataacaattaattaa

SEQ ID NO: 46008 - DNA, 1290 bp, Acinetobacter baumannii
atgactgcattgatgctgatggctttagccgtatcgataggtttaggttataaaacgaaaattaatatcggattttttacgatagcgtttgcctacctgattggttgctttggcatgggtcttaaaccttccgaagttattgaattatggcctgtcaaaattttctttattattttatctgtcactctgttttataactttgctttggcaaatggcgcactagagaagcttgccagccatcttctatataaatgccgtaagtttcctcagtttttacctttagcgatttttttcgcagcaaccattattgctggcctaggtgctggtttttatacagtacttgcctttatggcaccgattacactgctgctgtgtaaaaaaaccaatatgaatatgattattggtgggatggctgcaaattacggcgctttagctggcgcaaattttatgacatcgcaaagtggcattattttccgaagcttaatggaaaatactggcattacctcgcaaacagctttttcatatagtagtggaatttttgtcttaactttaattattccaattgcggtgttgggaatttacaccctgtggaatagaaaaagtaattcaattgtgattgaagatcaaaagcctgaaccattcgacaaaaaacagaaacaatccatcttccttattattttaatgatgtcgattgttttagtttttccaatcttgcatcttgtttttcccgatgtaaaaacgattagctttttaaactccaaaattgatattgccttccttgccattaccttctcgctcattagtttacttatgaaacttgccgatgagaaaaaggtcattgcacttgtgccttggggaacactgatcatgatttgcggtgtcggtatgctcatcgcattaggtgtgaagcttggcattattactaccctttctgaatggttagcaaacaatgttcctgtgtgggtcattccagtacttttatgtctcatcagtgccattatgtctgtattttcaagcactctcggcgtagttgctcctaccttattcccaattgttccggcgctagcacttacctctggcctaaacccactagtgctgttcatttgtattgtggttggcgctcagtctacagcgatttctcctttctcctctggcggtagcctcattatggcttcagcaccagcagacatcgacaaaaccaaattctttaatcaactgttatttaaagcaattcctgtaggagtcattgccgctttaatcgctattttcgctttaaaatttgtaatgtga

SEQ ID NO: 46009 - DNA, 813 bp, Acinetobacter baumannii
atgaactgtatagatacacatgcacatgttttttcgacacaggaccacagtatcgaaacagcacgttatgcacctgattatgaggcaactgtacaaagttttatctctcatcttgatgaacacaatttcacgcatggtgttttggttcaacccagctttttgggtaccaataaccaagcgatgttaaacgcaattcagcaataccctgagcgtttaaaagggatcgccgttgttcaacatacgacgacttttaatgagctagtgaatctcaaggcacaaggaatcgttggtgttcgcttaaatctattcggtcttaaccctcctgcgctaaatacgcctgactggcaaaaatttttacgaaatgtagaaagcctcaactggcaagttgagatacacgcaccgccgaaatatctggttcagcttttgccacaattggatgaatacagctttgatgtcgtaattgaccattttggccgagttgaccctgttaaagggattgaagatccagattatcagaaatttttaagcttacttaacgtaaaacagcactggattaaagtatccggtttctatcgtttgggtgctacacccaacaatataaatatagcccaacaggcatataacatttttaaagaaaaaggttttttgcaaaaactcatttggggaagcgattggccgcatacccaacatgaatccttaataacttatgaagatgcgattaaagcttttaaacagattgtgtttgataaacacgagcaatgtttaattttaaatcagaaccctaccgagctgtttggtttctcacgtacataa

SEQ ID NO: 46010 - DNA, 1341 bp, Acinetobacter baumannii
atgaaaaatgatatatctatatcggaagtagaaaagtcaacgatccgtaaactttcttttcgtattcttcctttcctcattctttgttatttcatcgcatatattgatcgggtgaatattggtttcgccgctttaaccatgaaccaagaaattggtttaactgctactgcctttggttttggtgcgacattattttttattgcatatgtcatatttgaaattccaagtaacatggcaatggaaaagctaggtgcacgtatctggattgccagaatcatgattacttggggaattgtgggttgctgtaccgccttcattaccggcccgatttcatacgcaatttcacggtttttgcttggtgctgcagaagccggttttttcccaggcgtattactgtatttaacactatggttccctaaacgatatatggctcgaattgttgccgtatttatggttgccattcctttatctaactttatcgggtcaccgttatctgccttactgttaggcttgcatggtttactaggtttaagtggatggcaagtgcttttaattcttgaagcattacctgcaatccttcttggtttgttgtgcctggtatggctgccgaataccgcgaacaatgtgaaatggttaaatcaagaagaaaaggagtggttatcaagcactttaacttttgaaaaaaatcaattgttgaactctgaaaaacaagacagtgccgaacagaaaaagagtaagttcaaattgctgattaccaataaatatttatggttctttgcaattatttatgcaggaagttcagcaaccagcaatattttatcgttatggatgcctcagattttaaaagccttccatttaactgccatgcagacaggtcttttaaatatgattccgtttggtttagctgccgctttcatgattgtttggggcgtacatgccgataaaagtggaaataagagtctcaacacagctattccgttatttgtgaccagttttggtttgcttcttactatttttacttcatctttaaccttgagcttaattttattctcactcgttttgatgggtaactatgccattaaaggtcctttctgggcattggtttctgagcgcttaccacctactttagtggctgtaggtattgcagcggtgaatacgattgcgcatattggtactgggcttatgaactctattatgggtattgtaaaagattattcgggaagcttccctatttctcttttaccgttatgtatgcttacatttacgggtgccatgattgcgttgtatttgggaagaaaaccgacattgccaaaagcgcaaaaggttcaaaagttggtttag

SEQ ID NO: 46011 - DNA, 504 bp, Acinetobacter baumannii
atggctaagagagaaagcgtacaaaagaagcttcagcgaattcgacctcctcgtgttcagcttacatatgatgtcgaaattggtgatgcgaaagaagcgaaagaactaccattcgttgtaggtgtaatgggtgatttttcagctgcatctgagcttgagcgtacaaaattaaaagataaaaaattcattaatgtcgatttagataatattgatgaagtaatggaatctctgtctccaagagctgcttttcaagtagacaatacgttgacagaagaaggcggtaaaatggcagttgatttaacgtttaagtcaatggaagattttcgcccggaaaatgttgtacagcaagttgatccattaaagaaattggttgaggcgcgtgagcgtttaaccgatttaagaaacaaaatttcaaacagtgagcgtttagaagatctgcttgatgaggttcttaaaaatactgatcaaatccgtaaattaagtgccgaggccgatcatgaataa

SEQ ID NO: 46012 - DNA, 504 bp, Acinetobacter baumannii
atgaaagatatatacgttgagtttcgcggtaaatataaagttgatggagaatctcgtgattctgagcacaaaggttggttagaagttaactcttggtctcataacatccgtcaacctaaatctgctacttcaagtagtgtaggcggccacactgctgaacgtgttgaacattctgacatggttttcgtgaaagacttagacgcaactagccctaaattatgggaagcttgttcagctggttatacatttgatgaagtacaaatcgacttctatcgcgcaaatggcgataaacgtatcaagtacttacaaatcaaattgaagcacgttttagtttctagtgtgactccaactgttaacgaagaaggcgttcctacagaagcattcggtttgaaatatgctgctgttgagtggacttataaccaacaagatattaacggtactgctaaaggtgctgttactaagaaatggtcactttctaataatacagcttcttacgcagcgtaa

SEQ ID NO: 46013 - DNA, 258 bp, Acinetobacter baumannii
atgagtgaagtaaaagttaaaacatgtgatttttgtgatgatggaaatggtgaatgcattttcccctattacggtcttgcccctcatattcacacaaagccaattgggggcaccgtatttctaaacgagtcattacctgaaaacttctgtcctgatggggatggtttaggcatgtatacacattgtctgaattgtgggggtgacggcacctatgagggtactcaattagaagttaaagcggaaagtaaggaggagtaa

SEQ ID NO: 46014 - DNA, 285 bp, Acinetobacter baumannii
atgagtaaggttattggtgaagttaatttgaaccctagccgtattgaaggtactccggatcaggtggctcttcatatttttgaagaaatcatttgtccaagtactgaggagcttatcaaaaacaatccggaagctgcaaaagtttttgcatatcacatttttggtttagcgctttctcagctagccgaattccattcaactaaaagtttagataaagctgtaaccgttactcttcacaaccttttgcgtcaattgaagaaagaacgtaatgagttgaggagctaa

SEQ ID NO: 46015 - DNA, 411 bp, Acinetobacter baumannii
atgattgatctaaataaaaaaagagaagcttttgaaagatttcatgccaaagaatgtaattgcagttatgaaagtttaaaacgtcaactagatagacaagaggcactaacaggacacagatatttaccaactagtcctcgtcatgaagcttggttgatttgggatgccgcatggaatgacgccagtgctcaggtgttgccaacttggatcagcgtggatgatgaatggccacctactgacataatggtacttatttgttgggctgatgcacctgatgttacccccgaacaagactatatgactattgatgaagatttaaatagtgtatgggcaaattatcataatgatccgccttcacactggatgcattttcatagtgtgccaaacgtatctggagctgctaatgagtaa

SEQ ID NO: 46016 - DNA, 210 bp, Acinetobacter baumannii
atgcttggttttatgtactacttgcaattgctgggctacgtaatagtccggcaaggcatggatcaagcaatgtttctaaccaagcattatgcggtacctgtagcttggcggcgcataacgatcgactatcacaaccggttaaataaacctgcccagcagctttataaagagtttgttgagtggactaaagaagaatatttgagggcttag

SEQ ID NO: 46017 - DNA, 636 bp, Acinetobacter baumannii
atgctccagcatggccaagttcactcaagttttgataatgcatttgctcattgctgcgcgattattaaaatcagcggtggtgagtttgcggaagacattctaaaacttctaaataagcctactgaagaagtcgaagaagaaaagccttcagaaagtcatgcggaatctctaaaagttaaaaattcaaaaccagaggttgtagaaaaagcacaaacagctgagccggctattgaatcagaaaccgctgattcagaatatcagaagaaacttgataccctgctgcaacgagttaaggactcaaaaacaccagacgaagtaaatgcagtttatcgatatacacgcacttggtctgataaacaaatggagcctttgctacttgcaactcacaaacgtcttgaagagctcgaaaaatctaaggcgcaagcaactgaaccaccttcactaatggtccagatccaaaacgcgcccgacctcacaacattagatgctttggaaatagatgtggccgcacgagatccacagattcaatcacgactcatggactttgttaagaaacgccgctttgaattagagaaccctacatctacgccacttcaagaggctgagcctgattatttattagtggacggtttctaa

SEQ ID NO: 46018 - DNA, 1380 bp, Acinetobacter baumannii
atggatgcaaacaataagcacgagttaaaacaaggcttatccaatcggcatattcaactcatcgcactcggaggggcgatcggaacagggttgttcttaggtctatcacaaacaattaaactggcaggtccttcaattttattgggatatgcaattgcaggaattattgcctttttgattatgcgtcatttaggtgaaatggttgttgaagaaccggtaagcggctcttttagttattttgcgaacaaatactggggcaaaatggctggttttatgtctggctggaactactgggttttgtatgtactggtgagtatggctgaactgagtgcgattggtacttttattcagttttggtggccagaaattccgacatggctgaccgctctatttttctttattttaattaacggcattaacttggtaaatgtccgcttttttggggaatcggagttcttattttcctgcattaaaattgttgcgattttaagtatgattggcttcggtgcttatcttttactttcaggctcagcaggtccgcaagcgggtgttgcaaatttatggcaacacggtggtttcttcccgcatggtattcatggctttattatggccttggctgtcattatgtttgcattcggtggtctagagcttatcggtattgcagcagctgaaacgaaaaaacctgaaacaacaattccaaaggcagtaaaccagattgtttatcgcatcctgattttttacattggtgcaatcggtattcttttatgtctttatccatggaatatggtggcagaaggcggtagcccgtttgtcttaattttccagtccctcaatagtaatggcgttgcgaatgttctgaactttgtggtcttgattgctgctatttcggtttataacagttgtatttactgtaatagtcgtatgttgcatggtttagcagagcagggcaatgcgccagcaattttgaaaaaagtaaacagccgcggtattccggtccctgcagcaattgtgtctgcttcaattacagcagtctgtgtagtggtcaactatttaattccaggtcaagcttttcagctctttatgatgttggttgtggctgcgcttgttattaactggcttatgatctcagtcacgcatttgaaatttaccaaagcaatgaaattgcaaaagcgtcaaaccaaattccaaagcattatgagcccatggagtaattatttaactattagctttgtatgtttcattctcattattatggcgatgacaccagatatgaggctcgctgttattttggggcctatctggcttgctgttttagcgattatgtatttctttaagtatcgtaaaaaaatggtcgcaatgccggaagtacaatcaaactaa

SEQ ID NO: 46019 - DNA, 1071 bp, Acinetobacter baumannii; identical to SEQ ID NO: 42663

SEQ ID NO: 46020 - DNA, 984 bp, Acinetobacter baumannii
atgactagaccagattcaaaaagcatgaactatcaattactcaaaacatttagccgccaacccattcaatttgggcgttttcttgctcgtctgttagcaggacttgtaaatactctaaaaattactagaacatcaaaaagtattgagcttaacttaagaattgcgcttccgtatttaacacctcagcagcgtatagcgattacagaaaaagctgtaagaaacgaattaacttcatattttgagtttttaagtatttggggctcatcaaatagtaaaaatatctcacgcattcaccgtattgaaggtgaacatttttttcatgaagcattggctgcaaaaaaaggtgtagttcttattgttccacattttggtacgtgggaagtcatgaatgcatggtgtgctcaattcacatcaatgaccattttatataaacccgttaaaaatgctgatgcagaccgttttgtgcgagaagcccgtagccgtgaacaagcgaatctcgtccctaccgatgaaagcggtgtaagacaaatttttaaagcattaaagcaaggtgaaacgacagtaattttgccggatcatacccctaatgtgggtggagatatggtgaactattttggcgttccacttgcttcaagtaatttaagtgcaaaactcatccagaaaactaaagcaaaagctctgtttctttatgcaatccgtaatgaaaacgatggctttaccatgcatatcgagccaatggatgagaaaatctatgaaggcactgcggacgatggaacgtatgtcatccatcaagcgattgagcaactcatttatcaatatccagaacactatcactggagctataaacgttttaaagcgaaccctgctttagacaatatctataatatcgatccgacagaagcacttaaaattgtagataggctcaaagcagaagctttaaaaacctctactcaaccagagcctatccaaacgtcggtcatgtaa

SEQ ID NO: 46021 - DNA, 1899 bp, Acinetobacter baumannii
atgtctggttttaatgtgagatatattgagcctttaagtctcgatgaaatctatcgattgggctatcagcaacatttaaaagaacaacagtctttttccaatagttttcgtttaaatatagaaaaacttcgcttaacttttaggcaaatattaaacagctcatctctacagcaaaagggtttaattttagctttgctgacaggtgatgaaagccttttatcagatgaaactcaactacagttcaaacaattaggaattagtcatttattggcgatctcaggcccacatgtgctcatttttgccattatgttatcttgggcatgtcatcaatttatcagtcgttattatcctcaaatttacttatggaaaccgaaacaggttttgatggctgtaccatgctgccttggtgttttaatttatactgcatttgtaggtttcgaaattcctgcactacgaacattattatcagcatttatatttattggatttctattattaaaacaacctattaaaccttttacattactcgtatatagcgcaagtctactgttgctaattgacccgtttagtgtgctttctgcaggtttttggctgtcttatggggcatgctttattttattaagaatttaccaaactatagcgcagctacctgagcaacagtttttaagtctgagctcaaaaatgatttttatgggtaaggtgttaattgagtctcaaggcaaaatatttattgcattgagtcccttaaccttacttttctttcaacaaatttcttgggttgctccattaaccaatattattgccgtgcctattgttggtggtgttattgtccctttaaacatcatggctgcttgcgcatggtttatagtaaaaccgtttggaaatatgctttttcatttcaatgatatgttgctcagcatattgctgagttgtttgggcttattagaaaaactctctttaccattacaaggtataagcttgacgccactgtctttattagcgattagttttgccataattattttatttttacctaaaggaattctgcccaaaacttgggggatattatgttgtttacccttagttattatgaacaaaacgagtcaacaaattcagcttaatattttagatgttggacaggggcaagccatttttttacaacattccgaacaaaactggttaattgatacaggcggttcttacgatgaaaaaatatttagtattggacaaaatgttgtagtgccttttctacgtcagcaaggcgtaagacaattagatcatgttgtgctatcccatcttgatcaagaccatagtggcgcgtttcctcttattcaacaagagattcctgtaaagcagcttatttcgaatgaacaattaccaaatgatttaaagcaaccattccaatattgccatcaagggcaacaatggcattatcctgagttagatattcaaattttatggcctaaagaaaaagatctggcttttgttgcttctaaccagaatcaatattcttgtgttgtatatcttcaatttaaaaaagttggtggttaccaaaattttcttattatgggcgatgcaggatgggaagccgaatacgagttattaaaagattatcctaacttgaagatagatgtgttggtgctagggcatcatggaagtaagcacagttcggcttatgatttcttggcgaccttaaaacctaaactggccattgcatcggcagggtttgataaccgttatggccatcctagccaacaagttatagcacgtttaaaagctctacatattccgctaaaaagcactgtggaacaagggaccttaagttttgtgttggaaaatcacaaaatagttttacatgaccgacgtttggataggctctggttgagtagaggtttttaa

SEQ ID NO: 46022 - DNA, 1746 bp, Acinetobacter baumannii
atgttaactaagaactttataacttcttctattattctttttgcgggttttcaccaatatgtttatgcgattgaagatgtctctttacccagtcaggtattgcaagatcagcgtttaaaagagctcaaccagcaattacaagaccagcttgctcagcaaactccttatcaaaacaccaagccattacaggactttaagcatctggttgttgaagaaagcccatgcgtaacggttaaagaaattagtcttatccctttaattggtcagtcggaatctgacttacagcaatttaactttgtgattaaggccataaaaaaacacccacagaatattttgggtaaatgtattggtacccaaagtttgcataacattgtgaactatgcccaaaacgaacttttaaaaaaaggttttattaccagtcaaattgtcgtgagtccgcaagacttaaatcatgggaatctaaacctgagtatacaaatcggacgcttaaataagattgttatacaagaaggaaaaatttcctcattacagcttaagactgggttgccatttaaagctggcgacattgtgaacctaaaaaggctcgatcaggggctggaaaatctaaaacgtgtctatgcggtagatatgcaaattactcccgcaactgctcaagataaagaattaacgggctatagcgatttaatactcaaacttcaagcactacaaaaagttaatttcaatttaagtgtagatgactcgggtaatcaggacactggtacctatatggggaatattgggataggtatcaataacccgtttcatttaaatgatattttatcgttaaatgtgagtcactctttagatgactttcatgaaagcttaaaccgaagttatttcattagttatcagttgcctgttggttattatgatttaggttttagctataacgattatcaatatagacaaggaactgtagcacctgaatctggctatccagttatttatcatggtaatagccaacaagccaacctgaatttatctcgtgtgattagccgtagcggacaacataaaaccagcgtgtatggaaagctttatcataaagaaagccaaagttttttaaatgatattgaaattaatgtcttacaccgtaaaacctcaggctggaatttaggcgttcaacaccgtcaatatttaggaaatgcggtattagacggcagcatcgattaccgtcgtgggatgggggtgggtgcccgaactgcaccagaagaaaatattaccgatgtttacggaaaccatcttcctgttgaaggttactcccgtgctccactttggagtgcagatctgcgttataccacaccattccttttgcttgataaacctgcccagtaccgacttaactggcgtggacaatatgcaccgaaaattttagtacccaatgaccgcttttatattggtgggcgctatagcgtgcgtggctttgatggtgagctcatgctttccggagataacgggcagtatgtacagcaagaaatcagcttgaatgcaccaattcctaatacccagttttatatggcagtcgatcagggctgggtaaatggccgcaatagcataccgggtcagcgttatttactcggaagtgttttggggctgcgcacctatcaaaatagtttttatctggatgcctttacaggtcgggggctgattgcacctgacagcataaagaaagactgggttaccggttttagtatcaacctttcttattaa

SEQ ID NO: 46023 - DNA, 1383 bp, Acinetobacter baumannii
atggattgtttatttaataaatctttcgaaaagacgatgaaaggatttcataaactgttgttggtgacacccttactcattaccgcccagacaagttttgccgattggattaaagactctgtttctaaaaatgaatcaaaaactattcaaattcgccattatattcatgagcatccagaacttgggaacatggagttcaacacttcaaaattagtgcaaaatgagttgaagtcttatgggatcgaagttcgaaaaggttttgcaaaaactggtgttattggaatcttaaaaggcgatctgcctggtcccgttatggcattaagagcagacatggatgccttgcccatcgaagaaaaaacaaatttgagttatgcaagcaaagtaaaagcacaatatcagggtgagttacaacctgttatgcatgcatgcggtcatgacgcacatacggctatgctattaggtgcagcaaaaatacttgcagaaaacaagaatagattcgcgggcactgttgtttttgttttccaaccttctgaagaaggagctgctgatttggctggttttagccaaggtgaccaaatcggctcaagaaaaatgattacagacggcgcacttaaaaagccagaacctgaagtcatgtttggtatccatgtcgtttcaggtattccaagtggcagcattttctataaagatgaagctatgcttaacagtgctgatgaattccgcattaaactgactggacagcaagtgcatgcttccatgccatgggctggtcgagatccaattgtggcatctgctgccattattaataatattcaaacgatgatcagtcgccgttctgatcttactaaaggtatggccgtgataacggtaggacatatttccggcggaactgcggccaacattattccgaaagaagttgatatggaaggtactattcgtaccaataacgaagatatccgtcaaaatattcttcaacaattgcctgaaatggtcactcatactgcgcttgcaaacaatgtaaaagctgagattgaactctcgccttatgcacctgtaacttataacaataaaatgttaactcaattaattttgcctacattagaaaacacggttggtaaaaataatttgcatcgtatggagactaatgcaagtgcaagtgacgactttgcacactatggcaagcttatgccctcgctttatatttcactcggagcgactcctaaaaatcaagatatgagtaaagcagctcctaaccatagtccagaatttattgtagatgatgcaaccttaaaaacaggtgttgagtctcatatacgttttgttatggattatcctgctatcgctagtcaggtacaaaaagcttggagagatgataagaaataa

SEQ ID NO: 46024 - DNA, 1647 bp, Acinetobacter baumannii
atggcgatatatcatttttcagttaaaacgattagtagaggtaatggacgatcagccgttgcttgtgctgcatatcgttcaggtgaaaaattggtatgcaatttctatggaaaagaacaagactacacaaaaaaaactggtgtcgaatttacagaaatctatgcgcccgaaaatacaaataccgagttactcaaccgtcagacactttggaaccaagtagaaaaagccgaacgaagaaaagatgcattacttgcaagagaatttgagattgcatttccaagtgaattaaacgctgaacagcgtaaaaaaatgctcaatgaactttgccaaaacatcgttaacaaatatggtgtcctcgttgacgctgctattcatgcaccgcatacagacagtggaagtgatgaacgtaactaccatgcacacattatgttcaccacccgaagtattaatgagcatggtgacttttcagcaaaaaaatatagggacttcagtcgtgacaatggcacagaaactgtaagccactggagagaatcatttgcagagttatgtaatcatcacctggaacaaaatggatttgatgaacgtgtcgatcacagaagttatgaagaccaggaaagtgacctagaagcaactcagcacgaaggtcctcaagcgacatacctgcgaagacgagggatatttacagaaattagtctgaaaaatgatgaaattaagctacgtaatttagaaattaaaaaggtaatcgcacttgatgaaaacattaaagtatctgaggatcttgttcaacaagtacgaagtgaacttcaattccaccagtctgaagctgaatatttagaaaaaatttctcagaaactttctgaattccaaaacgaagaattatcaaaattaacaacagaattagatacaatgagttttgaaatatcagaactacacaaaaaagagcctttattttttaaaacaaaatggagcaatcaaatcaatgacctaatcgaccaacacaacacccaactagatatccaaaagcatatctctggtcttagtgaaatagaaaaaaaagagagatattctaatcagttaaataaatggacagaagaaaatcagctgctccagcctaaaaagtctttcgaaaaatttgacgaaccgaacatcactgttaaacaacgaaaacttaatgatcaaatttcaaatatagatcaccaaatttcagaaatatcacgcagagaaaatgactatcaagagtacatatgcaatcaaagaatagagatcaaaaatagttatatatttgaagaagatgactatggaaataaatattttagtcctcaaaatggtgaaaaacaaaaacgactatatgcaaaagagatggaagagctgaaaatccaaaaattgcatgcagattttacaaaaagcgttgaaatagaagtgcagcaagagtttgaccgaaaaacagctctacagctcgaaaatgaccgaaaagatcgtgaatctagagaacagcagttgcatgaagaacaagaacaacgttatgagcaagaaaaacgagcacccgaccttttagcattttcaaaacgtgaagaccaagaaaaacagcaaaaaaatgaacccaaaaaaccagatcttgataatgatcctgactacatgccttggtaa

SEQ ID NO: 46025 - DNA, 930 bp, Acinetobacter baumannii
atgacaagtatatatttgtcatatattagaaaaatcaatggttttgttttgaataaaaatcacgttgtaaaatcaaatcaagtaatagaagcatcgtatcaattaagtgccgtagagcaacgaattgtcttagctgccatttcacggattcccaaaaatcagcctattacagatgatgagttataccctgttagcgtcgatgaattaaaacaattgggcgtacatgagaaaactgcatacagagatttaaaggaaggtattaatagactctatgagaggtctattaatctcagtattgatgataaatctataaagatgagatgggtgcaagaaatccaatttttagatagtcaaagtgtcattggaatccgtttttcaaaacccattctgccattcatttccaatctaagtagagaattcaccaaatatgccttatcagacattgctgggatcaatagtggatacggtattcgtatttatgaactactggttcaatatcggcaaataggtaagcgtgaaatttctgttgagagtttacggacaatgttagaactcggtaaaaagtacccattattcgctgatttcaagaaacgagtaattgacactgctatagaccaaatcaatgaatacagccctctaaaagtcacttatgagcagaaaaaaacagggcgtaaagtcactcatattatcttttcttttaaagaaaaatctaaatccataacacatacctcgaaagatttttatcagctatctgatgctcaaattaatctattcgggaatcaattatcacgtttacatgagctttcccatttagcctcagaaggtgaaagttatgagattttagctgctaaaattaaggatatgcttagaaaccctcaccaacaacagcagtttttgccacacttaaagaacttagggtttaaagcttga

SEQ ID NO: 46026 - DNA, 555 bp, Acinetobacter baumannii
atgaaaacaagtacaaaatacagtgttagtgatgcagccacactgtataagaaatctcgtgctacactttataaagatataaaaaatggggtgttaagtcgtgatcatgatggctctatcgacttctctgagttactccgcgtttatggtgaaccttttagtggaaaacactcaaaacacactgatacgtctccaatacaaactataaatacacctgaatacacagacaatacagttattgaactaaagaatcagatcgattttctaaagaaacagttagaaaaagcagaagatcgcgaagctaaagcaaattctcgtattgatacattacttaccctaattgaaatgaagccaactcaggttcatcccacaccaacttcagctcaatctagtccatctcaagtagaatctacattgaatgtagataacaacaaacatgacggattgactactccagatcaaaaagaaaataagcggattccggtgccggatcacattgaaccagagcctgagaaaagagggttttggagccgtttttttagaccctatgattaa

SEQ ID NO: 46027 - DNA, 828 bp, Acinetobacter baumannii
atgaaaaaatttatacttcctatattcagcatttctattctagtttctctcagtgcatgttcatctattaaaactaaatctgaagataattttcatatttcttctcagcaacatgaaaaagctattaaaagctattttgatgaagctcaaacacagggtgtaattattattaaagagggtaaaaatcttagcacctatggtaatgctcttgcacgagcaaataaagaatatgtccctgcatcaacatttaagatgctaaatgctttaatcgggctagaaaatcataaagcaacaacaaatgagattttcaaatgggatggtaaaaaaagaacttatcctatgtgggagaaagatatgactttaggtgaggcaatggcattgtcagcagttccagtatatcaagagcttgcaagacggactggcctagagctaatgcagaaagaagtaaagcgggttaattttggaaatacaaatattggaacacaggtcgataatttttggttagttggcccccttaaaattacaccagtacaagaagttaattttgccgatgaccttgcacataaccgattaccttttaaattagaaactcaagaagaagttaaaaaaatgcttctaattaaagaagtaaatggtagtaagatttatgcaaaaagtggatggggaatgggtgttactccacaggtaggttggttgactggttgggtggagcaagctaatggaaaaaaaatccccttttcgctcaacttagaaatgaaagaaggaatgtctggttctattcgtaatgaaattacttataagtcgctagaaaatcttggaatcatttaa

SEQ ID NO: 46028 - DNA, 324 bp, Acinetobacter baumannii
atgaaacacttaggatttgtaggaaaaagtacagaatatatcggctatacccatgtagaaattatcaatagttctctacgcctgtctttcaacgtgccattaacaaataatgttgaagaaacctttaaaaaaattgtagacaacaactatgatttattgatgtcgacatccgcagaaatgtcatttgaactagaaaatgaaacgcttgaaattcttgagaaagtaattagagaacaggggatcgagacggaagaatttatacagaatacgttgattaaattcatcaatcaaaatggattagatactactaaatctaatctttag

SEQ ID NO: 46029 - DNA, 315 bp, Acinetobacter baumannii
atgactcgtttaatgactgaaaaagaattacaagcttttgaagcaactagagatattgaagctgagatattacaaggcattgatgatatgttggctaataatgcagcgaaaagaacagtgatcactgaaacagatgtggcattagctcgtagaaaggctcaactaactcaagatcagttcgccaagattcttggcgtatcaagacgtactcttgaatcatgggaacaaggtgcgagaagaccatcaggagcagcaacatcgcttatccgattatttattgttgatccaaaatttgtaaaagaaagtctggcttaa

SEQ ID NO: 46030 - DNA, 324 bp, Acinetobacter baumannii
atgtatacaatatgtgaaacccctttatttactaaatactgtcttgtttattggactcaggaagaatatgaggaatttaaaacattcttagcattaaatcctgaagctggggatgtagaacccaattcaggcggtattcgtaagattagatggactagtggcggtaggggcaaaagtggtggtgtcagagtcatctactttaatcgtttaacaaatggagagatttggttattaaccttgtacagtaaaaagcaaactgtacagcttagtaagaaaactctgcaagcattggtggagaaattaaatgactcgtttaatgactga

SEQ ID NO: 46031 - DNA, 306 bp, Acinetobacter baumannii
atgaaaaaactgaaatctcagtatcaacaatctgtaaaaacataccctcatgattatttttccaaacgctacccgaacataaggagtgtctattttaaaaaatttagcactcaacaagagagaagcttttatttcatgcatcatattgaatataaaaactatcctcttaaatttcgtgtagcgcgtggtactggtctacctcatgtttgggacgattttccaacttatgtatacaaaattgctaaaagttggaagcataattctaagagagcacatcagtactacaaagaacatgagcaaaaataa

SEQ ID NO: 46032 - DNA, 654 bp, Acinetobacter baumannii
atgtataacgttcatccaagtgaaaaactaattcaagctttccgccaaaaaccttatcagggatgttgtcctactcaagcagagtttttatttattggcttagatgccaattacgctcccaatgttgaagaacaaaaaatattttctaaaatcattgaatatcatgaggatgctatttcattttggcaaaaatacaatttacatcatccttttttattagatggatataaaggagatgggcgaaaatatcataaagaattttcaaaaattagactttcttgcaaagatgcttctcgtatttcatttatcgagcttcttcatcttccaacaactggtagaaatgatttgaaaagctctgatcttgataaaaatcatctacaatacattcataaagccattttttcagaacacactaaagctgtatttatctctgatgctgtttttaaattaatgaaaaaaacatctatattttcatggatgaatgatgcaaaacaaatagaaggacatactcttaaagtttttcatgaaaaaaaacctttaatctataagcatttacatttttcaacttatggaaagtttcaagctcaaaaagaggaagagataaaagcaattcataatattattctaggatcaaacatcagtgatttaacataa

SEQ ID NO: 46033 - DNA, 294 bp, Acinetobacter baumannii
atgatcgaaaagaatcctgaatcggtaactggtatgagtgttgaaactttagaacaaaaaattgcaaagcaggaagaggttttaaaacagctaaaagcacagaagcaagctgttatcgcccgtgaaaaaaagaaacaatctgaacagaaacgaaaagatgaaactagacgtaaaattttactcggttctttgatgttaaaaaaaatggaagatgaagccaataaagaaaaaatactcgctgatttaaacgagtatttaacagaagatagagatagaaaattatttaatctttaa

SEQ ID NO: 46034 - DNA, 5589 bp, Acinetobacter baumannii
atgaataaagtttacaaggtcatttggaatgcttcgattggagcatgggttgcaacctctgaaattgcaaaaagtaaaacaaagactaaatcaaaaactttaaatgtatcagcggcagttttatcgggtgtaatttgttttgctccaaatgcttttgctgggacaaataccgaagggggaataggccaaggaacatctatttctggtacaacttcatgtcgtgaaggaagcgctaatacggctaatcaaaaagatattgctattggctgcggggcacaaactcaagaccgaactggctctaacatcgcaaatcgtaataatccatataataattctaccggtgcttatgctggcgcaatgaaacaaggcggagcaatcagtgttggtacgggggctgtagttgagaaaggcctaggaacagcaattggttcttatgcgacgactcaaggtatttcaggtgtggcaattggtacgggtgctttatcttctggaaatactgctcttgcagttggtcgtcaatctgcagcgacagccgacttctcacaagctattggtaatgttgctgctgcgacgggtaaaggttctttagccatagggcattcagccactgcagaaggttaccgttcaattgcgattggctcaccagatattgaaaatgctgaccctgttgctgggcaggtaggcgctgcttatcaaccaaaaatggctactaaagcaacgggtaaagactcgattgcatttggtggaggtgcggttgctactgaagaaaatgctttagcaattggtgcattttcagagtctaaaggtaaaaagtctgtcgcaattggtaccggtgcaaaggcacaaaaagataatgcagttgttattggggaccaagcagaagctagctttgaaggcggcgtagcaattggtaaaggtgcccgttctgaagcggaaaacagtattgctttaggtaaagattcaaaagccagtcaagcaactggtgaaagttacttgactaaacaatcagcaccaacaggtgttttgtcaatcggagatattggaacggaacgccgtattcaaaacgtagcagatggtgcagcagattctgatgctgcaactgtgcgtcagttaaaagctgctcgtacccattatgtcagtattaatgacaatggtcagcaaggtggtaactttgaaaatgatggtgcgactggtcgtaatgctattgctgtaggggtaaatgcttctgctgctggtcgtgaggcaatggcgattgggggtagtgcacaggcaataggttctggtgctattgcaatgggaagtagtagccaaactgtaggacgtggggatgttgctataggtcgtaatgcatcgactcaaggtgccgaaggggtcaatagtaaccaatctgttgcgattggtgatcagacgaaagcaattggggatcagtcagtagcaattggtgccgacgtgattgcaaaagggaactcttctgttgcaattggtggtgatgatgtcgataaaatcgcacgtgatacggaattaagtaatacctatacggaaattactggtggtactttacaggcaggtaaatatccaacaaccgaagcgaatcatggttcaactgctgttggggttcaagctgtaggtacaggagcgttttcttctgcttttggtatgacctctaaagcaactggtgatgcttcttctgcttttggcgtcatgtcaaatgcttcgggtaaaggtgccgctgcattcggtgctgttgcacaagcaacaggtgatggcgcatcggcaatgggtattaactcattggcatcgggtacaaattcaacagcaattggctctggtaataaaccgggtgaaggagcaaaagcgactgggaacagttctgcagcaattggtagtggtgcgcaggcaacaggtgataattcagcagcaattggtaaaggagctgaggctacaaatgaaaatgctgctgctgtaggtggtggtgctaaagccacgggtaaaaatgctgcagcgattggtggcggtgcaattgccgatcaagaaaatgcagttgcagttggccaaggtgctcagtcattagttgaaggtggtgttgctttaggcgcacgcagtaaagtagaagccaaaaatagtgttgctttaggccaagatgctgtagcgacagaagcaacaggaacttctttcctgactaatcgtgatgcttctcaatctaatggtgtgatttctgttgggtcggctggaaaagaacgccatattaccaatgtagaagatggctcagctgactcagatgcagtaacagtacgccagcttaaaaatgttgatagtcgtgttaatcaaaatacgagcaatattggtaagaatacccagaatattactaacctgaatcagaagttagatgatacaaaaacgaatctaggtaatcagatcacagatacaaacaagaatctgaatgatgccaagaaagaccttggtatccagattactgataccaacaccaagttaaataccactaaagatcagttaacaactcagattaacgacactaaaactgagttaaacaacacgattggtaatacgaaaactgaactaaataccaaaattgacaacaccaagacagagcttgaaaacaaaggcttgaactttgctggtaacagcggtgcagatgtacatcgtaaacttggtgacaagcttaatattgtaggtggtgcagctgcgtcaactccggcggctaaaaccagcggtgaaaatattattactcgcacaactcaagatggtattcagattgaactgttaaaagactcgaagtttgacagtgtgactactggcaacaccaccttaaatacgaatggtttgactattaaagaaggcccaagcattaccaaacagggcattaatgctggtagcaaacagattaccaatgtagctgatggtatcaatgccaaagatgcagtaaatgttgatcagctcactaaagtcaaagagaacttaaatggcagaatcactgataccaataatcagttaaatgatgcgaaaaaagatttaggaaaccagatcgcggataccaacaagaatttgaatgatgccaagaaagaccttggtgaccagattactgataccaacaccaagttaaataataccaaggatcagctcacaactcagattaacgacactaaaactgagttaaacaacacgattggtaacaccaagactgagcttgaaaacaaaggcttgaactttgctggcaatagcgggagtgatgtccaccgtaaacttggtgacaagcttaatattgtaggtggtgcagctgcttcaactccgacggctaagaccagcggtgagaacgttattacccgtactaccaaagatggcattcagattgaactgttaaaagactcgaagtttgacagtgttaccactggcaacaccacattaaatacgaatggtttgacgattaaagaaggcccaagcattactaaagatggcattaatgccggcggtaagaaaattaccaatgtggctgatggtatcaatgccaaagatgcagtgaataagagtcagttggacaatcttgctgccaagcaaaatgcaaccgatgatgctgcggtgaaatacgatgatgccaagaccaaagataaagttaccttaaaaggcaaggatggtacggttttagataatgtgaaagcaggccacatttcatcgacttcaaaagaagcagtaaatggtagccaaattcacaatatttcaaacagtattaaaaacagtattggtggaaataccgttgttaatccggatggtagtctgactactagcaatattggtggaacgggtaaaaacaacatcaatgatgcgattagcgaagtaaaaaatacagctaagaaagcaaagactactgtaactgaaggcgacaacattgttgtaaaagaaactgttaataaagatggtagtacaaactatgaagtgtcgactaaaaaagatctgacattaaatagtgtaaccacgggtgatagcgtacttaataataatggcttaaccattaaagatggtccaagcattactaaagatggcattaatgccggcggtaagaaaattactgatgtggctaatggcgttattgcacaaaattctaaagatgctgtaaatggcggtcaggttcaccatatctctaatagcatcaaaaacagtattggtggaaatacagttgttaatccggatggtagtctgacgaccaataatattggtggaacaggtaaaaataacatcaatgacgcaattaagtctgtagatgaaaaagtcactaatggtgtaaatgacttgactcaaaaagggctaaattttggtgcgaatgaccagaaaacaacccaaggcaaagcagttcaccgtaagcttggtgacactatcaatattgtgggtggggctaatccagaaactgctgaagataaaactagtggcgagaacatcattacccgtaccacagaagatggtgtcaaaattgagatgttaaaagatgtgaagttcgatagcgtgaatgtcgggggccatgtcttaaatcaacaaggtctaaccattaagggtgggccaagcatcacagtgaatggtattaatgcaggtggtaaacaaattaccaatgttgcagacggtattaatgcaaaagatgcggtgaacaaaggccaattagacaagcaaattaacgaagttaaagatcaaattggtaaagatattggcaagctttctgatcatgctgtgcagtatgacaaagataaaaatggcaatgtcgacaagaactcagtcactttaggtggtggagaaaaaggtaccaatctgaaaaatgtagctgacggtaaaattgctgagggctctaaagatgccgtgaatggtggtcaattatggaatgttcaaaatcaagtcgataagaactcgaatgatattaagaatattcagaataacatcgataacatttctaatggtaaagctgggttagttcaacagcaaaaaccaaatggtgaaatcacggtcggtaaagattctggcggtactagcattaatatggctggtaaagagggtgatcgtgttgttcaaggtgttaaagatggtgagattaaagctggttcgaaccaagctgtaaatggtggacaaatccataaaatttcagaaagcatcaaaaacagtattggtggaaatactacgattgatcctaaagatggctcaattacaaccaacaatattggtggtacaggtaagaacaatattaatgatgcgattgggaccttaaaccagtcgaaccaagaattgggtaacaaaattaccaatctgggtgatcagttacaacaagtgttctatgacactaataaacgtattgatgacgttgagaaaaaagctaatgcaggtattgccgctgccatggccttagaaaatgcgccgtttgtagcaggtaaatatacctatgctgttggtgctgcatatcatggtggtgagaacgcagtcggtgtgaccttacgcaaaacctctgacaatggccgttggtcaattacaggtggtgtggcagctgcttctcaaggtgagccaagcgtccgcgttggtattagtggtgtgattaattaa

SEQ ID NO: 46035 - DNA, 990 bp, Acinetobacter baumannii
atgactctacgtaatgattggactcgtgaagaaatccaagctctatatgaacaaccttttttggatttagtttttaaggctcaacaagtacaccgtgagcacttcactgccaatacaattcaggtcagcacccttttatctattaaaacgggtaaatgtcctgaagattgcaaatattgctctcaatctgcacattacgattcaaaattagaagcagaaaaacgtattgctgttgaaaaagtaattagcgaagcaaaagctgcaaaagattcaggttcatctcgtttttgtatgggtgctgcttggcgtaaccctcatgagcgtgatatgccttatgttttagaaatggtacgtgaagttaaagcattaggtatggaaacctgtatgactttaggtatgcttaatcaatcacaagcagaacgcctaaaagatgctggtttagactattacaaccataaccttgatacttctcgcgagtattattcccacatcatcagcacacgtacttttgatgaccgtttgaatactttagattatgtacgtcaagctggtatgaaagtatgtagtggcggtattgttggtttaggtgaaagccgtgaagatcgcattggtttgttacatgaattagcaaccttgcctattcatccagaatctgtgccaatcaacatgcttgttccaattgaaggtacaccattagctgatgttgaaaaactagatgttattgaatggattcgtactattgcggtagcacgtattattatgccgcatagttatattcgtttatctgctggtcgtgaatctttaagtgactcagatcaagctttagcatttatggcgggtgcaaattctctgttctctggtgataaattacttacgacgccaaatgcaggtgaaggtaaagaccaagcattatttaataaactagggttaacagctgaaaagccaaaaccaactgtttctgatttatcagttgatgcgatgagtgcttaa

SEQ ID NO: 46036 - DNA, 1089 bp, Acinetobacter baumannii
atgacatcttccaacacatcacgcattgcagtgcaacaaattgatccacatgaattaaaagcatggatcaaagctcaagcattagacttgggttttgctgattgtgtcattgccaaaccagatgctcaagagcaaatgccacgttttttagaataccttgaacgtggttatcatgcagatatgacctatttagaagaaaatctggaaaagcgagcagatccaactttattggtgcctggaacaaaaagtattatttgcgtacgtatgaattatttggtggaatcaccaaaaccacgatatgtacccttcgaaccaaactctgcgattattgcccgttatgctcgtggtcgtgattaccataaggtgatgcgtggcagattaaaaacgttagccacacgtatccgtgaaaaagtgggagattttgaatcccgcccttttgcagactcggcacctatttttgagaaatcattagctgaaagtgctggaatgggctggacaggtaagcatactttactcattcataaaaagtcgggttcattctttgtcttaggtgaactatttacatcactcgacttaccttttgatgaacctgctacttctcactgcggttcttgtagtgcgtgtattgatatttgcccgacacaagcgattgtcgaaccttatatgttagatgctagacgctgtattgcttatctcaccatcgaatataaaggaatcattgcagaagaattacgtgcaggcattggtaaccggatatttggttgtgatgactgccaattaatttgcccgtggaatagttttgctaaaacagcatctattcccgatttcaatcctagacatggtttagataatattagtttgcttgatatttggcagtgggacgaagctacttttttagccaatacagaaggcagcccaatacgacgtacaggttatcaatccttcaaacgtaatatcgctatcggtttaggcaacgcaccgtactcaaaagaaattgtagatcagctaaacaaaggcaaaagtttacatgacgaaatcgtcaatgtgcatattgattgggcaattgaacagcaacttaatcaactttag

SEQ ID NO: 46037 - DNA, 918 bp, Acinetobacter baumannii
atgagttcaggcgcaaaaattcgattatatgcttgtgaagaagcagttttaggaacaactccagcaaacccgatctggtacacagttcgccgtgtaagtgatggtttatctgaaaatgtttctactgaagaaagcagtgaagtggttgattcacgttttcgacaaggtggggtagttactgaagcagaagtagcaggtcagttagagtttgaattatcacttggaacatttgatctattcctaagtgctttagccttcaataattgggcgggtaacgctttaagttttggtggtacggtacgtaagtcattaacgttagttaaagttttcgaagatgttggccaagtctttatttatcgtggagtacaggttaattctggtgaaattactatccagaccactggaaaaattactggtaactttggtcttgtaggtagctcgtttactcgtcagcaaactaaccctgtagtgaatccggttgcagcttcgactcgtccgcttgtcagtatgccgaacgtggaaaacttgcttgtaaacggccagtcaattcaaggcaaagcatgtctacagtctttgaccatttctattaacaataaccttgaagcaatccgttgtatcggatctggtaaatacactccagagttttatttagagaagatgatggatatcgaagcgaatgcttcattcatgttctcggccacagctgctggttggattgatgcaatcaaaacccgtgatgtgtttacactgaccttcgacatcagagacagcaaaggaagtaaatattcgttcaacttcccgcaattggaagtcatggaagccaatcacccggatggtggtggtgatgacatcattactgtagatatcaactttgcccaagttcgtacagcgccaacaattgtacgcgctcttgtgtaa

SEQ ID NO: 46038 - DNA, 516 bp, Acinetobacter baumannii
atggctttaaaagtcggaattattaaaagctcggacgtatcaaaatggtgtgaatataagggttctgatggagaggtacaggctgagttcaaagtccgtggtatcgcatataagccttttcaggtagctattgaacgagcaggaaaccagatctcgtctaaaggctacgatgtaatggtcaaagatgaagatgccaagctttaccatgaattgttaatggatgcatgcgccgcccacttaatcgaagactggaaaggtgtggtatttgccgaaatcgtagacgataaaacggttgaatctgaaaagccctatacacctgagaatgcttcaaagcttcttaatcttggtgatattggtatttcaatctggctattcattaaagaacaggcccagaagattcaggaagaagccgacaaggacaaggctttaattctgggaaagtcatcgagctctacaaataccaaaaaacgtatgcgtcgaaaacgccgcacgaaatcgagcaaatcaagttcttag

SEQ ID NO: 46039 - DNA, 183 bp, Acinetobacter baumannii
gtgaaaagtctggatttaatcaaaatgattgaagcagatggttggtatgaggttagggtttcaggaagtcatcatcactttaaacacccaaccaaaaaggggttagttacaatcccacatcctaaaaaggatttaccaaacggaactgttaaaagcattttgaaacaagcgggtctaaattga

SEQ ID NO: 46040 - DNA, 405 bp, Acinetobacter baumannii
atgttatatccaattgcaattgaacgaggatcagatactgaggcatttggtgtcactgttcctgatattccaggttgttttagtgctggtgacacacttgaagaagctattgagaatgttaaagaagctatttcaggccatttagaaatattggctgaagatggtgaggaaatcccattagcttccgaactagttaaatttgtcgatgatcctgaatataaaggaatgatctgggcggttaccgaagttgatgttagtcgttatctgggtaaaccagaaaaaatcaatgttactttaccaagccgtttgattcgtaaaattgatgagaatgtaggtaaaggtaagagatatactactcgatcggctttcttggctgctggtgctgaaaaacttttacatgcatag

SEQ ID NO: 46041 - DNA, 1719 bp, Acinetobacter baumannii
atgcaaactgctaaacatttattatttgtcactaatggtccgcaacagcaagtcaatgctttaatcttggctcgtaaacttgctttagtcgcaacccaacacggttataaacatagtgtcatttcactcgatgagtttgaatcaagcgatcattttgatcatgtcattattattggacagcaacctaaaaatctaaatatttttggtcaaaacgctttatctttagtttctattgaagatattaaagatgatgcagacaaagcacttttaacggcacttgaacactcaaaaccagcaaatgagtgggaacaaaaacctaagcaagcttcaaataccgcaactcattttgttgccattactgcttgcccaactggagttgcccatacatttatggcagctgaagcgttacaacaaggtgcagaaagacttgggtatcaaatcgatgtagaaactcaaggttctgtaggtgcgaagaatattttatcacctcaagcgattgctgatgccgatattgttattcttgctactgacattgaagtcaacactgaccgctttataggtaagcgtgtctatagatgtagcactggttttgctttaaaacaaaccgacaaggcttttgctgaggcaattgctaatgctcaggttttagaacaaggtaaacagcaagcaacaactgaaaataaggataaaactgaaaaagttggtgtatataaacacttattaactggtgtttcttatatgctgcctatggttgttgcgggtggcttgctaattgcactttctttatgttttggcctaaatgcagcggaacaagctggtagtctgccagccatattaaaacagattggcgcagcagcatttaccctcatggtacccatgctgtcgggttatattgcatattcgattgcagatcgccctggtcttgcaccaggtttaatcgggggattattggcagcacagttacaagcaggttttttaggcggtattgtttctggtttccttgcaggttatatcgcgttatttatagctaaaaaagttaagctcccaactagtttagagtctcttaagcccattttgattattccattattaggaacattatctgttgggctgattatgttctatgtggtaggtcaacctgtagcgcatatttttgagttaatgaaagatttcctcaacaatatgggcacaacaaatgctgtattaatgggaattattctggcaagtatgatgtgtattgatttgggcggaccaatcaataaagctgcttatgcttttacagtcggactacttactaccaatacctatatgccaatggcagccacgatggcaggcggtatggttcctgcaattgggatggcaattgcaactttcctcgctagaaataaatttagtactggtgaaaaagatgcaggtaaagctgcatttgtgcttggtttatgctttatttcagaaggtgcaattccatttgcagcaaaagatccaatgcgcgttattccaacctgtattctaggtggcacagtaactggtgcattagttgctttatttcactgtgagcttgtgactccacacggcggtgtatttgtattactgattccaaatgcaatcaatcatgcgtggttgtatcttgcagcaattgcggctggaagtatcgtaacgggagtaagttatgccatcattaaaaagaatcaagaagaaaaattattaacaaactcataa

SEQ ID NO: 46042 - DNA, 171 bp, Acinetobacter baumannii
gtggatccagctactggagcaatgtataagttggcaccaaaagatataaatacagtattagaagctcaaaatttagtaggagaagctaagcaaaagcccacgctaacagtgatgctggctcaagatattcctgagcaaatgatggcccgtgcagtacaaattaataaataa

SEQ ID NO: 46043 - DNA, 837 bp, Acinetobacter baumannii
atgagtagtaactgggtggatatttcaaaagataccaatacgggtatcgaaacaatccgtgctcattttactggccatgcttatgatccccattggcattcaagttatttaattggtgtaactgaatctggtattcaacaatttcattgccgtaaaaagcaaatcaatagtcatgctgggcaagtttttatgcttgagccagaagaaattcatgatggacatgcgcctgcatctgatggttttacctaccaaatgctttatctacatccagaatggttaaagcaacgccttcaaggtttgtttcacaacagccccgatcattacgaactagtgattgatgcgccattaaaatccgatgatcaactcgcaatcattacttcacaagcatttcgacacttacactataaagaaatgaatattgtgaaagacaatagtctagatgtgcttattcaatatattgcccaaggtaaatggttaaaaaaagcttctcaatcttcgtgtattcatgtaccccaaatcgcccatcaaatccgagatattctgcatgatcatttatttgaagatattgggttaaaagatatatcacgtatggtgggactagaccgttaccatattcaccgtatttttaaatccacttttcatttagctcctcatcaatatcttattcaacttaggcttactcgagcacgtgatttactcgctagaagtatttctccagcacaagttgcttctgatttatgtttttcagaccaaagtcatttaagtcgttggtttaaacgctgttatgaactaacaccagccgcttacagaaaaatctgcacaaatcttcaagattaa

SEQ ID NO: 46044 - DNA, 714 bp, Acinetobacter baumannii
atgattgagcaaattcaaaaaagatcactggtcgatgaagtgattcatgtcatacgtcagaatattaaaaatgacatttggaaagtagatgagaaaattccgactgaacctgagcttgttcaaggtttgggtgtgggccgaaacaccattcgtgaagcaattaaaattttagaatatttaggtgttttagaagtcaaacaggggctgggtacttttgtacgcacgaaaaatgacttttcaattgtgattaattcaattcatcattctgatttatatgaacacgtagaagtacgatgtttattagaaatcgaaattgctaaattagccgctagacattgcacgcctgaaaatatgcgcgatgttatagcgtgtttagaagatagagcagcaacaaatcaacaagatgttgctaacttcatgttaagtgataagaaactacatttggcaattgccaaggcgactcataataaagctttacaggcaacttatgagtatttcttaaactcaagctatcaatacaccttagagctagtgactaataaaaatttacctgacccaaaccagcaaatacatactgaacttgttcaagctattcaacacaagtctgagtcagaagccatgcgaattgcggagtctatgttggcgcccatattacgttcgctagattcaattaaagctgactttgtccaaaaccacctagatcaaatactatga

SEQ ID NO: 46045 - DNA, 408 bp, Acinetobacter baumannii
atggtgttaggtcagtgcgaaaaagtcatgttcaatgttggtggatggcgtaaggccagacaagagcaacagatgcgagactggttcggctttgtgccaacatacttgatcaccattgatgctacattttgcgacaaagcaaatgatcgtgagttttgtgctttgcttgagcatgaactctaccatataggcgtagaacgtgatgaagacggtgaaatgatctttagtagctcaacaggtttacctaaacattatttagctggtcacgatgtcgaagagtttgttggtgtaaccaaacggtggggggcgagtcaaagcgttaaacgtatcgttgaagctgcaaagaatccgccgtttgtttcgaaacttgatatttcaaaatgctgcggaaactgcgtaatcaactga

SEQ ID NO: 46046 - DNA, 516 bp, Acinetobacter baumannii
atggctgcacttaaagaacaggtaaaaatatttattgttcaagcgcttgcctgcatggatacccctcaacaggtagctaatgctgtcaagcaagaatttaacattgagattgatcgaaaacaggtacaactttatgacccgacaaaagcggcaggaaagaatttaagtaagaaatataaagacctttttcataaaacccgagaggactttaaaaagaatgtttatgacatccctttagctaataaagcctatcggcttaaagaacttcagaagatctatgaagactggaagaacaacaggcttatgaagcaaggggttattaaacaggttagggaagaaatgcagggttatgacctcatgcttttaaatcttgagttaaagcaacttgagattgaaaagttaagagagggtgaaggtgatgaagatccaacaccagtcaaggtaactattcaagttgtagatgcgagtaaaaaagatgccgaacatcaatccgacactgaatgtacctcaggctaa

SEQ ID NO: 46047 - DNA, 1293 bp, Acinetobacter baumannii
atgccgaacatcaatccgacactgaatgtacctcaggctaattttttgcagatggaaaagaagttccgcgcatttgtcgctggctttggatcgggaaagacttgggttggatgctccagtttatgcaacaaagcttgggaattcccaaaagtacctttgggttattttgctccaacttacccgcagattcgcgacattttctttccaactattgaagaggttgctttcgattgggggcttaaaactaaggtttatgaaaccaataaagaggtggatatctattatggtcggcaatatcgaactacaatcatttgccggtctatggagaaaccagcaaccattgtaggttttaaaattggccacgccttgattgatgagcttgatgttatggccaaggtcaaagctcaacaggcttggcgtaagatcatcgctcgtatgcgttataagcaagctggtttgctcaacggtattgatgtggccacaacaccagaaggttttaagtttacatacgagcaatttgttaaagaggcaaataaatcagaggctaagcgtaagctctatggaatgattcaagcttcaacttatgacaatgaagctaatcttccagatgactacatatcatcactttatgagtcttatccgccgcaattaatttcagcttatttaagagggcagtttgtcaatttaaccagtggtgctgtttaccccgactttgatcgagttctaaaccacacggatgaagaaattaagaaaggtgagcctttactcattggtatggattttaacgtgcttaaaatggctgctgtggtttatgtcattagagaagggaagccaagagctttagatgaactggttggcgtgagagatacaccgacgatgtgtcaactgattaatgagcgctttccagatcacgatattactgtgattccagatgcttcaggtcaggcaacatcatcaaagaacttcagtgaatctgatcatgcaatcttaaagaaaaatggattcaaagttgaagttaatggtgtgaatcccggtattaaagatcgtatcactgcagttaatgcacaaattctgaatgctgagggtgaacgacacttaaaagtgaacacaaacaagtgtcctaactttacggctactttagaacagcaagtctatgatgattttggaatgccagataaaagcgctggtttggaccacgttggggacgctggtggatatccaatagctaagagattcccagtcatcattcagaaaatatttaaacggcgcgcaatcgctggtttttctcgttaa

SEQ ID NO: 46048 - DNA, 1341 bp, Acinetobacter baumannii
atggcagttactgataaacatccgcagtatattgctgcacaaaaaagctgggagattatgcgggacgccgttgctggtgaagagcagatcaaacaggcacaaacaaagtacctagctaaatcggccggaatgattgaggctgaaaagcaaggtgatacgactggagagatttataaggcctatctaagtcgagctcagtatccgctatgggttcaggacgcattacgcacgatgattggtttagtttcaaagctggaacctaacatcgtaattgaaagttctctgttaaagggtttgatagagaatgcaaccaatgatggttttgggcttaaacagctctttattcgcatttgttcagagttgctagagtttgggcgctgtggtttgcttgtcgatgttgatggggctggtgtgccatatttcgctctatatgatgcgctatcaatcattaactggaaggaaaacagcattggtggccgtaaggatctaaagctgttagtgctcgaggaacaattcgaaaatagtgaagatgagtttgggcatgatacaaagacggttcaccgtgttttatctatggttgatggtgcgctaactgtacggttatttgatggctctgttgaagaagataaaacgccagatctcggcggtaatcagctatctttcacgccgtttgttttctgtggaacgaccgataattctccacaagttggaacggtaccattgcttaccatggccaaggcagcactcaagtattaccagctaagtgcggattattaccagtcacttcaccatacagctcatccgcagccttggattaatggacttgagggtgatgaagatattagcgttactggtgtgatggctgtctggagccttcctagtgaatctcagtgtggttatctcgaaatttcaggtagtggcattgaactcactaaaaaggaaatggatgctcaaaagaattcggcattagaagctggagcaaaggtgattgataccaactcacaagaatcaggtgaagcacgacgtgcgcgtcaggatgaccaacaagcaagcctacatagcattgtcacttgtgctgctgcagctattgaacaagctatcaaatatgcagctcagtggttaaagctggattcaacaaaatatgcatttacggttgaacctgaatttatcgttcagcaatacgatatcaatctggccaaacaactttatgaaggtgctattgccggaaagaactctttccgcacatattgggaatacctgatgacaggtaaattaccagctcacgactatcaggaagaagtgaagcgggttgaaggtgaacgggacagtatgccgttgtag

SEQ ID NO: 46049 - DNA, 1107 bp, Acinetobacter baumannii
atggcttcaaaagaagataaatcattgattgaagtacttacccaacatcaggcgtacttatatcgggtgtcttctcaatctgttaatgagctactaaaaatctttaatgatgagtcaatattaatgttggcaaagcttcgggatttgcttgatgaattaaatgattctgaaaagatggctctagcaagtggacagtacactacgtcaaatctgaaggaagttcgtgatctaatctcccagtggtttactgcactaaatactgcattacctgaagctttcgcagtttctgctactgccttggcagtatatgaagccaattatacggcgaagctatatggcggcaagatcaaaaagccaaatggtgaaaagctttatgcagcagctaaaaaagtaccgttggtgggaggagcactggttgatgagctgctttctaagattgctgaaactgcacgccaaaaagttgagtatgccattcgggatggtatcaactcaggtaaaacaaatcaggaaatagttcagcgcattcgcggcaccaagcggcttaattatgaggatgggcttctaagtagcagtaagactgatatcgaccgtacggtgagaacagttcgtagtcatgtagccaatcaagcttatctcaatagctttaaccagattggctttgaatacgtaagactggtagcaactttagacggaagaacttcaaaactttgcgcaactcttgatggttccgtatgggagattaacgatccggcaaagcgcgtaccgccgttgcatcctaattgccgaagtattctggtacctgtagagaaagacgggaaattagttggtgaacggccatttgttatggacgaacgtcgagttaaagacatcccgaaagaagagcgtagccagttaatagggcagctagatgccaatactacgtttagagagttcttcaagaagacagatgatttctttcaaagagaatggttggggccgaaacgttacaagctctataaggaaggaaaatttgattttgataagttcttcgatccagaggggcggttatatacattggaccaacttcgaaagttggatgagcaaacctttaaggagttgggcttatga

SEQ ID NO: 46050 - DNA, 231 bp, Acinetobacter baumannii
atgagtgagtcaagacatttagtgctaaagcgtcaccctactttgaaaggttatctggttatttgtgatgaagaaactggacaaccactagctggacaaagagcagtacagatgaattctgatgccttaaatggacctgcaacaattactgtaacttttgaagcatatggtgctcatggtgttcgcttactgactgatgaaccaaggccgactcaaacaaagcaaatgtag

SEQ ID NO: 46051 - DNA, 390 bp, Acinetobacter baumannii
atggaaccagtttccactagcggttttacagcacttttaaaattatatgggattgcaatcatggtgactttagcagtcggtttggttgcagcagttgtattaatgactcgtatgccacgctcaccacaagagtgggcagttggtttgatctgtacggttgtatcaagtttggctggcggctcattcattattgtgaagtggggacttcatgaatgggttactgatgtatgggggatgattgctctaggtgggttcttctttgtttgtggtttacccggttgggctttagtccgttggatttttaattttatagataaacaggaaggtaaaacgatcgttgaagtgatcaaagagtttaagaaagccagaaaagacattgaaaacagctaa

SEQ ID NO: 46052 - DNA, 1935 bp, Acinetobacter baumannii
atgttgccgacttataaaaacggggcaatgacaacagagctatatccaacgtctagctttgctgatgctttggtatctatggcactcgatgacaagattggccgccgttcgatcgatgagattgatcttgaaaacatctatcggacctataatgatgtagttgattattttggtacgccgctagcggctgagttctgtactaccattgatgatacgaatctatcttttgaagagctggttaccaatctttgtgatgcggtgttttgtactgcatatcggcaaaacaataagctcaagctttattttgaacggccaactgataactcggtaatgctgtttaacttcaggaatatcattccggatagttacaagcatgacctgacctttggcgtgatggatgactacgacggactgatctatgaatacacggatccgaccgacgatagccgtatcaatatctatttaccggataaaggagccaaaaacccaaaagaggtgaaatctgttggtgtacgaaacaagtggcaagcgcatttcaatgcataccggatttggaacaagatgcgcttccagcgcaaatccattacctttgatgcggcaccagaatcagaattactggttttacgtgaccggattgctgtagcggattatcgcaatggtattcatcaaagcggtgaggtggtacagcaagaaggtttagtcctcaccttaagccatgatgtagatttcattgcaggcaagagctatgtgatttatctgcaaatggcggatggcacagtggacctgattcctgttacaccgggttcagccaaaaataaggtggttttagggcggttgccgaacggggccttaaagctaagtcctgatgattttgtaaataccatctatacagtagttaatgatgatactaaaggttcattgccttatctggttgcaaaaagagaaccggttgaccagttctctaatactattacagcaattaattacgatgagcgctattacctcaacgataaagactttattgacgtgccggttgatgattctccaatttacattcgatatgaccagctggatattaatctggcgcgtttatatcagatgcaaagaggggatttgccaacgactggcgaaatcagttttgtagttgaatctggtgcactagtttctagttcgagttcttatcgaccggaaaccagatttgtctataaattcgactacaactccagtccgccgaaacaggaatttattgcccctgcagcgactgaactacccgccattgatactggtgagttcccacctgatctggtggtaaatctgactattaaaggtgctgttgttgggcgtggtggtgatggcggtttacctcatttggcatttggcgcatgggagtccgatccggattacaactttactaaaacccgacgtgatgggtttcagggagcacccggtttattgaaccggcacagcaaactaaacctgattattgatggcggcactctagctcgaggtggatctggtggtggagcaacaccaagcggtatttacactgggttgtcttatggtgttcaaggtattccgggtggagctggtgcaccatttggacgggtcatgacaggccagccaatttcaagcgactcacaagattggcgctggtattttggaagttacttcaatgtcttaaaaattactgatgccgaagcttcggtacccggaaaaggctaccgaacccaaaatgaccgttatggatccccattatcaggtgatggcggaaactggggcgaacgtggtaccaagtctactaatgatggaacatggaactggaaataccatggcacaactgaaggtcagccggggccaggtggacctgcaattgtgggagttgcaccactgacaactcaattgattaatggagggaaaatcttacaaaccctttaa

SEQ ID NO: 46053 - DNA, 1269 bp, Acinetobacter baumannii
ttgcagccacgagatcgtagtcgtgaatcctcacaagcatgggtacagaaaactgctaatgatttagaccccgaaagcctaggccgctcaggtcgggcagacacgggagcaccgataactggtgatgatttagttgtagaatcaggaaatggtcgaacaatggctatcaagcttgcctatgagcgcggtaccgcagatgagtataaacaatggttgattgatgaagccgattactttggctttagtagtgagcaggtccaagcaatagctcaaccgattttgatacgtattcgtacaaccgagattgatagagctcaatttgcaatagatgctaaccaagatgataagttgtcttttacagcaactgaacgtgctaaagctgatgctaaacgtttagatgagaatttactggcactttttaatccgagtgaagatggcgatttattagcagtaagtaatcaaaagtttattcaaggttttttaagtaaattaggtgatacagaagctgcccagtacacaacgaaagataaaaaaccaacacaagcactgataaacagaatcaaggccgcaatttttagtaaagcgtacaatgatgatcgtttgctagaaatgatggctgatcatacaaaaccagatcttcaaaatatgcttaatgcgcttggtgttgctgcgcctaaatttattgaagcgcaagctataagtcgtggaaatgttcaagatatatcagatcaaatcgttgatggaatggagcaagccattgatcaacgtgttgctaatgcaattattgatgcagcaaatacaattttatctgcaaagcaaaatgatcaagatattgttgagtttgtaaagcagcaagggctttttgaggatctaggagaaggtgttgctgagctcgccgtatttctcgccaagaatagccgcagttcaaaaaaaatgagtatgttatttaaagcattagctgaatttgcagagaaacaggctttagatagtagtaatgtaggcttgtttggtgaacctgaaccagtaagtgtaaaagatgctatccaatatgcacaacaagtgcttggtgatgatttcattagtgtgcaaatgtacgattccttggtagattccagcagttcaagtagtcctaaaataattcgattaacgaaagagggggctgaacgtttccacagtgctttgaaagttaaaattgatcaaagtaatgacaaggaaaatcaagaagggaacaaaattaatgacattctttttgaagaattagaagtttag

SEQ ID NO: 46054 - DNA, 3831 bp, Acinetobacter baumannii
atgtccatcttaaagctcaaaccaatcactaaagacacagtattggttgcgatttattacatgattgatttcatgcattatcagagcaatattgctcgatttttccttcttataatccataagcaaatagaacttaacttgtctgtagcaaagcaagctttagcttttgcccgtcaagaaagtgactttccaaaattggatgaagttattgaagtcttatataacgaggctatcaaaaacattgatgaatcagttatccaacaccttaataacagttccagaaatgttattgaacagctagagactattgtcagtctttttgcttgcgataaagagctgaagccatacaccactaaaaagaataaaacactacaggttattggtcttaaaggcatcaaattaaccaaagctaaagagtttgacccctatgccttttattatcagggtgaaattcttgtacgctcaaaacatcttaaagctattccagactctcttctttcagaagatcagcaacttgtaaaaggattattcttacatgtatcaaataccaattcagatgtggaatcagttggcgaatttcgtctcagatccagaggaccaattgtttctacaactggatcaggaaatgatgaatttgaggcttcagaagcaatcagaaatgatggagaaattggggtactccgagacagtaattctggcttatcaaaaagtgatgatgcaagtttatctagcgtccgaaatccaagaaatgaatcttcagatggaaatagtagagccaatactaaccggattaacagcagcggaggcggtgaactatctggtaagagatcatctcttaaacgagcaagagatcgatcaattgtacaatctgctaaatcagttagagctgccatagatgaaaagctagaagctcaattaaaagcagataatgtagaaacaatttggagcgatgcttcaaatattgacgcagctttgccatatctgcaaccggcacaacgtggtgatgttttaaaaactgaaaagcggttaattgaggaaaataagaagggtattctttttacaaacggcactggtacaggtaaaacctttactggtctgggtgtagcaaaacggtttatcaatgctggccttaagaatattttaattgttactctaaacgataaaatcgctaatgactttgtcaaaagctcaagccctttaaatatcaaggcttacaaattaaaaagtattaaagaaaatggcggtgaggatcactcagtcgtggtcacaacctttgctaattttggtcaaaataaaagtttggttcacaaacattgggatctgattttaattgatgaggcccatactctatcgcaatcatccgatggtaaagcaactgcagcattaaacaaactacgagcattaaccgggcatttgcatggttttagtgagtggtttgaagataagtttgctgagcagatgccaattgaagaatttgatgaaaatggtaaagaaacagaacaatatctaagcgcttataacaaaatgcaggtccttcgaaatgaacaacgaaagatctggaatttgaattggaaacaccagaaaagtaaggtcaaagttgttttcttatctgctacgccatttagctatcacttttcacttgattgggcggaaggctatttatttgattatatgtctccttcagtatctgttgatgaccaaggtaatttagctgaaggctttagtaaggctcgagagcacttctatatgggaaatcttggatatcgaaagcgatatggtaagttgacgcgaccagaagctaaggtggatacaggtgtacttgaaagacagttcgccgaaaatcttaaaaacactggtgctatgtctgggcgggatttagaagtaaattttgactatgatcgtaaattcattctaattggctctcgtgttggtgaacttattgatgaaggtttaacttatcttcgcaatggttataaagaaatagaagggcacaaaacacgaacttttgaagaatgggctgctcagactggtaaaccaacaacaggctggggacgtcatgcatctatgcaagaatatgatcggctatttactggcaaccgatttaaaaacatatacgaaattattgcaaaacgctttgattacttagcaagacgccgtttgttagaagctattaaagctgaagcttgtgttgatatggtgaaaaagcacttagcattaggtcgtaaagtagtaatttttcatgactataacgagggcggtggttttgcacctttcttgattagtaagcttgatatcgaaaaatatgaaagcccacttagagaagatattgagcttgaatataatgcattcaaagaaaatagaccggatctagtaaatctcaatcttgattatgattcacctgttgaaactttaaagaatgcatttcctaatgctcttttatttaatggccgtctttcaaagcaacaacgtgaaactaatgtagcgttatttaatactgatgatagcgggcacgatattctcattctgcagtcagatgctggttctactgggattagcttgcatgatacaactggtaaacaccagcgagtactcattaatattggtcaaccaacaaagccagccaagttgagacagacggaagggcgtatctatcgaactggacaagcatcaaatgctattcagagatacttgactactggtactgcatgggaacgggctgcatttgcagacacgattgctggacgcgcagaaacagtagataactttgcaaaaggtgctgatgctgtagtaagtatcaaagaagcgttaattcaggcttatgaagaagctaaatatgaagagccaagtctaaatgatggtattggcggtaaagcatatgatgaagaaaatgcccgcattgctaagttaacaccatttgatcaagcactcacattctactataccaaaggcaaacgttctgaaagtcgtgataaccgcgaaggtaaggaatggtatgcaacgcctgaacctctaggattcaaaatgattgaatgggcaggggtacacactggcgattctgtgcttgaacctagtgctggtgatggtgctattggtcgttttgttcctcaggatgtagagttgacaatgattgaaccgactgagtctttagctagtcgtgctcaaatggcaaatacaggtgctaaagtaattgttgatacattcgaatctttagaatcattgaataagtaccatgcgattgtgatgaatccgccatttggtcatgctggcactttggcaattcaacatatcaagaaggcttttggtcatctttatgatggtggtcggattgtggccttggtaccacgtggtacgatggattctaaagtagacgaatttattgaaagcacacctggtgcaattttgacagctgaaatctggttacctcaatcaacctttaaaaatgctggtaccgcagtttctactcgcatcatcattattgaaaaacatgcaggctctaatgatgttccagtaacacgagaattagactttacgcaccttacaagtgttgaagacctcttttcagaaattcgtgatatcgcaatgcctcctagaaaactacgtattgatgagcagcttgctaagtacgatctttatgtcagaactgaacgtagcaagtatgtattcaatggcgacggcgttgataaacctcagatcaagaatatcatgctcaaattctggggctcagaagttaatgagtttgatgaaattgttatgccatataacaagtctgctgaaatcattaagaagattgatgaatttgagcaagagaatagtattaatctagctgcttaa

SEQ ID NO: 46055 - DNA, 744 bp, Acinetobacter baumannii
ttgccagcatatggttttggcggtgaatatttagattttgaaattgactttaaagagttcaatcgaaaatcaattattagaatagctaattcgattgtatctaaggctcaaaaatttaaaaaatcatataaaaatttatctcatgttaatggcaaaccatttattttaggtcttaattcttttgatcgtcctcattcccactttataggtcatcgtggtttaattgctgttctctatggaatttatcttaatgaggaaaaggccatttccgataaactcaactatttaccaagagaaagaatggattttattgagaaagataatggagcagaaattcctctaggtttctttactacttcagagtatgaagatattagtgctgtaatttataacccttatgcaacttgggggaaagttcgagcattagctgaagtaactgaagcaaataaaactactttctttaacgcactttacactagggatgacgtaagtgagagtacattaattcctgatatccacaaaggaattcctaaagaagaatatacagaatcaatctttgatggtttatatatttttcataatcctcatgctaaatatccattccctgattttttatttaatgatcctcatattgctcattttagtgtagatgatcatggtaatcttcttgaaagtgttggagaaaaatttttactctcacgaagtttaattagttcatatgcaagttcaatgattcccgaataa

SEQ ID NO: 46056 - DNA, 189 bp, Acinetobacter baumannii
gtggaacaaattaattatgccaatgcaagatcacaattttcaaaggtcatggaaagagtgctgttaggctacgccgttaaaattactcgaaaagagaaagatgctgtggttctaatcagtgaaaaagcataccttgaatataaaaatgcaatgtttgagctcaataaattaaaaaacaaagatttttaa

SEQ ID NO: 46057 - DNA, 1269 bp, Acinetobacter baumannii
atgaaatataaagggataatttctttatcattattaatgagtattactttgcagcaagccaaagctgaaagcgaagataactcggtgctaaatgaaaaaataattaaattacaacagcaaatagattatctcatggagaggcagaacttaaatcaaaataacagattgaataaagcacctgaattgagtccaaacaaaacatcaaacactgataagcctgtttcggctgatcagactaaaattaaattttatggaaatatacgggttgatgctgcatatgattttgaaggttcaacgcgttcaattgcgaataaaacagggtcaataccattagacaattcaaactcaacaagtaaatcattaaatgtttctgctgcgacttcacgtgtaggggtggatatcgttaagccgacctcgaagggagatttggttggaaagctagaagccgatttcatggggagtggtggagataacggtaatggttcggttcgggttagacacgcttatatttcactaggaaattggttaattggccagacgacttcaccttttgtaaatagtgatactgctccaagtttggttgattttacaggtgcgatgggcacaggaactcagcgtaatatacaggtccgttatcaacacattgttgatgccaaacaaaaaatattagtcgctttggaaggtggtgatgttgaaaataaaaatgtagaaggtggaagtcgttttcctgcattaaccatgcgatatgaatttaagaatccaaatttattggttcaattgcacggcatgcttcatgaaaatcgagcaatttctaatgcgaatgaggagcaaactaaacttgcttggggagcgggattaggcacgaagtttaacctttctggaaatgatgcgattgtattcaattactatcacatagctggtgataatcgttacatgctttattcaaaagataatgatgcattctactttgatcaaaatcgaatgtatttaagtgaatttgattctgtcgagttaggatatatgcgcaaatggaatgaaaatttacgctcttctttgtccgttggtagtcttgtctataaagattcagatttttcagaaaataaccctgatcaaaataaaaggctaatcaatgcaagcgttaatttattttggacgcctgttgaaaaagtcgatcttggtgttgaatacacttacggtaagagagaaacattttcaaatttagaaggaaaattatctcgaatcaacttattaggtcgatataacttttaa

SEQ ID NO: 46058 - DNA, 678 bp, Acinetobacter baumannii
atggcaattggttttagagtgctaaaaaacgacagaaaagttgagcaaaaatggattgaacaatatcgagatctaccagtcgctaatgtaagtgactcaatgaatcggatgacttcaggtggagctcaattaaggccaatgcataaaaagggatatctttgtgggccagccattacagttaaggctcgtccgggtgacaacttgatgttgcactacgctatcgatatcgccgaagcgggagatgtcattgtggttgatgctggtggcgatctaaccaatgcattaattggagagatgatggttgcgtatgccattaaaaaaggtatagctggcattgttattaatggcgctattcgtgattcggttgtaattggagaaggtgaatttccactttttgcagcaggaatttcacatcgaggaccttataaagacggacctggtgaaattaatgtccctatcgcaatcaatggaatggtggttgaacctggagacttgattttaggtgatgaagatgggcttttaagcgtgccttatgcggaagttgaagagatttatctgaaagcaagcgccaaacatgccgctgaacaaaagcaattagagcaaatcgccgtaggtgaaaatgatcgtagttgggtgattaacagcttaaaacaaaaaggatgtgaattacccgaataa

SEQ ID NO: 46059 - DNA, 978 bp, Acinetobacter baumannii
atgaaacgtaaagttcttattacggggccaacattaacttcagatgcgttactgtatgctcagtcccatgatattcagttgattccaactgaaccctacatggcaaaagataaaatggaaaaactcatccatgatgaacaacctgatgcaatcattgttcgaacaggcaaactttctagagatatgatttttgcttctgataatttaaaagtgattgcaaaacatggagttgggtttgacacaatcgacactcaagctgctgctgaacgaaaaattcctgtcactattgcagtaggtgcaaatgcacaatctgttgccgaacatgcttttgcactcatgttcaatgttgctcgacaagttacatggttagaccaacgtattcgagagggacattgggacaaagccagtgctaatggtgtggagctttatggcaaaacgttgggcttaattggtttaggggcaatcggtagcatacttatgaagttagtggctcccttaaacatgaaagtaaaagtatatgacccgtttctacaaaatttgccagagctcgattatgtagagcaggaacacgactttgaaaaactaatcgaaaccagcgatattattagtctacattgtccacttacggcagagaataaacacttattttctcactcccaatttgaaaagatgaaaagctcaagcatcttaatcaatacagcacgtggtgaattaattgatcaggctgcattagtcgatgctctaaaaaataataaaattgctggtgcaggtttagataccttttcttcagaaccgccagaaaaagataatccattatgggaattacctaacttggttgtgactcctcacataggagcaaacacaacagattcacgcaatcgtgttggtcttttagcactcgaacaaatcatgagtatttggaatggccaattactaaacccacgagctatcgctaactggaagttactcaatagctaa

SEQ ID NO: 46060 - DNA, 1320 bp, Acinetobacter baumannii
atgtctacagaatactctcaaccaagtgcgatagagcgcgaaacaatgcgcaaggtggcgtggcgattactgccttttttaacaatttgttatgtcatcgctattattgatcgtggcaatattggcatggcttcattacaaatgaatgaagatcttggattaacagctacagcctttggtttcgccagtagcttatttttctttgcatattttctatttgaagtacccagcaacttagccatgcaaaaatttggagcaaaagtatggattgcccgaattatggtgacgtggggagtaatttcatctgcaactgcatttgttgagaactccacctcattatatattatgcgctttttactaggcgcagctgaagcaggctttttccctggtgtaattttatatctaacctattggttacctgctaattatagagccagaatggtggcaatattcatggtagcaattccaggtgcaaactttctaggttcaccattatcaggatttttattatccctagatggctggatgggtatgcgtggatggcattggttatttattttagaaggtatccccgccgttttactgggtatcgcttgtttatttgttcttactgatcgaccagaacaagcaaaatggctcaatagtgagcaaaaatcttggttagttgaaagactacaatttgaacgccaacaaaaaactccaatcggtcatatttcactatggcaacttttaaagaataaatacatctggtctatgattattatttattctggtgcttctgctgcaggcagtacaatgagtgtttgggcaccgcaattaattaaatcattcggtttaagtaatgtagaaattggtttggtgaatgcaattccttatggtatagcttctattgccatgattctttggggccgcagctcagatcgtaaaaatgaacgcctttggcacacagcaatcgctctattgatgatctcatttggtttattaattgctttgttcacatcttcacttattggcacaatctttttacttagtatcgttttaattggtgcttattctgcaaaaggtccattctgggctttagcatcctcatggatgtcaccgactacaacagcggcaggcctagcagcaattggtgcatgtgccaatctgattggtggcggaatgatggtgaatatctatggcgcaatccatgatgcaacaggaagtcatgctatcgccttacttccacttgcagccttaaatctcgtgtcagctattatggttttcatcatgtctagaaaaaaagctgttttgtttacacaaccacaaagtacttcataa

SEQ ID NO: 46061 - DNA, 699 bp, Acinetobacter baumannii
atggttaaaattaaacctcacccagcaacaagcggaaatgcatcggctgatcgccttttaactttgttaactgcttttagaataggtgataaatctttaaccctagcagaactcgcagaacgaacagaattaaataaagcaaccataatgcgcttaatcgtttcgctagaagattttggttttgttaaccgtctttcggatggcagatatacgcttgccagcgaagttatgcgtttaaatacaatttatcaagatgctttagatctagaaagacatgtcatgccttgtttacagcaacttgtagatgaaattggtgagacagcttctttttacgttaaacatggagcttatcgtctttgccaatatcgaataaactctacccatcgactgcgtgttcatgttcaaccgggcgaagttcgaccaatggatggagcagcatgcgctcaagcattgaaatcaacatatgaacaagttttagcaagaactgaacctttttattcaacgggtgtaacagaaccccacgcagctggaatggcattgcctgtgtttgatgctcaaaatgaggtagtaggagccttactcatttcaggcccatcaagccgttttactgcggaagttgcaaaatctgtaggtgattttttcttcaaaattgcagatgacttaacgaaaagtttaggtggtaagagtattcgtaattaa

SEQ ID NO: 46062 - DNA, 621 bp, Acinetobacter baumannii
atgcttacgctttcacaaaagctcccagattattttgaatatattgaaaatgatgttagctactcattacgtcaggttcagtatcctcaagatataccactattacaccgctggatgcatgagccacacgttattcctcagtggcaattaaataaaagcgaaatagaactcaaagtttattttgaaaaaatgctagctgatgatcatcaacgtttaatgattgtaggaatcaatggtcaagacgtgggttatgccgaaatttatgaagggaagcgtgatcgcctagctcgttattataaaggtgaagacaatgatttaggttggcatttactatttggggagaaatctgcttttggtcaaggctttttgcgcccaacaattcgtttattgaatttctatatttttgaaaattccccaacaaatagaattgtaggagaacctgatcatacagtgaagccttatgcggctgtagtagaagacatgtgctatgaagagcagggcttaattccaatgccggaaaaaacggcaatgttgtattactgtttccgtgaaaagttctatgacagattttttgagttataccaggcatcgcaacaaaaattacagcaaaaagcgagttaa

SEQ ID NO: 46063 - DNA, 408 bp, Acinetobacter baumannii
ttgggcacgtggtgcgaaacggttcgtatgaaagggggtgatttgccagatgggcttcatatcaatcaaatttactggttgatgcgtgaagctggcaaagaagtacaaaaaagtaaatcttatattcgatgtgagatcagtgattatgaggcggatcaaattcaagcacttttacgaagtctattaaattctgataaaacagattttacaactaagtttgcattaatttgtttaattaaaaataaggttgaaaataaaggattgttgaaggttgctcaagaaacaaaccaatctaaagctcaggtcgcaattatggtgagttgcgctagattttatttattaggtcatgataaaagattaagacaaaatggaggttcaaatgaaaacatacactgtaaaactatatga

SEQ ID NO: 46064 - DNA, 1353 bp, Acinetobacter baumannii
atgttggtagaatatctcacttcactgcatgaaatttatcctgtgaaacatgagtttgcagggtatccggctgcaatgacattggcagatcgcgtacattcagatcatgatattgcgccacttgaagccagcaaaagttaccctgactcaatagagaaagtcttacacttttcaggtaaagcgagagacatacaagactttgagcgctttttagaacaagccaagtctgccaatattcaaaacttgttattgcttacaggcgacaaactcaaagaacatcataatggacgagatgggcagcctcgtagtcgttacctagagtcggtaaacgccgtaatggcagctaagcaacatggtggttttcgtattggggttgcttttaatccgtttaaatatgtcgaagctgagcgtgatgcacagtatttaaaactgcataagaagattaaagcaggtgctgactttatcattacccaattgggctatgacattgaagccttaaaacaagccaaatcatttttaaccaagcatgattattcgcagcaaatactagcttgcgtcatgccactgactttaggccgtgccaacttcatggtaaagcataaagttgcgggtattgtgattactccacacatgctaaaagtcttggcaggggaaaaacaggcagggcatacagaccgtgtttatttgcgctgcgctttacagattttaatatgtaaacacttaggatttgcgggtattcatttatctgcttgtcataagccagaagagcaaatgctgcttgaaagttacatcgagcaatacagacatcttaaccttaaggccttagaagagctttggagttcactttggcaagtcaagacaggcaaagagtttacccctgaaattgctcgtttttcacgtcagccaacatctaaacaattaattaaatatcgtcagctacatgttatgcatgaagcaatgtttggatcaaaaattgccaaaggcgtcggacgttttattttcaaagcatctttttgggaaaacgctttgatcgccaaactcttacttaaaacggaagtactgagtaaacatagcctagtcggctgtgaaagctgtggtcagtgccgtttaggtgacactttatatatttgccctgaaacatgtccaaaaggcttagccaatggtccttgtggtggaacaactttagaccgctgtgaatttggtgatcgtgaatgtattcattctgtcaaagcaagactagccaaagcggttaaacaaactgaaatattaaaagagaaactgattccaacggtgcctcttgaaacgagaggaaccagttcttggaaaaactggtatttagcgactgaggcttaa

SEQ ID NO: 46065 - DNA, 207 bp, Acinetobacter baumannii
atgaaacagtggaattattcaaatgctagagcacaacttaccatgattatggatcaagctgttgctgggcatcctgtagaaattactcgcagaggtcgggaatctgcagtaattattagcaaaacttcttatgaggcttacaagaaagccgaatacgatgttgcttactataaaatctcagtttctaaagaaaattcagaagcttaa

SEQ ID NO: 46066 - DNA, 492 bp, Acinetobacter baumannii
atgattttagaaaaattaggtttgcaagacggtattaaaggaggattgttcctcaacacatttgctgtatttggaacacttgcagctgtattgttaattgaaagagtgtcgcgccgtaaaatggcaattcttccaatcctcgtatgtactattgcgttagtcgttgtggctttagctgcaaatcaccccacatggattctgattggttttttagtttttgcatttgctaatgctattactgcagggatgatttcagttatccccggagaagtgttacgcccagaaataagttgttcaggtacaggttttgcagcagcaatgtcccgtataggcgctgctataggtgtgtttttgatgcctatgtttgttgcagcacatggagcagcattagcagtttggatcgctgctggggtgtgcttaatagcaacagtaattacctacctatttatgcctgaaaccaagggtaaatcaatgagtgaaatttttcattaa

SEQ ID NO: 46067 - DNA, 834 bp, Acinetobacter baumannii
atgaatcaacaacaagtggtttccccacctcagttaatttcccaagatcaaatagcacgtcgctttatgacaaaactcgcttggctcatggcaggcgggatgtttattgatggatttgttttaggttatttaggtgcattaatgccctctattacagccgatttgcatttatcaactacatggcaaggcttaattggtgcagcctcactcattggaattttctttggtgctccaattggtggatatttttcagatcgctttggtcgtaaaccactattcatgatcgacctttttatattcttcatatgctcaattggacaattctttgcatctgatccctacacgctttttatagctcgtctattaatgggtgtcgcgattggaattgaatatgcagtcggttggccgatgcttgcagaatttgctccagctcgcctaagaggtaaattattgattttgactgaaacctcttggtttgttggatatcttgtctcgtataccctaagttttattatgattgaaaatcatattgcgagttggaatgtgattttaggaattagtgcaattccctctttaatcgttttattaatgcgtagtggtattccagaatctcctcgctggctcatgagtaaaggacgtaaagaagaagcttctagaattgcacataagtattttactgaagaagacaagaacgatattttaaatcagaagcatgcatatcaaaggcaccactttagtttctatatattttattggtacttctgcaccttatttcgcaattggtgtatttattccaatgattttagaaaaattaggtttgcaagacggtattaa

SEQ ID NO: 46068 - DNA, 1125 bp, Acinetobacter baumannii
atgaaaattaagcgtattgagctctatcaaatcgatctaccttactctggtggtgtatatcatctttcgggtggccgtgaatatcgtagcttcgatgcttccatcgtaaaaattattgcagataacgggttagaaggctggggagaaagtacaccatttggttcaacatatattgcatctcacgctttaggtgcacgtgccggtattgctgaaattgcgcctcacttattaggtaaagatccccgtcaagtcgatcgtattaatgagaccatggataatgctcttgttggacataaccatgccaaatcagcacttgatctagcgtgttgggacctatttggtaaatcggtaaatttacctgtatgtgaattattaggtggttcaactggtcgtagactacctgtaatttcttctattcatgccgacacccctgacgcaatgcgtgaaaatgtagctaaacatcgtgaactgggttatttaggtcactcagtgaaaattggtgctgtcgatagcgaaggtggtccagtcttagatgctgaacgtattaaagcaagtttggctgatcaaaaaccaggtgaattttttattgtggatgcgaatggtggccttacaccagaaatggcattaagaattttccgtttactccctaaaggtctcgactttgttttagaagcaccatgtaaaacatggcgtgaaaccaaatcattacgtcaacgttgtgatgtccctttctctcttgatgaactgatccagcaagatgaagatttaatccatgcaattactgaagatctcattgatggtgtaggtttaaaaatctccaaagctgggggattaactcactcacgccgacatcgtgacattggtcttgcagctgggctttctctaagtgttcaagaaactgtaggttcagatattccatttgcagcaattgctcatcttggagcaacgattcctgagagaaacctacgttgccttttagatacacgagggatggtaagcattcacacagcagaatttgatgcaccgattgttgatggcggtgtgatggtccctaacaaacctggccttggtattactgttgatgaagatttattgggttcaccagtcgctgtttggggtgactaa

SEQ ID NO: 46069 - DNA, 1098 bp, Acinetobacter baumannii
atggtactgcctactaaaatgcatgctgtgctattaaagggacacggtggtcttgaccagcttgaatatcgtactgatgtaacagttcctaccccagcagatgatgaagttttaattcaagtttctgcagctggtgtaaacaatacagatattaatactcgtattggttggtactcgaagacaaatgaacaagctacaaatacaggtggtgctaatggtcttgaaagtattagcgatgatgatgcatcttggtcaggtacacctcttaaattcccatttattcaaggtgcggattgctgcggaaaaatcgttgcagtcggtaaaaatgtagatccatctcgtattggtgaacgagtcattgtccgcactatgttacgtgcttatgttgattatcgtccttatgagtgctggacttttggtagtgaatgtaacggcggttttgctcaatttgctacagttaaatctgccgaagcttacaaaatcaattcagattggacagatgaagaattagcttctattccctgctcttattcaacagctgaaaatatgctacaccgaattggattaggtgcagaaactgtattaattacaggtgcatctggtggtgtaggttctgcagcagtacagcttgcaaaacgccgtggtgctcaagttattgctctttgctcattatctaaagctgatgaagtattagcttgtggtgcagatcgtgtaattgaccgtaatgctgacttagttaaagagttaggtaaagaatcgattgatgtagttattgatttgattggtggaccacaatggccttctttattagaagtcttacgtaaaggtgggcgctatgcaaatgctggagcaatcgctggacctatttcgcagatcgatctacgtacagtgtatttgaatgatttgactttaatgggctgtacattccaagaagatgaagtgtttaccaacctcatttcatatatcgagaaaaatgaaattcgtccattagtggctaagacttatcccctcaatgaaatcgctaaagctcaagaagagtttctgagcaagaaacatctgggcaagctcgttttgactgttccatcagttgaggtatag

SEQ ID NO: 46070 - DNA, 567 bp, Acinetobacter baumannii
atgagcaaagcccaagacattctcaatactgccgagagactttttgactatcaaggctttcatgcaactggaattgatcagattgttcgtgaagctgaggtaactccacgaactctttatcgacactttcactcaaaggaacaattgattttaaaagtccttgaggaaagagaattacgcttttttagaaagctacagcaatgcattgagaataaagaaaactctattccaaattgggtagccgtttttaatgagttggaaaactggttcacagaagaaagtgacagaggatgtttatttttacgtgctctagctgagtatcgtcataaagagactgaaatagtgcagaccgtgcttattcataaacaacgcacactagattttttaatgggccaatttgctaaaacttcatctgatcattttaaagatagagctgaaagtttgatgctcatcattgaaggtgccgttgccttagctcctgtaatcggtggtaaagcagcaattcaaagagccagtaagttagcccatcaattattacaacctacaacccacccactacttcactag

SEQ ID NO: 46071 - DNA, 423 bp, Acinetobacter baumannii
atgccaactagatataacacaggcgagtatagctacgatcttgaatatcactatggagatatgtcagcaagcatggagatgcttagagcacgtttaattgaattgttgactcctcatctgtctggccgttatgtgaaatggagagaagcatatttcacatggtttacaaagtgcggcggggattcggggtggatgttttgtgtaggtccacacgaatttcatattgatggggcgttaaggcgctattactcaggttctattgatattacctacaaccagaaagatcgatatttcttggtgggtgagaaaaagaaagtcaaatgtaaggcttgtaaggggtttggcttcattcgagatgatgggtgggggcatatagataaatgtgaaatgtgtgatgcagaaaaaggagccagccatgagtga

SEQ ID NO: 46072 - DNA, 423 bp, Acinetobacter baumannii
atgaaagcatctaaattgattagagataaaggactgcaatacgcgaaggaaatcgtagattcagcacccgataacgcaactgaatggaacgagggttatgagttccaatgtggtcaaagtgtagaaatcagcccagcagatcgtgagaagtattttgtagatttggttgagcttaaacgtctggtggagtctttgaaaatcatcaacgatttaggtggagttgagaagctaacgcctgcattcattacgacagataagcatgttggttacacgcatgttcgcatggtgggaaatgggagattgagctttcttgatgatttttgcgacttcattccagatggttccatttcaattaagcgtgtgatgactgctatccgcgaccacgaatcaatatacggaggcggtgaatctcatgccaactag

SEQ ID NO: 46073 - DNA, 750 bp, Acinetobacter baumannii
atgcatgagattaccttgaacgaagtgcgtcaattaatcgcttctcttcgcactgtttacgctgctcagttcaataagcaatttccagcaacaggcgaaagcgcaattcctctgtcagtggttgagcaaatcgcacttaaaacactggttggcgttcaacaaaaccaatttaacaacgcacttgctcgtttacttacagcaggtggacgctttatgccgtcatttgccgagtttcgcacctggtgtatcggtgaaagttggatgtctccagaagaagcttggtctcgcgcatgtaagtttacaactgaccgttccgtggttattacccaaatcactaagtatgcattagacgaggttatgtatttgatcgaagccggccaaatgcgagcagctcaagataatttcttcgggacctacaacgtgatggttgctaaagctcagttaaaaggccgtcagcaagagttttacactccaccgctacaactagaacacaaagaacctaaacacgttcctgtgagcaatgacgaggctcaaaagcatctcaaatcattgatggaaagattaaaaatcaatggtcgtaaacctgcaccagttcaaaaacttgaggcaaaagaaaaagagcctgagcttgcaaaagaattaggtccagatcctttcgacaatccgcacgaatacgctgagatgtgccgccgtgaaggtatgccaatacctagaaatattcttcagctaattgatggggcgaatgcatga

SEQ ID NO: 46074 - DNA, 930 bp, Acinetobacter baumannii
atgtataaatatctccaccatatcagcgactttatggttgctacagcgcaccttagcccagttgaagagtgcttttatcgccgtgctctcgatttctattatttgaatgaaaaaccattacccaaagaaacccagtcggtttttcgtcggttacgtgcaaatacccaagaagaaagggatgcagtattaattgtgctgcaagagttttttgtggaagaggaagacgggtttcacaacaaacgttgtgattcagaaatcgccgcttatcaaaaagtaggggataaaaatcgtgaaaatggtaagaaaggtgggcgtccacgtaaggaaaaaccaaaagaaaaccaaagtgaaggcgactcggttaattctgaaaacccacaaaaacccagtgggttaattttgggttctgaaagtgaaagccaaaaaaaccttaaccataaaccgttaaccgataaccaatatatagatagtagtagtaatgcgcgtgaagaaaattcgcaatttacaccaatccaatttgctcagtatcagatcgatgatcacaagcgttactcaatgcgtgaattcatttctgaatacagcgagtttcaatacgatttcatttcacttgctcaacaaagatttgtttcggtacctgaaatcgacttgagaaccatgattcaaaatttcggtgactggtactttgcaaacgaatcaagttcgttgaatacaccaagcatctggttggttaagtggttctcttgggttcaaaacaacgagaaacaagttgctgcaaaccgcaagaaacaagagcaaatcacttcaaccggtcaaaaaccacaagagtcgggttacttcgctaatctttttgaagaacagagcgaatctcaaatcgtggatgtaaccccagcaaaaaagtttccaatgattgaggaggtaggtcatgcatga

SEQ ID NO: 46075 - DNA, 357 bp, Acinetobacter baumannii
gtgagatatgcagcaagaagaaaacaggatatttccgtttccaccacaccgctagaggtggtaattcccctggaacaaccagtaaagatctattcggctaaagaattagcagccatgccgctttcagttatgaatgccgcaattgaggctcaggaaagattttatcaacttgaagaattaactcatatggggggggcaggctatagcagttcgccgtctcatggaggatgggcacaaactaattcaggtgaaagaaaagtctcgtattcgctacaaaatcaacaacgaatttattcctccaagaattattcgtcagttggaaatgcgcggtcttgtaaaattaggagcagtcactga

SEQ ID NO: 46076 - DNA, 297 bp, Acinetobacter baumannii
atgaacagctttacacagcaaatcaaagtttctcgtcagcaaagtgaaatccaatctttttatgaacctgcattgcgagtgcttggtcacctatttgaggtgaaaaagcaaaatttacgtaacaaaggttatgacgaaaataatgctgcggttacgaaggttgagttttcagaagccatggctcgtcaatttcgcataacgcagtggttggcacagcagattgtaaccagcttaaccaaagcgtgtttggttgattcttttggaggctatgttaagccaaaggatggtgaaaagtga

SEQ ID NO: 46077 - DNA, 273 bp, Acinetobacter baumannii
atgcaaaacaatttatcagaacaaccaatcgaactcaactcgcaagattttttagtaggcgatgtggttgtgcttacaccgcaaggctccaaagatcacttgcttgaaatcattgactacaagtacacgaatgatttgtttcgagtaaaggttatctcctctggtgcttgtggaccaatccataaaagccagattcgccacgcaacagttgcagaacttaacgctaaacgccgactaacaaaagctgagcaagcattagcggaggtgtcatga

SEQ ID NO: 46078 - DNA, 357 bp, Acinetobacter baumannii
atgagcagagtatcaattgaattaagtgcaagagctagaaatacacattcgctcatattgcaatctcttggaggtgtggtaaacgcggcacttggagaggaaattggctttgatggcccgtgggtgtctaagtttaaaaatgataagaaaaacaatggcttgaccgatcttgaaacactttgcgtaattttggacaaacttggattgaaagttattccggaaagctatgagtgttacgacaaaaaatttgtggaagcaatcttcttcttagctcgtatgcagattactcactcggcagatattaacgactaccagtttgcgtctatagctccacgcttagcggaattcgggtattaa

SEQ ID NO: 46079 - DNA, 216 bp, Acinetobacter baumannii
atgaaccttaagtcctgtattgaagacgctggtggcgtttatcaggttgctcagtggatagatttgacaccaagagctctgtacaagtggattaaaaaagatgcactccctcatacagaattctctggcaccactaactactgtgaaaccattgaaaaaaaatcaaacggcaaagttaaaaaagagacccttttaaaagttggtcgccctaaatag

SEQ ID NO: 46080 - DNA, 786 bp, Acinetobacter baumannii
atgaacttaaggttcactggtaatatttttatgactgatcacagaattgattttgcaaagcgcttaaacgaagctcttgatgagatggctattcctgttcgtggtcgagcagttttacttgcttctaaatttgaagtttctgcaaaagcagctggtaaatggcttaacggtgaatctattccagaaatgactaagcttattgatattgcgttatggcttggtaagggggttgaatggcttttaacagggagtgagagatcgactttaaaagaaaatggcagaattactgatttagaaatcctaacttatgaggatggagacccaatcccagatggatatatggcgattgatttttatgatgatgtttatgcaagtgctggaggtggttatttgaatatcgaacaaccaagtgcagtaaaaatgttattcccaataaatgaattaagaaaatatgatgtaaaacctgaatatgcaaaagtatttatagttgatggtgaaagtatggttccagacctttatcctggtcaaagaatatcaatcgacacctcagcaaagaagatatatgacggtgagatctatgcctttttaaaaggtgatgaattaaaagttaagattttatttgattgggatgaaatggggaaaggaggctttaaagctgtttcacggaatcctgataaagtacgttttcccgatgaatactattcacccgctcggatagaggcagataatatacaaattgtcggtcaatactggtggaaagcagaaggccgaagagttagaagataa

SEQ ID NO: 46081 - DNA, 441 bp, Acinetobacter baumannii
atgaacgtaaaagttaactcattcaactcatttgcatttgtcagcatggctgctcttgcaatctctggtggttctttagttgcttgccaattgcaaccagctttccaaacaaaagaagcacctactctttttacacctaaaactcaaccaagtacttacggcgttttaaccgcgaaaatcacaggtaaacattctggcgttgccgtaatcaaattagatagtttccgtttaaacgttagctttgattttgaagcccatccagacagttacggcgttccgggttctgaattcactgctgttgaaattactcaactcacagtaaatgaaattactgatgttaatggtaagtcatataacgatttcaccgaatttgaagacatccgaaacatcaatggccttctaaaaggcttcatcgaacgtaacaagttgttggaggcttaa

SEQ ID NO: 46082 - DNA, 339 bp, Acinetobacter baumannii
atgaaagcatccaaattaattagagataaagggctgcaatacgcgaaagaaatcgttgattcagcaccttctaacgcaactgagtggaatgaaggtttcgagttccaatgtggtcaaagtgtagagattagcaaggctgaccgagaaaaatattttgtagacctttctgaacttaagcgtctagtggagtcggttgatttggtcgaatcatggggcggcattgatgatgtaaagctatatgacttgtctcattgcaaaaacaggcctgaatcggctggatacaagttgcttcaagcaattgctgattacgaatcaatatacggaggcggttatgtttga

SEQ ID NO: 46083 - DNA, 801 bp, Acinetobacter baumannii
atgaatgaattagcaccatttgaaagttttttgaaagaactaattgcggcttacagaactaaatacgctgttcagttcaataagaattttccagtagaggggaaaaatgccgttccaatgcaaatcgttgaacagcagcttgctaaagcattggttggggttacacctaaccaacttcaaagaggcttagcgctattttacgcaagtacaaatacatacatgcctaacttcgctgaattccgtgctatgtgcatgggtgatgattggtggagcgctgagaaggcttgggttaaggcttgtgaatacactcagatctctcaacacaaaaaagtgacattgccagacggaagagagcagaaccaagaaattacaaccttgaccaaatttgttttagaccaagtttatttactaatccaagacggtgaaatgtacaaagccaaaatggaatttatcaagatctatgatgaatacaaggctgaagcacaactgaagggtaaaacccaagcttggtaccaagaaccaattttattagctcagaaaaatgagcagaaagtgcatataccagtttccaatgaggaagcgcaaaagcatctcaaatctttgatggaacggttaaagattaatggccgtaaaccagcaccagtacaaaaacttcaggcaaaagaaaaagagcctgaacttgcaaaagaattaggtccagatccttttgataatccatatgaatatgcagagatgtgccgtcgggagggtatgccaatacctagaaatattcttcagctaattgaaggggcgaatgtatga

SEQ ID NO: 46084 - DNA, 882 bp, Acinetobacter baumannii
atgagtaattttgtgcctaattcctttcaagtgcctaatgcatttgttgacgaggttttaaataaaatctctgatgctgcatgcaaaatttatttagttatttgccgtaaaactcgtggctggaataaggagatggattccatctctttaactcaatttgaagagattacagggaagagtagaccgacagttgttaaatgccttaatgaattaattaaagttggtttagtcgtggaacaaccaagcacaattcatggaaatacattcaaattaggtaacgatactagcgttggtttagtgcttaaattccctagtaaaaattttttactacctgaaatttatggccaaactagtaaaaattctttaccacttctagttaaaaattttaactacactagtaaaaattttttaccgctactagtaaaaatttttaacacacaaagtatcactatcaaaaacaactctcaaagtaataaaaaaataaataaaaaaagagggtctgtttctgaaaaacctaaaacagaaaaaccaaatgaatttaatccacgttcagttgaactacctgcatgtgtagattcagaactgtggaacaattttgttgatatgcgtatcagcatcaaaaaaccactttctgaaaacgcagtaaagctaatccttaaaaaacttatctcgtttggacctttggctaaccaatcactggaaaactcaattatcggaaattatcagggtgtatttgagcctcgccaaaatcaaattcaggaaaacccacaatctcataacgttcctgaagaaccgggttatttcactcaaatgtacgctgagagcaaccgttcaaacgtgattgacgttacgccagtgtcacaagattttggaggctattaa

SEQ ID NO: 46085 - DNA, 225 bp, Acinetobacter baumannii
gtgattctcaatgagctacatgatcgtaaccgtaaaaatctaagagccaaaggttatgacgaaaataatgctgcaataacgcgtgaagaattttcacaaactatggcacagcgttttcgcactaatcagtggttagcagggcagatcgttaatagtttggctaatgctgacttggttcaaaaatttggtgggtatgtaaagcctaaggtcggtgtacatgagtaa

SEQ ID NO: 46086 - DNA, 276 bp, Acinetobacter baumannii
atgaacacaaacaatttatcagaacaaccaatcgaactcaactcaccagattttttaataggtgacgttgtagtacttactaaagagtgtcgaagttttaaatcaaacgatttatttgaggttaaaaataaaactttgactaggttgtggactatcaaatcggagaatcatttgattctggtttcatcaaaagaaatccgtacagcaacagtagcagagctcaacgccaaacgccggctaacaagcgcagagcaagcattagcggaggtgtcatga

SEQ ID NO: 46087 - DNA, 357 bp, Acinetobacter baumannii
atgagcaaattatcagttgatatatctgcaagcgccagaaatggcgtatcccgcatattgcatggtcttgatataagcaatcaaaaagagattgctgaacaattaaaagttgatccaagcactataactcgacttaaaacagataagaaaaacaatggcttgaatgaaattgaaatgttttgcgagctattgagtttgcttggattaaaagtcgttcctaaagattatcaaagcattgataaggaacgtgttgctgcacttttagttatgtctaaaagctggatgaaccgtatagaaacggtggatgacttatttcatgacgaaatcagtggtcaaaaagaaaagcttggatattaa

SEQ ID NO: 46088 - DNA, 252 bp, Acinetobacter baumannii
atgaatgacgcacaacttatagacaagctaggtggtgtcacagcggtagcaagacttctggggattgctccgtcatcagttagtggatggaaagctatcccccttgatagaaaaatcaggctagcagttattgctgaagatcttggtttaacaacacgaaaagagcttttccctgataactatcaagatatttggattgaacttcgtccccagacgacaaaaagcaaaaaccttggatcattaaccgcttag

SEQ ID NO: 46089 - DNA, 765 bp, Acinetobacter baumannii
atgaatactcttgctgaacgacttaggtatgccatggaagttttgccacctaaaaagattaaaggtgttgagcttgctcgtgcagtaggagttaaacctccttctgtgagtgattggctgtctggaaaatccaaaacaatggaaggtgaaaatttattacgtgcctcaaaatttttgaatgttaatccttcatggcttgcatctggcacgggagagattcaatcaagcacgagagataaatttaaacaactggatatcgaagagttcaaaaagaaatacaacattagtgatagtgatgaagctcttttattttcaacaattatcgaaaaaccgtttatcccatcatctaagcgttgggttcctgttaaggcttactccaagatgggcatggatggctatttcacagatatgggttatgaaggcaatgctggagatgggtatgttccaactcactcagcaggaccaagagcctatggtattaaaggcactggcgactcaatgtttccagctatccgtaatggatggtatgtggtttgtgatccagatgcggaactcgtgccgaatgagtttgttcaggtatgcttgaaggatggaagatgcacaattaaagaatttgtcggcatcaatggtggggttttaagtttgctttctgtgaatggtggtgagcgatttttctttgaaatggacgaggttgaaagtattaccgctattacagatatcgtgccgccaagtcagcatagacaagaacatccttattcgcattaa

SEQ ID NO: 46090 - DNA, 216 bp, Acinetobacter baumannii
atggacaattcaaaacgaccaatcaaccagattattgctcgcatcaatgatgctgcgaaacatggtgaagctttggtgctaacagccgaagaagtaaagattctttctaaagatattggcgacaaggtatttattccagtccttacaaatgaacaggttgtgcagttggttaaagaaggaaaacttgggcagaaaattaataacaccaaagattaa

SEQ ID NO: 46091 - DNA, 1179 bp, Acinetobacter baumannii
atggcaaatcttgtttttaaatttagttgggatcatcggccattcccatataacgcctcacagggcaagcggcagtttatgttgccatttgcgtcaggtattcccaatctggcacccaacttttctcaagtagttggtactgcagctatctctcaaggtggaacgggggcaactacagcggctggtgcacgagctaacctaggcgcagctgcaagtggggtaaatagtgatattagtgagcttaagggacttacaacccctttatcaatttctcagggaggattaggagctgataatgcacagacagctagaatgaatttggggttaggaactgctgctgtactagcgtcaacaacaagtcaatatgatcctacgccgggacgagcactaagagtcggtgattgggggataggggctgaaggttctcgtgtatctgatatggttgctcctcttaataatggtttttttcgaacagatgacactttaacaaatgatactggtaatagtattggtccttatggtttctttttacactgtacccgacgctcaatgggtttatatacaaatggaagtcattcatttcagcttgggaaagctgcctcatattctgccctgaagtatcgatttaataatagtggtacttggtctaattggtttaatttattgactgcacaaaatactacaactgatggaaatggttttattaaagccgcttcaccagtcgttaagcttttccaaagtcatattgagctaaataacgatgctgccaagcaaccgatcacttttgacaaattaggcactggtgactatctgattaagggctctttaggctttgcacaggaaggttggtatatcgaagtacctaaggatgccaacggtaatacggtagtagcagttgaatattcaaccttagaaaatggtgatctttctattaaaacttataaacgtaagtttgatgtggaaaaggcagccattgtagctgatctcgaaaatccacttgatattccagaaggccgctggattgatatccgtctgcatgaagaacctgaaccagagcctgaagagccgttgagtgaaacaccagtggatttccagccgactaacttatctcaggcagttgctgcagccatgaatggcgtggaaccgccagaaatctcagaaacagacgaaacactttaa

SEQ ID NO: 46092 - DNA, 918 bp, Acinetobacter baumannii
atgagttcaggcgcaaaaattcgattatatgcttgtgaggaagcagttttaggaacaactcctgcaaatccagtctggtacaccgttcgccgtgttactgatagtttgactgaaaatgttactactgaagatagcagtgaagtagttgattcacgttttcgccaaggcgctgttgtaacggaagccgaagtaactggtcaactagagtttgaattatcactaggtacctttgacttattcttaaatgttctcgctttcaataactgggctgcaaatgctttaagttttggtggtggagtacgtaagtctcttaccttggtaaaagtctttgaagatattggtcaagtctttatttatcgtggtattcaagtgaatacaggtgaaatgacgatccagaccacaggcaaaatcactggtaactttggtttagtaggtagctcatttacgcgacagcaggttaatcctgttacaaatcctattccagcatcgactcgccctctggtgagtatgccaaatgttgaaaagctacttattaatggtcaatcaattcagggtaaagcttgtctgcagacacttaccatcaactttagtaataatctggaagcgatccgttgtatcggttctggtaagtacacgcctgagttttacttagagaaaatgatggatattggcgtaaatgctaatttcatgttttcagcaacatctgcttcttggattgatgctattaaaacccgtgatgtatttacattgaccttcgatattacagataccaaaggcagtaagtactcgtttaacttcccgcaacttgaagttaaggaagcaaatcaccctgatggtggtggcgatgacattattacaatagatatcaattttgcccaagtgcgtaccagtccaacgattgtacgtgctcttgtgtaa

SEQ ID NO: 46093 - DNA, 516 bp, Acinetobacter baumannii
atggctttaaaagtcggaattattaaaagctcagacgtatcaaaatggtgtgaatacaagggtgctgatggcgatgtacaggctgagttcaaagtccgtggtatcgcttataagccttttcaggtagctattgaacgggcaggaaaccagatctcgtctaaaggctatgatgtgatggtcaaagatgaagatgccaagctttaccacgagcttttaatggatgcatgcgcggcccacttaatcgaagactggaaaggtgtggtatttgccgaaatcgtagacggtaaaactgttgagtccgaaaagccatatacacctgagaatgcctcaaagcttcttaatcttggtgatattggtatttcaatctggctattcattaaagaacaggcccagaagattcaggaagacgcagacaaggacaaggctttaattctgggaaagtcatggagctctacaaataccaaaaaacgtatgcgtcgaaaacgccgcacgaaatcgagcaaatcaagttcttag

SEQ ID NO: 46094 - DNA, 681 bp, Acinetobacter baumannii
atgaaaaaaatattggctgcgggtttaattggtcttgggttggtggggtgcgctactccagcctataattatcaagctatacctaaaaatataagcaaaccgccaattggatcagttaataaagcatttgtaggggatcaaatgcttgaacagggaatggtggttgatcgtgaagttctaaacgtccctgaaaatattaaaattagttttgcttattcacttacttcaggcatttacttaaaaacaggcaaaaatgaaaaagggcaatattttcagccattcaacactgtcagtggtggggggatggttcagaaaaaccctttagctgacccatttaaagtagttatgttagatactgaaggtaagctctgtgtagtaacagtatttaatgcaaaaaactgtactgataaacatcaagctactatgaagacagtagcaattgcatcagataattccttccaacaaacattaatttatagtggaaaatttggaaataaaattaatgtcgggtaccgtgaattctcaagtaatcaagcacgtcctgcattcaataatgatgttgaatatgatttaagccaatctaagcaaataggttataaaggtgctttattggaagtaattgatgccactaatcaagatattacttacaaagttttgaagaactttaacaaggtagattaa

SEQ ID NO: 46095 - DNA, 264 bp, Acinetobacter baumannii
atgagtgcaccacaatataaaccaatgagagaaagtgaagtttgtaatgctatcgggtgggtgttaatagctcttggctttatcgcaggttttttatttattcttgcatttggtcgaattgaagtagcttcttactatggtaaagaaacggtttggtctggagttatgatagcaacaggaatcggaattatatttaatggattccttgcaggctacttatttcaaaaagtagctagtattcttcgttaccatgagaataaataa

SEQ ID NO: 46096 - DNA, 864 bp, Acinetobacter baumannii
atgaactgggacgatactaaaattttgttagctattgggcgaactggcgggttgagccgcagtgcaaaattgcttggtattagtgtttctaccgtacatcgcagagctgttgaactagaaaaaagtctcaatgcggttcttttttctcgagacagtgatggctatacactcacccatgttggaaaacatttttttgctttggctgaaaaagctgaagagcatttaatagcgatggaacgttacaacgatcaagggcaacaatcattgttccgcattgctttacctgagttaattgggcagcagttgcttcaatcaaagctaacagcattgcaactcaagcatccagatttacaattagaaatctcaacaagtgtcgttcctgttgatttttcccgacgggaagctgacattattcttcgacttgtccgaccagaaagtgggcgttacattattcggcgacttggtcaactggaatatgggctttattgtagtaaagattatctcgccagtttcacaaagcatgctgaaacggctgatgatttactgaatcatcgtataattggttgggacagaagccttcaatatacgtttttggcacaatggatgcgtgaactcactcaagacgcggcccctgctttgtcttttgataacatgcactcgcaactattagcagtcattgaaggacaaggaattacagccctgccttgttttgttgcaaaggctttgggtttagtacctatactacctatgcaaactttaaaacaagatgtgtggttaatgcgtcatttagatactaaggatagtgactattcaacgttaattagtgagacgattgaaaaagagctacaagaatatctgttgtga

SEQ ID NO: 46097 - DNA, 894 bp, Acinetobacter baumannii
atgacgaccatttatgtagttgatgcatttaccactaaaccaaatacaggaaatcgagcaggggttgttctagatgcggaccatcttacgactcaagagatgcaagatattgctgcatttgcagggtattcagaaactgcctttgttttgtcaccgaaagatcagagccatgatatacatgttcgatattttacccctacacatgaagtcccgatctgtggacatgccacaatcgcaactcattttttacgtgcaactacaggccaccaatcagactatccattaatcgcaaaaacaggagctggtcatttacccgtttcaatatttggtagttcaaaagagttactggtgaaaatgactcaaggtcgtgtagagtttttatcaccttttaatgagagtcaacggactgaactcgcaagcgcactcggtgtgagtgaaagtgattttgcggatttaccaatacaagttgtcacgacggggcattccaaggtgatggtgccaatgttgagcagaaataaactcgatgaattaattccaaacaataaaaaattgaaagctattagtgctgaaataggttgcaatggttttttcccctttgtcttggaagggagtaggcaagaacctattacttatggtcgaatgtttgcacctgcaatcggtataaatgaagatcctgtaactggtaatgcaaatggcccagcgggagcgtaccttgttcaccacgatttaatcgaatgtgaccagaaagtaagctattgggggtatcaaggtctcgcaataaaaaaaccagggcgagttttagtgacagttgagaaaatagattcaatattacacgttagcattgcaggccaagcgattctagttggctcagttttgtactctggaaaagattga

SEQ ID NO: 46098 - DNA, 2673 bp, Acinetobacter baumannii
gtgaatagctctccaaccaccacttcaaataacgttaatgacaacgacgtaacgaataatggtaacggctccaccattggtagtggtacaggcaatggctctggtgacgggcttttaaatggcgccgcttctggtaatggtgaacacaactatggaatcggtaatggtattgccgatgacgcaagcattactgccccactttcaattccaattaaccttgcgggtaactctattaccctaattggtgactcatcttctagttcggtcaacaactctgcaaccaatacatcaaataccgtgaatgataacgacaccacctataacggcaatggctcaggtgctggtaatggttcgggcgatggcttgttaaatggaattggctctggcaatggcgagcaaaactacggtatcggaaatgggattgcggatgacgcaagtattacagccccaattacgcttcctattaacttgtctggtaactcaattactctaattggcaattcatctgcaagttctgttaattcctcgccaactacaacgtcaaatactgtgaatgacaacgacaccacctataacggcaatggtactggtgatagcggcgtgaacgctctgggcggttccggcaatggttcaggtgatggcgcaggtaatggtatcgcttctggcaatggtgaacataactatggtattggcaatggtaacggcgacgatgttgatattactgctccgatcactggtgttctaaacatttcaggaaactcatttactctcattggtaattcttcatcaagttcagtcaatactgcgccaaccaccacatcaaatacggtgaacgacaatgacaccattgataatggtaatagcggcggcacaggtagtggttcaggcaatggctctggtgatggtttacttaatggcgctgcttctggcaatggcgagcataactacggcattggcaacggaaatggtgatgatgtagatattaccgcaccaattacaggtgtttttaatttctctggtaactctttctcactcattggcaattcatcttctagttcaattaatactgccccaactacaacgaccaatacagttaatgacaatgacgtgactgataatggaaataatggaggcgggcttcttggtggaagttctggaaatggctctggtgatggcctgttaaacggcgctgcttctggcaatggcgaacacaactacggtattggtaacggaaacggtgatgatgcagatttcaccttccctcttactggcgtacttaacttttccggcaactcgctttcaggctttggcagttcatctagtgaatcggtaaatgttgcaccaaccacagcaactaataccgtcaatgataatgacaccattgataatgccaatacaggtggccttggtggcggttcgggcaatggctctggcgatggccttttaaatggtgcagcgtctggtaatggcgaacataattatggcattggtaacggaaacggtgacgatgcagactttacgcttccatttactggcggtttaaatattctgggcaatgctttatcaggtatcggcggttcttccaccgactctattaatatttcaccgacaactacttcaaacacagtcaatgacaatgacactaccaacaatggcaacacttcaggtggtgtgattggttctggcgactcaggcaacggctctggtgatggcctattaaatggtatttcatcaggtaacggtgaacataattatggcattggcaacggtaatggcgatgatgttgacgttgttgcccctatcactacaccacttaatgtattaggcaactctttctcatttattggtggtgaaggtacaggcgatatcttaggtccgattactggcattattggtggtattggcggtgatggagatatcctaagtccaattactggcattatcggtggtattgatggtgatggagatattttaagcccgattactggcattatcggtggcataggcggcatcggtggtgatctaggcgataacccacttacaggtattattcaaagcggtattgacgttctacaaaatttagaaagtttaaaaacaggtttgattaatacaggtattgatacgattgccggaacaattattggtgtgttccctgatgcagagcatcctgtcggcgattttgcagaccttggaaaactacttttcgagacttcacgtgatagtgttaacggtacgcttgaggctatttctgaccttgcaggcgctgaccttgagggtgcaagtggctcgattactggtgtaattgatactcttattaccaatggttcaacggcatctaccattattcagcatattgtaggtgatgacctagtcactgaaaacggtggcctcttgggttcaatcaccacgattattggtggtgttgacagcggcgacggtggtttactgggtggcctagatggcttaattagcattaactatggtgactcagacaatagtaattctgtagatgtagaagatattttaggaaatatcctcggctcggtaggttcaaatcaaggtattgctgttggtgaacctgatccaacgggcggtagtttgattcatacgatttcacttaacacagtaaatcagttaactgaccaacttttacatgctttaccaactgtctaa

SEQ ID NO: 46099 - DNA, 1578 bp, Acinetobacter baumannii
atgaatatacgaccactcatcggtttggcaggtgcaatttttgcagccatgactgtcgaatttaataaccgaattagcagcattaccttggtcgatattcgcggtgagatgggtattagtgtcgactctggttattgggtcagcagtatttatgccagtgccatgattattgggatgatcctgtccaccagttgggcggttattttttccatgcgtcgggttcttctttttgcgataggactttgcctcttctctagcgttttaattccttttagcccaaatatcgaaatattttatttattacggggcttacaaggactcgccaatggtttaactattcctttattaatggcatgtgcacttagattcctaggacctgaaattcgtctatggggcttggcctgctatgcattaacagcaacttttttcccaaacttaagcgctgcgcttgctgccttttatttagatgtgattggttggaagatgatatttttccaaaccatccctttttgtgctttaagtgctgcgttagtttacttcggtattccgcaagatccattaaattactcaagaataaaaacttacgattggactggcgcgattctagccattattggtttggcaagccttagtaccatgcttttgcatggcaatcatttggactggttccattcaaaattgatttgtgttttggctttaataagtgccattaccctacctttatttttaatacatgaatggcgctatccaacaccattaattaaaccgcaaatgctcgaaatacgaaattttggttatgctgttattgcgttgttctgctttgtggttattggtatgtcaaccagtacattaccccttaattacttaagcgccgtgcatggttataagcctactcaaaccatgtggattggcttacaaattgccgcattacaatttatctatatcccgattgttattaaagttttgaaccaagcttgggttgatagccgatatgtacatggatttggtttacttttggttatggttggctgcttaggtgcaagtcaacttgatacgacttggaaccaagaccaattctatttttggcatgcaatctcatgtttaggtcaaacctgtgtagtgctttcgctcctcatgatgggtacaaatagcgtccatccaactatggcaatttatgcttcgcctatgattaacaccccgcgtgctattagcggcgtactcggtgtatgccttttggactgggtcaatcgagtacgtggcgaataccattcaacacgactgattgaaaataccgcacaacatgtttttcaaaatattcaaggccctgttattaatcctcttaccccgcctgtgctgagtgcagatggtaccgaacgtgtttccggtggtttatctgccttaaattctgcgattcaggcacagcaatcagttttagtcattagtgatcaatatttgattttagcgggacttactgcaattttatttatcgttatggtgattttgccagttagaacttatcccccacgcattgctctcattaagttaatgaatagtcataactcaggaaaatctttatga

SEQ ID NO: 46100 - DNA, 1089 bp, Acinetobacter baumannii
atgagtactctcgaagcccaagatcactccatgaccgagtcacccaagttaacaaagatgcaatatcttaagaaacactgggttatggttattgcatttattatcgttctagtttccattttatggattttaaaagttatatttttaccttcttccattgttaaaactgatgatgcgcgggtagacgtcgagtactcaaccattgctcccaaagtgtcaggtaatattgaagaaatttatattaaagatcaccagaccgtaaaaaaaggccagcttttggcacggattgatgcacgtgattatcaggcggctttagctgaagctgaatctaattatgccaaagcacaagctgacttaaatgaagcaatgctggcagtagaaagacaacccactgttatacgagaaacagaggcccagcttagaaaagtagaagccggcattaaactcaccaaagataataccgcacgctatgagcaattacaggcacttggtgctgaatctagattgattacacaacagtcaaaaaccacattgaccgagcaatatgccgacttggacagcagtaaagaaaaagtcattgatgcgcagtatcagctcaaccaatataagatccaggttcaagctaaacaagcggctttgaaacaagcccaagctgcgcttgataaagcaaaactgaatctgagctatacagaaattcgagcacctattgatggcatgattgggcaaaagtctgcaaatgtgggcaactttgttggcgcaggtaatccactcatggtggttgtgcctttagatcaagtgtatgtagaagcaaacttccgtgaaattgagctaaaacaaattaaaatcggccagcctgtcactgtttatgtcgacgcttacaatgttgagttaaaaggtgtggtagacagtttctctccttctactggcgcatttttctcgccaatttcagcaacaaatgcgacgggtaactttactaaaattgttcagcgtttacctttacgcatcaaactccttgagaaccaacctgatattaaattgttgcgtcctggtctatctgttgtggtttctgtggatacgactaaaaaataa

SEQ ID NO: 46101 - DNA, 609 bp, Acinetobacter baumannii
ttgagttacgttcatatcttagataatacaaatgaacaaaatacactttatttaaaatcagtttcagctgatgaaattattttaaaacaggctagtgcggatagaattattacatttaatgattcaactgccaccattcattttggtgagggactattatcatctattgtatttgatgatgggacgacttgggataaagcgcaaatagaacaacatattgctaaaacagtagtgggtacgtttgataatgatgtagttgagacagctacagccaaccagacatattcatatactttagatacaggtgcagacactttaattttcaaagttcttgatgacattgataatttaggtggtaatagtaatggagagtggacagattttaatctttcagagaatgataaacttgatttgtcacaattgcttataaataacaatggaaaccttcaagaatttataacggtaaaagatacgcaggctggagtagttatgtctgtagatagagatggctctaatcaatccacttatcattcacaagaattaattctacttactgctaagcactatacgttagaggatttaatggcttcaaatgcatttattcattaa

SEQ ID NO: 46102 - DNA, 762 bp, Acinetobacter baumannii
ttgcccagtactgaatcagatcctttctatggctcaatttcaaagcataaatatgctgaattttcactttgtgataaagatggtaacccagtagcctcaccagtaattcgtgctttgttgactgacggtgataaaagtattgagagccaatggcaaactccatttgaaaatagcaatccagaactaaagatgccaatgttgatggctaacttgcaaactgggcaaatgcttcaagctgcagcaacgttaggtgagaattcaccattcatttcagcattaagtgatatggcatcaggacctttagcaacagctgaaaatgcgcttaagagtgtggaagggcgaacaaatttaaccaaagtaaatacaactcaagtattcctatctacatcatcagtacgccttaatttatcaatttttttcttggcttttagtgatgcgagaacagaagttgaagacaagatcatgcaattggaggcttggagcgtaccagtttcattatcttctgagtctacactgcagaatgttgtcaatgattcaaatactactttagaaggcttgttttcaggtgtcattccaccgtttgtatctcttactactcacggcaaaacttataagcctttcattattgaaagcgtttccgcgccaattgtcgcgcccattgatgaaaaggggaaccggttaagtttggccgtcaatattagtttgttgagtcgaactgcatgggattcaaaagatatttattcattgtatggagtcaaataa

SEQ ID NO: 46103 - DNA, 156 bp, Acinetobacter baumannii
atgcctttgagttttgaaagtacttacttcaattcatcagcatgggaaaaccgcaagaagtatttagaaaatgaaattgaacgtcacaacgtattcttaaaattaggtcaagaagtcattaagggattaaatgccctagcaagtagaggccgatag

SEQ ID NO: 46104 - DNA, 288 bp, Acinetobacter baumannii
atgtctgatcatcaggcaattgaagtcacagtcacaacttttgctaataaaactaccttctggagtggtttagcaagcgcatttggttctttaacttcaattaattggttgagctatacaggtgcaatagtggctgttgttggcctattcataagtttcatttttcagtggagacgtgaccgcagagaacgtaaagaaagtgaattacgtgaaaaagaaagcgaattacgaatcaaagctttagaagctctagagcaagataatttacgaaagaggaaagatgaatga

SEQ ID NO: 46105 - DNA, 771 bp, Acinetobacter baumannii
atgaagttaattgaaaacaatgcttggcagtatctatctgttaagttacccgccgtaggtgcattcatcatgctaattttattgccagcactacaatggggtgttgattatgaagttattcctgaaaaatatcatgcatttgttactggtactttgatgcttgttctgtcatggattggaaagaaaatttctcaaccacgacttaatggcccgcaattaacaggccagttagtagggatcaattctttattgaatatcccaacaccaacaaagcctgatgaattagcttggattgcagaagcaaaaaagcatcttggccttcaagaaatacctggtaaacagcataacccaactattttaaaatggctctcggagctaaaggcttggtgggctgacgatgaaacggcttggtgtgggaccttcgttgcacattgcttgaaatcagctggaattgcttatcctaagcattggtaccgtgcattggattatgtgaattatggtacaaaattagctaaacccgcttacggttgtgtagctattaaaactcgaaagggtggtgggcatgtttgttttgtagttggccgtgacaaaaagtctggaaagttagtatgccttggaggcaatcagtcaaataaagtttgttatgcactttataatgactctgactttcaagaattcagatggtatggtcgtacaactcaaccagcaagtaagcgttatacattgccacaattaaaaggcgtaacagctactagggttttggaagcctaa

SEQ ID NO: 46106 - DNA, 642 bp, Acinetobacter baumannii
atgaaaaagtatttaaccctatttatcattggctcagcacttctaagtggatgcagcaatgcatctgataacactaaaaattctgaagtaaaaactgagacccctgcgcctaaagccttatctactgaagatcagaaaattattaataaacataatgagtacgttcaaaaatactctatggaagataaagaagtctttcaaaagcatatgcgagagatacttcctgaggtcgataaaatcacagataagcgaaaacgtgagcttcttcagatgaatatatatatgattttgaatgactatgataaagctcacgccttaaatgataagcagctagtagagaaaccaaatgacacagcacgacttacatttagatgtcagttacttgcattacaagggaaagatgtcacttcgattaataggtgctatgactatgtggcagaggttctaaaagtagagctgaacaaaccagaaaataagaaggacccaaattataagcaagctgaattttcatacttacttgtaaaatataaagctggacaccttgaatacaaagagaaaatgaggaaattcattgatagtacaaatgatgaagctctaaaagcctctttaaaaacagtctacgatgcagaaataaataattaa

SEQ ID NO: 46107 - DNA, 843 bp, Acinetobacter baumannii
ttggcaaccccatatataacaatcggctgccccaccacaggaggcggccaagtaatttcagggaacagtttgtttctaattgatggcattgccgttgcttgtgtcggtgataaagcaacctgcccaacacataaaattgtcgcaacgattgtatctggcgatccgaatatgcagattttcggtaaagctgcagctcgtgttaatgactctctttcatgtggttgtaagcttctacctaaacaacatttggtcgttcaagacaacggcggtggatccgcatcttctgctgctaattcatcaccagccccaatgtctcaaaaacaaccaacaacagacagctttgtaaaagatgagtacgagaattactacatagaacaaaataaaacaacaatggtcccattcaaaacgatgttaatgccatacgatcaagatagaacaaacttatttggtgtaatgtcacaaatagtatcgggcgcttgtaactttgaagtaacccaccgagtcaaaaaagatcaactctttgtaactgcaaccctattaccacctactgttagagctgatgcaacaatcatcccgcgtgctgtgcttcgcttatttaagaaagataaacagataagtgacacgatcactttaaaagtcggtaaagggtactggaatactgcaaatgataaacaacctgtaggtagttgcgagattaagctacccgcaccagacttagaagtaattaaggcaaagcttacaatgaaatatgatgcgaaatttgatggcggtgtagtcgtaacttctcccccagacgtaacttatgagtttacaataacttcggcggcaagacgtaaagcatga

SEQ ID NO: 46108 - DNA, 1554 bp, Acinetobacter baumannii
atgtattttggcttagttatgtcttctcggttcttatcgttgttactcggtgaaaatattaattcatatgatcagcaattcgatacgtctaatcaggatgcaacagcgcagctatatgaaactatggctccgttttcacttgggactaatcaaaccaaagccaataaaaaacgtactagaaaagaaattcttacaaaatgggagagaatgttacgctttgcacctatcgcagagggtatggggattcatgtttctgccgcattaggcggagattcttatagcggccaacaagtctttattacacctgccgaacgcttgaaaaaggccagtggaccagcagctgaaaaactaaaaaaacaactagatgagcgccgtgtaaagatggaaaagcttatcaataagtatttaagcaaacttgcccgagatgctatttctttcggtgattcctatgcacgtatttatgggaaaaaagataaaggtgtaattgacctcgtttgtaatgagtatacatatccgccattaatacaaccgttcgaacaaggcagtaagactgtcgcctttttttgtttagatcctcgtaattggcaaaaaactattaccaaactgaatactattcaaatggtacgtttcaaaatgccccgtatgagcaatattgctcaatatgagcttgtagaaactggtctagtcacgaaaatgttagagggggatgatccagatgagctacctatcttaccagcgcatttgggcggctcattcctttacgaaattgaagacatttatgatgatgtaatccttgctttggcatctatgaacagccagcaaattgcagataccgtaaatcagatgttcttgacagtaaatatgtcgggaatgccaccagcacaacgtcaagcttatatccgtggtttagaaggtttacttaaaaatcatgaggcttatgtccgtgatgctttatcaggtggtgaagcagtttggaatactgcttttcacatgcttccggtatttgatgaaaaacaagttctaaatccagtgggtgatatcaagaatcaacgaagctcacctattaatattgaacagttcatgattaatgtccgtttgctgatgggcggaattggtctagatccaagcatggtcggttgggctgatatgttaactggtggtataggagaaggtggagcattccatacttctgcacaaatcatgcgtaggtcacaagatattcgaacagcagcttccgaagggattaatcaaattcttcatttggattgggggtttgcttacaacgaacaatttgagcctgaagattacccttggcaagttgaatactattcaaaccaaactgcagcagctacagaagaaatcaataatgctcaatcaagaatgaatacaacattacttaaaacacaagtaatcgcatcattgaaagaatcaaatttagatgtagatattatggcgtacattcttgagcgcgatacaggtatgaaatatgaggaagcattaacattagctgaaagtattgctaagagccgtaaatttccagaggatgaagaataa

SEQ ID NO: 46109 - DNA, 195 bp, Acinetobacter baumannii
atggctgaagttaaagtatttaacgatttagatatcgaattagctcaaagaaccaaagacattgtaaatgcccaacgttttaacaaccgacctgctttcaaaacattaaacctaggctgggaccttgaaactggttccattgcagttaactacacttttgtagaagaaccacaaagtaatgatcagcctgcataa

SEQ ID NO: 46110 - DNA, 2157 bp, Acinetobacter baumannii
atgcaaaggactacgaaacactttcaaattaatgcattagcacttgctatagcaatgagcacaatttcagcgcatgcagagactgatcagcagacttcggaatatggaactcttcctaccattaaagtaaaagctggaagtggccaagaaaatgaaaaaagttatatagcagggaaaacagatacagcggttccactgggtttatctgttcgtgaggttccacaatctgtttctgtcattactcaacagcgtttacaagaccagcaattgtcaactttagttgaggtcgccgaaaatgttacaggggtaagtgtcaaccgttatgaaaccaaccgaggtggaatctattcacgtggttttgtagtagataactatattattgatggtattcccaccacatatagcttgccttggtcttcaggtgaaattttctcaagtatggccttatatgatcatattgatgtagttcgaggggcaacaggtcttacatttggtgctggaaatccatctgctgcaattaatatggttcgtaagcgtgctacgagtacagagccaacagctaacgtagaagtgagtgcaggtagttgggataattaccgtgttatgggcgatattgccaactcccttaatcaatcaggaacagtacgtggacgagcagtggcccaatatgaacaaggcgacagctataccgacttgttgtctaaagaaaagctatctttattgttaagtgctgaagcagatttatctgaaaatacccttttatcgggtggggtaacttatcaggaagatgatccgcgtggaccaatgtggggaggtttacctgtctggtttagtgatggcacaaaaacgaactggtctaaaaatatcactacaagtgctgactggacacgctggaatgttaaatataccaacctatttgcagatttaactcataaatttaatgacaactggtcagctaaactgtcttattctcatggtaagcgtgatgctaattctaagcttttatatgtttcaggtagtgtagataaaaatactggtctagggctatctccttatgcatcagcgtatgaccttgaggtagagcaagataatgcttctttgcagctcaatggtagttttgatttgtggggcttagagcaaaaggttgttttgggttatcaatattccaatcaggactttacagcgtatgctcgttcaactgatacaaaaatggaaattggcaatttctttgaatggaacggcagcatgcctgagccagtgtggaatgcacctacactcaatgaaaaatataatattgaacaaaatgcactattcgctgcgacttatttaaatccgattgagcctctaaaatttattttaggtgggcgttttacaaattatgaaaagaatatatatggtcgtagttcatccataaaatatgaccacgaatttgttccttatgcaggtattatctatgatttcaatgatgtctatactgcatatgcaagttataccagtatttttcagccccaagataaaaaagactttgatggtaactatttagacccggttgaaggaaacagtactgaagtaggcctaaaatccgcatggtttgatggacgtttgaatggtactttagcactttatcatattaagcaagataatttagctcaggaagcaggggacgtcactcgtaacggggtaaaagaaatctattatcgggcagcaaaaggtgcgacgagtgaaggttttgaagttgaagtaagtggacaaatcacaccagactggaatattacagcaggttatagccagttctctgccaaagatacaaatgatgtcgatgttaatacccaacttcctcgcaagatgattcagacatttaccacctataaattatcgggcaaattagaaaacataaccgtgggtggcggggtgaattggcaaagcagtacctatattaatgccgaaaatcccaaagaagttattgagaaagtcgagcaaggagattatgcacttgtaaaccttatggctcgttatcaaattacaaaagatttttcggctcagcttaatattaataacgtatttgataaaaaatattacggtgttttcccggcgtatggccaaattactttaggtgcccctcgaaatgcggcgctaacactacaatataagttttaa

SEQ ID NO: 46111 - DNA, 1113 bp, Acinetobacter baumannii
atgaaaataaaattatcgaaaatagtaatagccagctcattattgatatttacaaatatgagttatgcagagggagtaaaacggttttctgtctcggcaggttggttacatgtaatgcctcaaggtaaagctaatccatttaatatcaatacaagtgttaaaaatggaacagttgctaaagttggaagcatttcgccgaccagtttcttaaactccgttgatcctaatgctacagaggtagatgtaggcggtgaaccttttaatcaaaaagagtttcttgaactcgctttaaatgatgactttttaaaagggctcttacttgatgaagaaggcaatataaaacctgaggtagcaggtgaggcaacgattcaagggttagagcagtggcatcaaaatgatgctggccttgaagtagatgacacagacacattagggcttatgtttaactattacctcaatgacaatgtgtctttacaatttattggaggcattccccctaaagtcgatattaaaggccaaggtgaaatcttggcaccattaagcggtgtcgcgttgtcaccacatgaattagttaaaattctttttccgaacggcattaccttaggtcaagcagtcccgattaccaatttaggcaataaacctaaagcagctagtgttcgtgcctggacccctgcaattgaagcacaatatcaatttgggaagagtggggtgaacaagtttagaccttatttaggtgtgggtttaatgtatgctcattttaatgatattaagctaaatgacgaaattcgttctgacctgatctctgcaggtcatatgattcaaaatgtgttagatggtaaggctggggctgccttggatcgtaaagagtcgagtggaaatatggtggttaaagtagatgcagatgatgcgattgcacctatatttactgccggctttacttatgattttaatgattcttggtatacagttgcctcagtatcttatgcaaaactaaataatcgaacaaaaattgatgtcattaaccaaaatacgggcgctcgcttaattcatgggtcaactaaagttgatattgatccgatcattacatatttaggggtgggctacagattttaa

SEQ ID NO: 46112 - DNA, 2412 bp, Acinetobacter baumannii
atgagtaccgaatacactgcaccttctgaaagggcaggatcaaaagtttatcgctttttcgtaatacttctacatgtgttaatcgcattattcttaattatccaaggtggaaaacttgttagcttaggtggctcaagttattaccttatcgctggtattgcctatctactgattgctattttatatacattcagaaaagtagccagcttatggttatccattttaactttcatcgcaacagttatatgggctgtttccgaagttcaagtctttgacttctggcaatatattccccgtctagttgttccaacggttttatttgtactaagcttatgggcaagccgtagtttaataacgctttcaacagaaaaagtgacttttgctaatcgtgttggtttagttggctttattgcttgtgttatagctttaatctcagctttttttccccatggaaaaactctaaatcaagttaatattgctcaagatcgtaatttaactaaacctacagcagaaaatcctgataattgggaatattttggtcgtagtggtagtggtacccgctttgccccttatactgacattactcctgataacgttaaaaacttacagattgcatggacttaccatactggccgaccaaaaaatattggagtcgatgaaaatactccaattcaaattggtagcacactgtactcatgtactccaactaatattattactgcgcttgatggtgatagcggtaaagcactttggaaatatgatccaaaagcaaaaacagctgaacacattacctgtcgtggtgttggttactatgatgcgactcaggataaaacgctttcaaaagcagatttacaaactcctagtattcaagcctgcccacaacgaattttaacatctactgttgacggtcgtttaattgcattgaatgcaaaaactggtgctttatgtcctcaattcggggtaaatggccaagttgacctgttaaatgacatgggtcctactgaaaaaagtaaacgttaccatccaacctctaccccattaatcgcagggcatgttgctatcttaggcggttgggttcgagatattactcatggtgaaccttctggcgtcgttcgtgcttatgatgtacgtactggtaaactagcttgggcttgggatgtaggtaattcagaattatctggacaacctaaaaacggttttactcttgaaaccccaaatatgtggactattccaacctacgacaaagatttaaatctagtatatctgcctactggaaatggtccacctgattactggggcggtgatcgtaatgcagcaaaagaaaaatttggctcagcagtagttgctgtagatgcaacgactggtaagactaaatggtcatatcaaattgttcatcacgacgtctgggactatgatttaccttctcaacctgttctttacaatgtcaccaatgataagggagaacaaattcctgcccttattcaaacaactaaaatgggacaaatttttgtattagatcgacgtacaggccaacctattactaaagttattgaaaagcctgtaccgactacaggtcatgcagaaggagaaaaattatccccaactcagccatattctgtgggtatgccacaaattggtaatgacactttacgtgaaaaagatatgtggggtatttcaacttttgatcaactcaattgccgtattcagtttaaagattcggcctatcaagggctatatacaccacctagtgagaaaccatatattgaatggccaagtttattaggcggaatgaattggggtggtatttcaattgatgaatcaacaggtttaatgttcgtcaatgatatgcgtatgcctttgcggatgtctttagttcgtaaagaagatatggggaaatacaaaatatctaccgatgaagttcctggatttatgggaacagtacgcccacaatttgcaggtccgtacgctggagtaaaaattgacattatgcaatcagcattaggcgtaccttgtaatcgaccacctttcggtacaatgtctgcgattgatttaaaaaccaaaaagctggtatggcaagtaccattgggaacagctgaacagcttggtccattaggtattaaatcacatctcccaatgccattaggcatgccaacactaggtggcccaacttcaacagcttctggcttggtattttttgcaggtacgcaagattattatttacgtgctctagattccaaaactggtaaagaagtatggaaagctaaattacccgttgcagcagttgcggcgcctctaatttacaaatcaccaaaaacaggtaagcaatatgtagttatttctgcagggggtgcgagccactcaaaagatgtaggtgactatattattgcgtttgctcttcctgatcagaagtaa

SEQ ID NO: 46113 - DNA, 846 bp, Acinetobacter baumannii
atggctgaacctataaattttgcaactaattttgctataaaaatcattctttctatctttggcccgattttaaaaaaaccaatagaatggattactaaatttttgtttttagatgcctataaagtatcaactgcatataggacctctagagacctacaactattgtggcgtaaggatttggggggatttgtaaattatagtataaattggaatcaaatttttctaggaaagcagcagactaattgcacactatgggtgaaagcaaataatgaccaacattacagtaaagttattttttgcgttactgcttctttaagtaatctaaaatatcaatctgtgatagagattcatgacttaacgagtaagccttgcgttttagctttaccaagtattcctattagaaatttggagtggagaaatggccagctgtatgaaccttataatgaatttaagattgagttaaaagaagtttttgataaagataatacttatataaatctaaaaaataatacgaaatctatatttaatcctgtagataatttaggttttcttcaaggaaagaaaagttatgtttatagatggggacaatggtggaatttagattttttagaatctgagaaagatgaatttctgctaacttataaggcatatgcttttagggctaaatttgataaatctaataatgccagtttattttcagcaagagcgtggcttttaagtaatagattacttttaaatgttttcttttggagtaagaatatatttaaggctaaacatttgagagtggcttttgataagtatttgaaagatatagaggaagcggctggttttaaattggtagattaa

SEQ ID NO: 46114 - DNA, 360 bp, Acinetobacter baumannii
atgaatagtgataaattaggacttaaaaaagagtttttgaatttatatttgcatgctgtacttgcacactttacagcaattgtagtttttatattggggagtaagcatatagtaaattcatatgataaattgccagattttataccattaataagtagttattattttaatataataatgcttttaatgggagtgttcttctttttttatatgctttttgaggtttatttaaaaagaatgatacagatattaaatgctgctaaattttcagctccattttacattttttctatttttggttttattgggttgggagtttttccatttttcggcgctttttcctcaattagttctttgtaa

SEQ ID NO: 46115 - DNA, 267 bp, Acinetobacter baumannii
atgaaaatatctttattagatgtacaacaagtattcaatgatctattaaaccataaaattagccgtgaggatgctgaagaatgggcaagaaaaagaatgaatgcactggataaccaagacttaatttttgatcctccaattaaagaggagcttctttggaaagcggtaatatatttaagtggtgttggattaaagatatctcctgatacgtacatggaggatgatattggtattaaagaaatgtttaatacttattggaatcaataa

SEQ ID NO: 46116 - DNA, 711 bp, Acinetobacter baumannii
ttgttaggtttggcgtttgcttcatctgttgctgctcctgccgctcaagcagaaattgtaattcatggcacccgtgtaatttatccgtcggatgctagagaagttacgctacaagttagcaataacggttcaaagccagcacttgtccaagcttggattgatgaaggtgatccaaaaagtactccggatcaatcaaaagttccttttatgattgctcctccaatttctcgtgttgaagcgacaaaaagtcagacgctccgtattactgcccttccaaatgcttctcaatttaaccagaagcaagaaactgttttgtggttaaacgttttggatattccaccaagacctacctcaaaaaatgcagatacgacacctgataacttcttacaacttgcaattcgttcccggatcaaattcttctatcgtccggcttcaattaaagaagatgcgaatttagcagcagataagcttcaatgggttaaatctggtcagaatttaacggtaaaaaatccaactcctttccacattacgatgacttctgtttatcaaaaggttggagataaaaaagttgatttattgcctcaagggctaatggttacgcctttttctgaagcttctattcagcttaagaatagcaatcttcaggatatgagttttattaatgtcaacgactatggtggtcgagtcgaacaccaaataaaacttcagtaa

SEQ ID NO: 46117 - DNA, 2538 bp, Acinetobacter baumannii
atgccaaaaaaaaggcaagaatcttataaattattaaaacgccatatttgttattacttggcttctggcgttgttacaatgacaatgcctgtgttcgtgcatgctgaagaagcagctgcgagtgcgcctgtagaagctgaatttgattctgcttttttaattggtgacgctcagaaagtcgatatttctcgatttaagtacggcaaccctgttttaccaggtgaatataacgttgacgtttatgtaaatggtcaatggtttggtaaacgccgcatgattttcaaggcattagatccaaatcaaaatgccgtaacttgttttactggaatgaaccttcttgaatacggcgtaaaacaagaaattttaaccaagcacgctccccttcaaaaagaaaataatagttgttataaaattgaagaatgggtagaaaacgcattttatgaattcgatacgtctcgtttacgtgtagatatttcaattcctcaagtcgcattacaaaaaaatgctcaaggctatgtcgacccaagcgtatgggatcgcgggattaatgccggctttttgtcttatagtggtagtgcgtataaaacttttaatcagtctggtgaccgaagcgaaacgaccaatgcttttatgggggttacggctggactaaatttagcaggttggcaattacgtcataatggtcagtggcaatggcaagatacgcctgcggaaaatcaatctaaatcagactatcaagaaacaagtacatacttacaaagagctttccctaaatatcgtggtgttttaacacttggggatagttttacaaacggcgaagtatttgactcatatggttatcgtggtatcgatttttcaagtgatgatcgaatgctaccgaatagtatgcttggttatgctccacgtatccgtggtaatgcaaaaaccaatgcaaaagttgaagtacgtcaacagggccaattgatttaccaaacaactgttgcaccaggtaacttcgaaattaatgacctttaccctaccggctttggtggtgaaattgaagtttctgttatcgaagcgaatggtgaaatacagaaattttctgtgccttatgcctctgttgtacagatgttacgtccaggcatgaaccgttactcattaactgtaggtcagttccgtgatcaagacattgatctggacccttggattattcagggtaaataccaacaaggtattaataactatttaaccggctataccggaattcaagcatctgagaattacgctgcaatattgcttggtgctgccgttgctacaccaattggagcaattgcattcgacgtgactcactctgaagctgagtttgaaaaacaggcttcacaatcaggtcaaagtttccgtttaagttatagtaagttaattacgccgaccaacacaaacttaacacttgcagcttaccgttattcaaccgaaaacttctataaattgcgcgatgccctgcttatacgtgacttggaagaaaaaggtgtaaacacttatgctgctggtcgtcaacgtagtgagttccagattactttaaaccaagggttacctgagggttggggtaacttctatgtggtaggttcatgggtagattactggaatcgtagcgagagtactaagcagtatcagattggttatagtaataactaccatggtttaacttatggtttatctgcaattaaccgtaaggttgagtacggctcaaatgatgcgtcgcatgatactgaatatttaatgacgctttcattcccaattaactttaagaagaattcagtcaacgtcaacgttactgcttctgaagacggaatggtgggtgatcgctttagttacggcgcttctgtgtcacatcaagactatgcgaacccaacatttaacgcaaatggtcgttaccgtactaactatgcaactgttggcggctcttatagtattgctgattcttaccagcaagcaatggtaagtttaagcggtagtgttgttgctcactcagatggtattttatttggacctgagcaaggccaaaccatggtacttgtgcatgcacctgatgccgctggagcaaaagtgaataacacggttggtctaagtgtaaataaagcgggttatgcagtagttccttatgttacgccataccgccttaatgacattactcttgacccacaagaaatgtcgagcgaagttgaacttgaagaaacaagtcaacgtattgccccatttgctggtgcaattgcgaaagtagattttgcaactaaaacaggctatgcagtttatattaatagtaaaactgcagatggcaacagtttaccatttgcagcgcaagtctttaaccagaaagatgaggctgtaggtattgttgcacaaggtagtatgatttacttacgtactccactcgctcaagatcgtctctatgtgaaatggggcgatgaaagtaatgaacgttgttcggttgagtacaacatcagtaatgagttgaaaaataaacaacaaagcatagttatgactgaggctgtctgcaaatga

SEQ ID NO: 46118 - DNA, 3108 bp, Acinetobacter baumannii
atggtgaaaataaattatccaattcttggagaaccccctatattaattaacttaatggatggttctccattttcggcagattacgtttttagttttaaatatgatgataactatcttaatgatgtcaaaaggaatgagctattttacaaatcaaacctaaatggttctgaacattctgaaactaaattgaactcaaaaaatggaaatataaatgttacctctgctaagggtttatctattagtggtggaaatatttctgctcaattgggacaggtgaatttagaagcaagtggtattttagccgaacaatataaatctacaaccattactgagtctaatccacagccaagaatattaaatgcgagtattattattgatggccatacagatttctatgataaagggaatgaaaatgatgataattatagtatgcgaacgttagtcagtcctaccattattaatggtgataaaggggttaacataagaactgtaggtaaaactaaagatgataatctagtcttacaagccacaggtattacatcaaaaaatggtgacgtaaaaatagaatcaaataaaagtattttatttgatgccgcagttgaacaaagttatgaccgtacaacaactactgaaaagaaaaaatcatggggaggtctaaagaaaaaatatattacgactgtagctgagaacaatgatacgaatgcagcttcagttgatatttctggaaaaaatatttttattgaaacgaaaaaactagatccatctgtagatgttaaaaatccagataataatattgatatttattcggggcgttttactgctgatggtggaaaaattacgattaattctggggggaatcttaacttttatacagtcgaagagagttctgatagtaatgtagatattacaaaaaaatcaacgtttgctggaattaaatacaatacttctaaaactaatgcaactcgtacgcaggttactgaattacctgcaacattaaaggcagattacattggtactaaatctggatttgatacccgacttgttggaaccgagtttgaatatttaaaagacgcaactatagaagctggtggtaagttagacttcattgctgcgaaaacatctattactgacctagttaaaaaagaaaagaattctgtagtctggcagtcaatgcaagataaaggctcaattactgaaactgctcagctaccaagttttaatgggccagttttacctacctttaaagcggcaggtggtttgagtgtacaagttccaattagtgaaaaagacgctaataaagttgagttgcgggatgaaattctaaaactggctaatcagccaggaaatgcatatcttaaagaattagttaaccgaaaagatgttgattggcaaacagttttattaactcaaaaagattgggattataaatcacaagggttaacggcggctggtgctgctcttattgtcattattgtaacgattgctacgatgggttcaggaactgctgcggctgcaggagctgctggtggaacagcagcaagtgggactacagttggtttgggtgcaagtatgattggctctgctggtataacgacaactgcggctggagcaattgttccatctacccttggtgctatggcaaatgctgcaattacaagtttagcaactcaagcaagtgtaggattgattaacaacggcggagatatcggcaaaacactaaaagatttaggaagtaaagattctattaagaatttagcggcatctgttgttactgctggtttaatgagccaagttggttctgcattaaatttaaaaccagatagcactcttctaccagaccgactagctaataattttgcatcatcagtaggatcaactttagtacaaactgcgattaaagggggagatctcggagataatttacaagttgcattactagcaggtttagctggagcattacaaggcgaattagctcaaaatctcaaaggtctggaagatgtaaactatattttacataaaattgctcatgcagcagttggatgtgcagcggcagctgctacaaaacagagctgcgaagctggagcgattggtgctggtgttggcgaaattattgcacaagaaatgcttcatggccgaaatccaacattcgtttcagcagaagagaaagctaaaattgaagcttatagtaagttaattgctggtacaatttccgcttatgctgggtatgatgttaatacagctgcaaatagtgcaactatagcaattcaaaataatgcttttaaggataaagcattattaaaacttgaagctacacgtaaatatttggatgataagtctaaagctgctttagatggcttaattaatgcatataaaaaaggtgatatagaagctgctaaaaaatttaaaaaccaattagatgattcagtaacaacttgggctaattcaagtagtagttatttaaatatagaaacaaaatctgccttaggtgagatcgttattgttgttagtgacttagttattcctactaattatgtagaaattttgccagttggtaaactttcaaaagtcgctaaaatattaaaaattggtgaggatggaactaagtctgctgggcgtttagcagaagagcttgcagagttacaaaaagttgatattaaatttggtaaaacattacctggcgctaaagcacctatcactgttacagctgaatcaaatataggtggtaagcatatgttcgataccaatcaaactgctagaccagaggttaatcgaacaaatacaccaactcttgctgctggaaatgcaaaaatagatccaagtaaccctaatttaacaatgaaaaatgcacatgcggaaattgccttaattcaaagagcatacgatgctggtttaacaaaaggagaaactatgcaggtgcttgttagaggaaaagaagtatgtgaccattgtgggcaagtaatgaaaactatgtatgagcgttcaggattatctaaattgattattcatgatacaacaagtggtactactactacttattataaagttattgatgctaaaactaaaattgctacaactaaaattgaagtagctccaatttttggtcattaa

SEQ ID NO: 46119 - DNA, 462 bp, Acinetobacter baumannii
atgattttatatgtttgtagttatgttgtaagaaatccttttttttctgagaaaagaattgatgtgaaaaaaatgggttggggaaaactatcaaatataatcaaggatattttttcttttggaggtagtgtcattattcataaaacagatgctgattattctgaagagtctgggagattagcatatgatgatatcgatagttacagtatggtttgtgattctagatacggttatttgtttggatgcagtattagtgaaaatgaagaatatcctgaaggtatttatttgcgccttgtgaatagaaaagctaaaaatcctgaagaagtttatatttttgagccacatgaagatgaatggcaagcaaaatatgttaatcaagatttagaattggcattaaaattatttaaagatatttatgaacatggcgaattatcatttgagtcaaaaacaatatttgagtaa

SEQ ID NO: 46120 - DNA, 1209 bp, Acinetobacter baumannii
atgagcgagcaagctaattatcttgtttctgaaattggcaaactaaaaggttctattgtcaagattggccaaatgatggcgctttatggtgaacattttttacctgaagaaattactcaagctttaaataccttaaataaccaaactgttgctttagactggccagcaattaaacctcatttacaagaacaattaggttctaagttaaatgatctaacaattgaccatgagcctatcggtacggcttctctggcacaagttcatcgcgcaacacgtaagtcagacggtttagagttagttttaaaaattcaataccctggtgttgcgaatgcaattgactccgatatgagcctgtttaaaaacatgcttaagcttacacgtatggtccctcaaactcgtgagtttgatcagtggttcgatgaagtacgtgaaatgatgcatcgtgaagtcaattatcacgtagaggcagccacaacacgtcgctttgctgagcgtttaaaagatgatgagcgctatatcgtccctacaattgtagatgaatactgtaccgatcaagtcttatgtatgacctttgaacgtggcgtgccaattaatagtccagtcatgctttcccttcctcaagaacgtcgcaatcaactcggtgaagcttcactagagattgcagttcgtgagatttttgaatggggtgaaatgcaaactgaccctaactttggtaactaccttgttcgtttaggtaatggccaagacattcaggataaaattgtactattagactttggtgcgatccgtcagttcgatgaacatttactctcagttgcacgcaatcttatacaagcgggttatcagcatgataaacatgcgatggttcaagcaatgactggatatgagtttttcgatgcaatgcctgaaagtattaaacccggcatggccgatgtctttttacttgcgacagaagcattcagtacccctgcaaataatccagatatgccagctgggctgatggatgaacatgaacgttatgactggaaaaagagccagttacatagtcgtgttatgcagcaagcaagcaaatcaatggcgtctcgatatttctcggttcctccaaaagaatttatgtttattagccgtaagtttattggcgcatatacatttatgactgttattgatgccaaaacaaatgtacgacgtatgattcgtaactttgcttaa

SEQ ID NO: 46121 - DNA, 1206 bp, Acinetobacter baumannii
atgaatttacaaaatcccaaaaaattcaaaatgatgattgatcaggcacatgatgttgcgatcaatgttttacgccctatttcccgtaaatacgataaagcagaacatgcttatccgaaagagctggatatgcttgcttcactcattgatggcatgaatgaaggtggtgaaggaattaatgcaggggctgccggcgcaggaaaacgtggtgaaactgataatgaaggaatccgtaatggaaccaacatgtcaacagcgttaggcatcattgaaatgtgttatggcgatactgggctattactcagcatgccacgtcaaggtttaggaaactctgcaattgccgcggtcgcaaatgatgagcaactagaacgttttaaaggtacttgggcagctatggccattaccgagccgggttgtggttctgattctgctgcgatccgtactacggcaactaaagatggcaatgactatattttaaatggtgaaaagattttcgtaacttctggtgaacgtgcggactcggtagttgtatgggctacacttgaccgaaaacttggacgtgcagcaatcaagtcattcgtagtgcctaagggtacacccggaatgaaggttgaacgacttgaacataagttaggtatcaaagcttctgatacagccgttattagttttactgactgtcgtgttccggctgaaaacttgctcggtaaccctgaaattgatgttgcaaaaggttttgccggtgtaatggaaacctttgataatacacgtccattagtcgcagcaatggcaattggctgtgccaaggcttctttagagcgtattaaagaaatttttaaagaccagttagaccctaattactcgactccatatttgcaaacttccaaccttgctgcacaaatttaccgaatggaagccgaatgggaagctgcacggttacttatgctgaaagccacctggatggcagacaacaaaaaaccaaactcaaaagaagcttccatcgctaaagcaaaagcaggtcgtgtaggcaatgaaatcactttgaagtgtgtcgagttagcagcaagtgttggctataacgaagatgaactacttgagaagtgggcacgtgattcaaaaattcttgatatttttgaaggtactcaacaaatccagcaacttattattgctcgacgtgagcttggaaaatcttcaagtgaactaaaatag

SEQ ID NO: 46122 - DNA, 699 bp, Acinetobacter baumannii
atgaatatcctgattgttcatgctcatccagaacctctgtcttttacaacctccctaaaaactacagcacagcaaacctttaaaaaattgggccatcaagtagaaatttccgatttatatgcaatgcagtttaatcctgttgcctctaaggaagattttttagaactcaatcaacctgattactttaactatgcattagaacagcgaaatgccacaaaacaacaacttttggctactgatattcaagcagaaattgacaaagtaaaccgtgccgatctagtaatcttgaactttccgctttattggacttctgttccagcaattttaaaaggctggattgatcgtgtatttgtctctggacttttttatggtggtaagcggttttacaaccatggtggcatggcaggtaaaaaagcaatgctctgtttaacactcggtggtagaacacatatgtttggggaaaattctattcacggaccaattgaacattatctatcaccgattcaacgcggtagtttggcttatactggctttgaagttcttcccccattcattgcctaccatgtaccttacattagccaagaagcgcgtgaaactattcttgaggactatgtcacgtatctcactcaccttgaccaacttgaacctttaaaatttcctaaacttgaagagtttgatgaaaagttatatcccctctaa

SEQ ID NO: 46123 - DNA, 801 bp, Acinetobacter baumannii
atgaaaaataccaaaattaacgcacgtcatcttattatcgacctctttctttcttctgcttatcctcagctcagtatcaaacaaattttggttgcagctaaactttttaacttaagtgaaaatggtattcgagttgcgacaacacgcttgttaaatgaaggtatgatccagagcgtagaacgcggaatctatcaactttctccatctgcaaaagattgggcgaaagttattctcaatcgtaaaaatggaattaaacaaactaaagaatggcagcagcattatcttgccgtgtttacaggaaccttaggccgcatagaccgaacagcactaaaaaaacgggaacgtgcacttcgtcaatttggttttaaagagttggaaactggtatttacatccgcccagacaatttagcttatagctttgaaaaaacctgtgatgagcttgttttagcagggctagagaaagaagcaaaaatttgtattattcagcatgtcgactcaacaacacttaagcaaattttttctttatgggataccaaacaactcgaaaaaaattatgaaatgtatagtcgagatattacgcactggcttgaaaattatgctcactcccctttaaacgatgcagcagtcaaggcacttcttttaggaagggaaacaattgccttactcatgaatgacccattattaccagagccatttgtaaatgaatctgctcgtaatcaatttgctcaagatgtacagcaactagatgcaattggccaaaaactttggaaaaaaatatatgaacaggaattaaatttatag

SEQ ID NO: 46124 - DNA, 222 bp, Acinetobacter baumannii
gtgacatcggctgtacctgtacccactacggttcctaccacgttcttaactgttactgttgcattggcctcagtcacaccggtaattgctttacctgcggcatcaatcgttgcagtcagacttgaaggtgctgtaatgtctggtgcaactattatttttggtgcggtagcattacccgctttatctgtcgctgttatacttaaactttcgccatttagataa

SEQ ID NO: 46125 - DNA, 1245 bp, Acinetobacter baumannii
atgagccagattgcacaaccaatcacaattcgaaataccacatttaaaaaccggattattaaaggtgcaatgagtgaggcacttgcaaactatgaaggccagccgaatgaattacatttaggtttgtatagtgcatgggccaaaggtggtttgggctgtgcgattactggaaatgttatggtcaatgtagaggccaaaaacgaacctggggtagtggtgattgaaaccgagcgtgacctagagcgtttaaaagaatgggcagcagtcggtaaacaatatgggatggtacaacttattcaattgtctcaccctgggcgtcagtgtccaaagggcctaaataaagaaacagttgcaccttcggcagttccttttagcccagctttagcgactatgtttggtactccacgtgctcttacgcatgaagaaattttggatattattaaacgttttgcgactgctgctcgtatttgtgaaaaggcgggttttgaaggggtacagttacatggtgcacatggctatttaattagccagtttttatcaccattaaccaataaacgtacagaccagtggggtggttcaatcgaaaaccgtactcgctttttactagaagtttataaagcagtacgtgaagcaacttctgataattttattatttcagttaagctcaactctgctgacttccaacgcggcggtattagcgaagaagatgtgatttcggtatttaaagcagttgatgaagcagggatcgacttaattgaaatctcaggtggaacttacgaagcacctgcaatggctggtgccaaagctgataaacgtaaggcaagtactattgcacgtgaagcgtatttcttagacttcgctgaaaaaatccgtcagcatgtaaaatgtaaacttatggtgacaggtggcttccgtacagtagaaggcatgaatgctgctctagcaagtggggcatgcgactttattggtattgctcgtccacttgctgttgaaacagatttaactgaccgtttaatcgcaggccaagacgttcgctacgccgtaaaaccaattaaaacaggtttaccttttgtcgataaaatggcaattatggaaattatttggtacgcggcacaatttaaagccattgggcagggtaaaaagccaaatcctaaactgtcacctttaatcgtgtttttaaattatgccaagggtaatattaaggctgttgttcaaggacgcgtgaattcacgtaagtcagcgtaa

SEQ ID NO: 46126 - DNA, 1020 bp, Acinetobacter baumannii
atgaaaaaaatgcttataaagagcggtttactcattactagtttttttatttataaccaaacctatgccaactgtactttaagcaagggctttaccacagtcgatattccaatgacgattgggactattgtagtacgcccgaccgatccaatcggaacagttctccaaaagaatacttttactatttcacccaataattctactgcaacttgcaaccgtgccagtgaccaaattacagcggcacttccattaaactatcctgttagctcgattggaaataatgtgtatgcaaccaatattccgggtataggtattcgactttatagagaggcattcgactctacagatttttctggatattacccttataaacgcagcttgactcctaatacaacatatacgctttcaccaggatattttgttatggaagtgattaaaactgctgcaactacaggttcaggtgcattagttgctggtcgttacagtacctattatgtaacaggacaacaaaatcgccctttcttaacaactacagtattgagcagctcccctattcttattgcatcatcttcttgtgaaattcaaaacggcatagatacggttgttcagcttcccactgtgatgaagtcaggttttagagccattggatcaactcaaggtgagaaaaactttaatttatcgattctttgtaatggtggggaaaataactcaggtgtaccaacgagtaatacactgagtttaagttttgactacatttctgacacttcaaatagtcaggttattaataacagtgctgctgactcaactaaagcgaacggagttggtgttgaattgttatggaatatgaatggcgcgaacaatcctattcgaaaaggaaacaaactagatattggtacagtaagttctaaccagacagtacagtacgatattcctttaacggcgcgttattatcaaactgcttcgaatgtaacagccggtgaagtcaaagctaatgcaacagtaacgatccaatatgattag

SEQ ID NO: 46127 - DNA, 1101 bp, Acinetobacter baumannii
ttgaaattacgcgattcaattttaattcgagacttgcaacaacaagatattgatagcttttccgtggggaaacaaaaaagtgaatttcagatcacattaaaccaaggccttccaaatcaatggggtaatttttatttagtaggctcgtggattaattattggaaccagcctaatcgtaatcaacaattccaatttggatatagtaatcaatttaaagatctgacttacagtatttctgcaattactcatgagtttgaccaagaaaatcaaaattctggtcacgaaacgcaatatttgttgtctttatcttttccacttcaatttaaaaaaaataccgttaattttaatagttctatttcagaagatagccgaactttaggaatgagtggttatatcggaaaccgctttgattatggctcatcaatttcatatcaagatcaagggcaaacaagcctaaatattaatggcacctaccgtactaactatacaactataggcgcttcttttggtcagtccgatacataccaacaagaaatgatcaatttaaatggaagcttggtcgctcactcacaaggtattttatttggcccagaccaagtacagaccatggtattggtatatgcgcctcaagcgactggtgctcgagtcggcaatatctctggtctaagcattaataaacaaggttatgctgtcattccttatgtaaccccctatcgcttaaatgacattagccttgaccctcaagggatgccatcaactgttgaacttacggaaacaagtcatcgtattgccccatatgcaggatcgatcactaaagttaacttttcaacaaaaacgggatatgcagtttttattagcacccaaacacctaatggcggccatttgccatttgcagcacaagtttttaatcaaaacaatgaaatagtcggaatggtagcccaaggtagccggatttatttacgtactcccctaactcaagatcatctttatgtgaaatggggacaaagtaatagtgaagaatgtcaacttgattatgacattcaatcaaaaatcttacaggaaaaacaattaattattatgacagaggcagtctgcaaatga

SEQ ID NO: 46128 - DNA, 639 bp, Acinetobacter baumannii
atgtgtgcaaattttaaaccccttaagaaagagcattcttatcaattagacttacttgaacccacctttgattacaaatcagatgtctatccaagtgatgattgcccaataatcttatctcatcaaaatgaatgggaatggcgaaaagttaaatttggaatgttgccaccatatgcgaaagaagtttcatttaaatatgcaacttataatgcaagaactgaaacggttgatcacaaacgttcatttaaacatgcctggtcaaatgatcaatttggcctagttcctgttgaagctatttatgaaccgaaatatatcaatggtaaagcacattggtatggcatctttcgtcaagatgggaagccatttacgcttgcagcaatttatgaagaaaccataattgatgagcagaaagttagaacaatgtcgctgttaacaatcaatgcagatcgacattcgtttatgaagcagtttcataaacctgacgatgaaaaacgttcaattattgtaatacctgaccatcttagaaacgattggttaaattgcaaacacactgacgctcctgactttttcttagatatgccattaaatgaatttacgtctctgcctaaagcagaaatgaacaaatcaaaaaatagttag

SEQ ID NO: 46129 - DNA, 1275 bp, Acinetobacter baumannii
atgcaaattgccaaattaaaaatagcaattattgggttaggctatgttggcttgccgttggcagttgagtttgggaaaaaggtaccggttgtcggctttgatatttatcaaaaacgtatagatgagcttaagaatggtcaagatcataccttagaagtttcacctgaagaattaaagcaagctgttcacctcaaatatactgctcatttagatgatttacagaactctaattttttcatagtcacagtacctacaccaattgatgactttaagcagcctgatttaacccctttaattaaagcctcgacgagtattgggcaggttttaaaaaaaggtgatgtagtggtatatgagtccaccgtatatccaggtgcaacagaagaagtatgtattcctgttttggaaaaagtttcaggtttaaaatttaatcaagacttttttgcaggttatagccctgagcgaattaatcccggtgataagcagcaccgcgtaactaatattttaaaaatcacatcgggttccacacctgaggtggctgattatattgatgaagtttataatttaattattgaggcgggcactcataaggcgccgaatataaaagtagcagaagcagctaaagtaatcgaaaacacacaacgtgatgtcaatatcgctctgattaatgaattggcacttatttttaataaactagatattgataccgaagatgtactcaaggctgctggcacgaaatggaactttttaccattccgacctggattggttggggggcattgtataggtgtagatccctattaccttacacataaagcccagtctatcggcttgcatcccgaaattattttagcagctcggcgcttaaatgatcgtatgggtgagcatgtggcgactcagctcattaaagagatggttaaacagcgaattcaggtcgttggtgcccgtattttagtaatgggtcttagttttaaagaaaattgccctgatattcgtaatacaaaaattgttgattttattaaagcgttgaaagagtacgatttagatttagatatctatgacccgtgggtagatgatacagaagtacaacacgaatatggtttagcgccaattaaagaattacaacaaggcttgtatgatgcgatcgttattgccgttgcccataatcagtttaaatcaatgagtgcacatgagtttcatgccttaggtaaagaaaagcatgtactttatgatttgaagtatgttttagataaatcagagaccgatatcagactttga

SEQ ID NO: 46130 - DNA, 999 bp, Acinetobacter baumannii
atgttacaaggctcaacaatattagtaactggtggaacaggttcttttggtaatacatttgttccaatgacattggaaaaatataatcctaaaaaaataattattttttctcgcgatgaaatgaaacaatgggaaatggcgaagaaatttaaagatgataaacgtgttcgctttttcattggtgatgtgcgtgataaagagcgcttatatcgtgctttagatggggttgattatgttgtgcatgctgcagcaaccaaaattgtaccaactgctgaatacaacccttttgaatgtatcaagaccaatattaatggtgcaatgaacttgattgatgcatgtatcgataaaaaggtaaaaggtgttgttgccctttcaacagataaggcaagcagtccaattaatttatatggtgcaacaaaacttgcatctgacaaattatttgttgctggtaatgcatactctggtgaacatggtacaaaattctctgttgtacgttacggtaacgtaatgggatctcgtgggtcagttattcctttctttatgtcaattaaagataaaggtgtgctaccaattacagatgaccgtatgactcgctttatgatctcgttagaacaaggtgtagagcttgtttggcatgcatttgaagatatggttggtggtgaaatttatgtgaaaaaaattccatcaatgaaagtgactgatcttgctgcagtggttgctcctgaagctaaacaagaagttgtaggtattcgtccaggcgaaaaattacatgagcaaatgatcagtgttgaagacgcttattatacttatgaatatccagagcattataaaatcctgcctgtaatcaatgattgggcggaaacaaaagaacgtattaaagacggtaaacgagttccagaaggtttccactattctagtgataataatactgaatggatgagtccagaagatttacaacaatggttaattgaaaacgctgagaaagtaggaaatatctaa

SEQ ID NO: 46131 - DNA, 210 bp, Acinetobacter baumannii
atgactccattattaaaagctggtaacaagccagccagtccagaagacttacttcaaacagtcaatgactctctttctaaactagaacactacctatcagctctttcacgcatgcactttgacaatgacctaacaagtgatgagttcaacgccatcatgtgtgggttacaccttcaggtccacgagatctgccagcaaatcaaagcctga

SEQ ID NO: 46132 - DNA, 1413 bp, Acinetobacter baumannii
ttgaatatcgcagctaattccgaagatacctcttataaactcattaaagacatttctgataaaattgaaataccatttgaaaatgatttttggggacgtgaagcattagcaagtcgtttaacagatcatgtctcacgtataactgttggggcaactattgctattgacgctgaatggggagcgggtaaatcctggtttgttaaaaattggaaagcaaaattagaacaaaacgattttaaagttatttatttgaatgcttttaatcaagattatattgatgatccttttttaactatttccatggaaattgctaattgtctcgaaaatgaagaaacaaacatagatacaattaaagaaactataggaaaagcttatagagcaattcttcctaacttaccaatgttactttggtaccttactacatcacttgtaggtatgggcgccttggctaaacctgtagctgaaaccgtagaaaaacttaaaactgctgatgattttggaaaagaagctgcaaaacttctcaatgaaaaactacaagagcatctttcagcacaagttgaaaactacgataaagaaaagcaatccttacaatactttaaagaagctttagcaaaaataacgtctaaattagataaacctttagtatttattgttgatgaacttgaccgttgtaagccagaatttgcgattcgtcttattgaacgcatcaaacatttttttgatatcccaaaagttgtattcattcttgctattaataaaactcaactagaagaatcgatcaataacttttatggattctcaaatacagctaattatttagaaaaatttattgatttttctataatgttaaaaagtagagatttagatggcaatagatattctgaaattttaaaaaactataatcaggactttcagctattacttgatcatactgaaattcatatttacatgaatttatgtcaaatttattctcccaacccacgacaacttatacgaattattaataaattttcattattaaaagaaaatttagacaatcgaaagaaattatttctttttttatttttaatttattctgaaatgagattaattgaaacatataaagagataaattttattgaacacttctatgaattacaccttaatttccatcaaataagatttcgtcaatacgctctaaataggagcggagagcgaagtgaagctgctaagctttgtgactatcttgattatcatgtttactcttttaatggaaattcatctttatttgatttatttttttactatatagagcacattaaatcgtcaagaaatgattataaagaatgtaagaatgcttattaccctactaataaatgctccgaagatttaattgatgagtggcataaatatgtacatatgattgagggataa

SEQ ID NO: 46133 - DNA, 936 bp, Acinetobacter baumannii
atggataagaagtttggttatattgttattgcaataactatttttatatttgtgattttcgtatatggtctattccgtaattttatagaagtatctgataaattagattttacacctttaaagtatattgttggttttgtgttgacactagttatactggtatcatctatttcctcatatttggattctaataaatctagttctaatttgttttatgaattaatgtatggtcagagaaaaagaaaaataaagcaatataccgaattatttaataaaagtattgaagaggggtattacccatttagtgagaaaaataataatattaatatggaggaggtaactaatgaaattagaaataaaatagaattagcttctacagaaagctattttaaagaatttaaagataaagtaagagttgaagccatagttgatttttttatacaagaagctaagggcatagaaacaagagtaaaaggagaaatcaacaggttgtctaaaagtgctattattaatttgtcactaggaatgatgcttagtattggagggatattgtatctaggaaattttgttgtaaatgtacaaaattttggtagtattgaagaaatgattataaatacttttcctaaagccatttttgttttacttatagaagtttttgcgtattttttcttgaaattgtataaacaaagcttagatgatattaaatattatcaaaatgagttgactaatattgagtctaaaaatttagcagttcaaattgctaaacaatctaacaatcataaattaattactatatgtattgaaaaactcttaggtacagaaagaaactttattttagaaaaagaccaatcaacaatagaaatagaaaaagagcgtatcagttctaacaataccaataataccttacaggtactgaaagatattttaaaaaaataa

SEQ ID NO: 46134 - DNA, 153 bp, Acinetobacter baumannii
atgatttctaaaatttttatgccacggacaagttgtgagcgttcatacttatcagcaatttgtccggcagttgctgaaaaaaagaaatatggcaaaataaacaacaatgctgctaaattattgagtgtgtttactggtgcagattgttgctga

SEQ ID NO: 46135 - DNA, 438 bp, Acinetobacter baumannii
atgaatgaccgtatttatttacaatcgaacgtctatattgactacgtaaacgggcgccagtgtcggtaccgtaaccaatacctgtttccagactatttagtttatcggcatttaacgtcacaatcactggtatacgtttttcttcccgagcttgagcctgtaaacggtcttgttcagactcttgttcttcatgctgtacagtcgcagcttttaaagatgcgggtgcggcttgtacactttcagtcccggcaaattgtttttcatctaccacattttgtgttacttctttacttgaggaagccaactggcgtgctttggcaagttgttgttgctctaaaggaagtagcttcgattcgtcaatatcaacattctgctgatcgaccaacgcttgtaaatcgggtggtaactcaagtggtttttcaattgggtcgggtttaa

SEQ ID NO: 46136 - DNA, 369 bp, Acinetobacter baumannii
atggggtggaaggggaaaaagccgactagttttagtcttgatgtgtctaaagcagcagaagcacatgtaaagaatattgtcatggataccgtgcaatccttagttaatttaagtcctgttgatactggagcataccgtgcttcacatattgtttcgattggatctgctgatttcggcgtgcgtgaacctgaaacaaacccaattcaagatgcagcaattcaagctgtaaagattaaattgggcaatttggtttatatccagaacaataaagcttatgcaccccgcttagaaaacggctggtctgatcaagcaccacaaggtatttatggcctcacgtttaactttatttctcaaaagtacggtggttaa

SEQ ID NO: 46137 - DNA, 411 bp, Acinetobacter baumannii
atggtaaatacaaactacgttcctttgtggcttatctcaccatttcagcatgtgcattacacattagttcgaaatcaactgcatatggatttgctatttgaggacatgaataaggtcgatcaattcttgtctattgaaggggctgcagctcaggttgatttctattccgaaggtgcatatgcagttgttcagcttggtgatacttcagaaagaaatcagattgaagtgtatggattgcttttacatgaagctgttcatgtctggcaaaagattaaaaagctcatgggtgaacgagaaccgagctctgagtttgaagcttattcaattcaggcgatcgctcaggatctctttaagatgtatgaggaaagcgaggttaaaagtcatggggtggaaggggaaaaagccgactag

SEQ ID NO: 46138 - DNA, 294 bp, Acinetobacter baumannii
atggcaactcaagcatatgtaatcgtcattgaaatcccagaaaagaaatgcccaaatgtaagaggcaaagctagtctaattaaagatggtaaggcaaaagtttatctttcaaataatacaacttctagagatgctgaaaatggctttgaccgatatggagttacaggtggtcgaaatgctgtagtagtaactgaggcaacatttccaaaatacgaagaagaaattactaactatcttaatcgaagatttggagaagactggtctttaaaattagaaaagtgctcagttgcataa

SEQ ID NO: 46139 - DNA, 198 bp, Acinetobacter baumannii
atggggtatatcgttaagttaaccgattctggtaaatatttaattccagacaatgagggattgcttactacaacagattcaaaagaaaaagctgtagaatttggtcaaatagatgatgaagagtctgctaagttaactgcccatagttttagtggtggaatgacaactggcgttgatttcataattgagaaggtgtaa

SEQ ID NO: 46140 - DNA, 369 bp, Acinetobacter baumannii
atgggcttacgtgaagaaattcaggcagatattgctgaagcatttaatgatgatttagcggacgccgttcattcatttacttgtgaccggatctcaagaaaagattgggatcctaaaactgaaacttatgtcgaagttaaagaaaactattctggtcgtggcgttctgtttggctcatacagtcaatatgagattcagacgcttggagtactggccacagataaaaaggctacagtgctgcagaatgaagttaccaaagagccaaagattgatgatgagtggttaacagccttaggctcattccgggtaattcatattcaacaggatccagcttctactatttggaaatgtcagttgaggaaggtataa

SEQ ID NO: 46141 - DNA, 381 bp, Acinetobacter baumannii
atgagctttatcactgaacaagaagcgatagaacatgttgaaggctttgatgctttatctgccagtgataaggctcaatacctccaaatggccgaagcatatctattagcacgtaacgttaagccttatgaagatgctacccaagtacctgaacctttaaaaacggcctcctatcaaatcatcaagggcattatgaaaggtgatctatatcaagggcaggaacaggcactaaaacgtaagaaggtcaaagctgatacggttgagaccgaaaaggaatatcaggacggatcagtaaagcttagtgcaatcgaacaattcattcttgatttgattaagccttacagcaaacgaaaagctgtattttttgtcaggaaaatttaa

SEQ ID NO: 46142 - DNA, 336 bp, Acinetobacter baumannii
atgggactttcatcatttaaccgtgcacgggaaagacaacaaatgacagaaacaaaaattgctgaactcgaagaacaactggcaacagtaaagggcgaatttattgcctttcaaaatgataccgaagcaatgaaagcacgtattgctgaacttgaatcaggtgaaggtggtcaaacacctgaagatgaccaaaaaccaagtgatactcaaccacaaccaattaactatgctggtctaaaagtagatgagcttcgagctgtactaactgaaaaaggcattgcatttgaagcaggtgctaaaaaagatgaacttttagcattaattccaaaggaataa

SEQ ID NO: 46143 - DNA, 531 bp, Acinetobacter baumannii
atggcaggtaatacccatgacatttcggctggtactggagcagcagccgtaattgatggtcattcatttatcgatgcatcttataaattgggagatgctgttgataaattaacagcgatttcaatgcactcattcacaatggcagcactagccaagcaaggtttaattgaaactgtgcgtgatgctgatggtgtggtgctttacaaaacttttatggatcgccgtgtgattgtcgatgacggtatgccagtggatggtgatgtatttacctctttcttgtttggccaaggtgcgattggtttccaagatattggtgcaccagttggtgtagagactgaccgagacagcctagcaggtacagatattcttattaaccgccgtcactttgtattgcatcctcgtggcattaagtgggcaggtgatacaggtattgcacctaataatgctggtctagcaacagccgcaaactgggaacgtgtctacgatcctaaacagatccgtattgtggcattcaagcacaagatcaaataa

SEQ ID NO: 46144 - DNA, 627 bp, Acinetobacter baumannii
atggtgccaacacctatacgggattatcccgaatggcaccttgggcgtcaaaattacgcattgtggtatctagaaattaatgatcagaaattagttcattatctagatcaattgcgtgcgcatttttcagaatttctagtagaacctaatcaccgtcaatatcatgtcacgctgtttatatgtggattcttgacccatgaaaataaagttcatgatgatgacttttgttttagtggctttgtgcagcaaggggaaattttaagaaaagaagatattgcaccatttcaattaaaaattggatcagttgatagttttagtagtgctttatttgtagaagtccaagacatcgaaaatatcttatctcacatacggcaaaaattagacacagtttctaatgaaattgccgctttagattactgtccgcacattacattgggtttgtataagaaagactatagtagcaatttgattttacaaaaaatttctcaattacctgtacaatacacacaggctgaatttgatcttaaagtagagcatttaacctttggctattatcaagctcaaattttacaaggtcagctgtatccgtatcagcatttgtttttaggtgattcatgttgcaattga

SEQ ID NO: 46145 - DNA, 1056 bp, Acinetobacter baumannii
atgaactggtggttagaatccgtacagcaacctaatttagatgcaaaacaacaagctgagcaacatcaactccagctcaccaaacctactggtgccttaggtgatttagagcaaattgcaattacacttgccagtttacaatcaaatgcgcatccacaagttaaccatccatggattacaatttttgcaggtgatcatggtgtagttgaagaaaatatttctgcatatccccaagctgttacccgtcaaatgttgcaaaacttcacgacgggtggtgcagcaattagtgtgcttgctaaatatcatcaagctcatttgcaagtgattgactgtggcacagtaggcgaagcatacgaatacgcaggtgttgagcgtcattgtattcgtgccggcacagcaaattttgccaaacaagctgcaatgaatgctgacgagtgtcgtgctgccttagagttagggaaaaaaagtgtagatactgctaaagcgaatggagcagatatttatattgcgggtgaaatggggattggaaatacctgttctgcctctgctttagcatgccttttattaaatgatactgccgagcaattgactggagtaggtacaggaattggtgctgatcagttaagacataaaattgaagtaattgaaaaagcaattgaacttcatcataaacatgtcattggtgatgtcttcaaaacactatgtgctgtaggtggtttggaaattgcggcaattacaggtgcttatatccgctgtgcgcaagtgggtttacctgtgattgtagacggttttattagttctgtagccgctttatgtgctgtgcggatgaatcctcaagtgcgtgattggatgttgtttggtcatcaatcggctgaatatggacatcgccgtattttacaagaactcaatgctgacccaattttaaaaatgaatttgcgtttgggtgaaggtagtggtgctggcgctgctttggcattggttaaaatggcttgcgctttacataaccaaatggctaccttcgctcaagcggctgtaagcggaaataaaattggctaa

SEQ ID NO: 46146 - DNA, 579 bp, Acinetobacter baumannii
ttgctcagacatggagaaagccagtatagccataccttacgtggccatttagatgatgagttaacagcaaaaggttggcagcaaatgcaggcaaccattgagcaagtttcaaatcagccatgggatgtcattgtaagttcatcattaaaaagatgtgtttgttttgccgagcaactggccaaaacagcagaactccccttacttgtaaatcatgacttaaaagaaatgtattttggtgaatgggaaggcatctcaactcagcaaatttatgaaacttcacccgaattactggcaaacttttggcaaaaaccaagtcaatattgtccacctcgcgcagaaacattagaccagtttcaaacaagggttcttaaaggctttcaagatttgctggagcatatgcaaaagcaaaacttacagcatgctttagttgttacgcatggcggtgtgattaagctattggcttgtttagccagacaacagcctctagatgacttacttaaaatgccggcagagcttggaaaattatattcactcgaattttctgaaacagatggtcaattaacttttaagttaagatag

SEQ ID NO: 46147 - DNA, 264 bp, Acinetobacter baumannii
atgtcacgtttaactaaattagatcgtatgactcatgcagaaaaagaggctgctaagaaggaattttgggaagctgctgataatcaaacttttccacctgaaacagtagctattgttatgcacgtatccttaccgtggttgcagaagaaaagatgtgaaggtggcggcattccattctctaaacctcataaacgacaagtaaattatatgaagtctgatgttttggcttatattgaacaaaacaaaatggcacatacagcataa

SEQ ID NO: 46148 - DNA, 408 bp, Acinetobacter baumannii
atgacaggtaatgaacgtatcccttttgaatcacaattcaaaactacagaaatttttaaacgtgaaagtgctattcgtaaaaatgacatcctagcattcagtgaaacaatgaatggctatttcaatattgtaactaatgatgcttggcagttatggaataaagccaaagccgagacggtgccagatactcccacccctagtgtcactctaacttgcgctgaactaaaagaagcctttgattttggtgcgccagatggggaaaaagatcaattccagatggaaactgaaatgaccatcaaatggctccaagatggttatgacggtgaaggatactactgttggtatgctgatttacctgaggaaggttgcattaagttgggtgttagcgaatcgggagctgaaggatga

SEQ ID NO: 46149 - DNA, 1521 bp, Acinetobacter baumannii
atgaatgacgatactaaaaaatgtcctttttcccaacttactactgattttggggctccagttgtagataaccagaatagtatgacggcaggtgcaagagggcctctacttgctcaagatttatggttaaacgagaaattagctaactttgttcgtgaagtaattccagaacgtcgtatgcatgcaaaaggttcaggtgcattcggcactttcacggtgactcatgatattactcaatatacccgcgctaaaatctttagtgaaattggtaaaaaaacagaaatgtttgcccgatttaccactgtagctggtgaacgtggagcagcagatgctgaacgtgatattcgcggctttgctttaaaattttatacagaagaaggtaactgggacatggtggggaacaatacaccagtgttcttcttacgtgatccacgtaaatttccagatttaaataaagcagtaaaacgcgatcctaaaactaacttgcgtagcgcaacgaataactgggatttctggactttattacctgaagctttacatcaggtcactattgtcatgtctgatcgaggtattcctgcttcctaccgtcatatgcacggttttagtagccatacctatagtttcatcaatagtgcgaatgaacgtttctgggtgaaatttcatttccggacccaacagggaattaaaaatttaacagatgccgaagctggtgaattagtggggcatgatcgtgaaagtcatcaacgtgatttattcgatgcgattgaacgaaaagatttccctaagtggactttgtatgtacaggtaatgcctgagcaagatgctgaaaaggttccatatcatccatttgatttaacaaaagtctggcctcatggagattatccattaatcgaagtgggtgagttcgagctgaatcgaaaccctgaaaatttcttcttagatgttgaacaatccgcttttgcaccaagtaatctggttcctggcattagcgcttccccagaccgcatgctgcaagcccgtttatttaactatgcagatgctcagcgttatcgtttaggtgtgaattatcagcaaatacctgtaaatgcggcacgttgcccagttcatagtaatcaccgtgacggtcaaggacgcatcgatgccaattatggtggtcttccacattatgagccaaatagttttggacaatggcaagagcagcctcagtacaaagaaccaccgttaaaaattaatggggatgctgatttctggaattatcgtgaagatgacaacgattatttcagtcaacctcgtgctttgtttgaacttatgactcctgagcaacaacaggctttatttgataatactgcacgcgcaatgggtgatgctcttgatttcattaaatatcgccacattcgtaactgttacgcatgtcatccagcttatggcgaaggtgtggctaaggcgcttggtttgacagttgaaaatgctcaagcagctagagaaactgaccctgcacgtggtttaccaagttttatttaa

SEQ ID NO: 46150 - DNA, 831 bp, Acinetobacter baumannii
atgggatatgtcacaacaaaagacggcgtagatattttttataaagattggggccctcgcgatgctcctgtaattttcttccaccatggttggccgctcagttcagatgactgggatgcgcaaatgcttttttttcttaaagaaggttttcgtgtagttgctcatgaccgccgtggtcatggtcgttccactcaagtctgggatggtcatgatatggaccattatgcagatgacgttgctgttgtggttgagcatttaggtgtacaaggtgcggtacatgtagggcattcaacaggtggtggtgaagtagcacattatgttgctcgttatcctaatgaccctgttgctaaagctgttttaattagtgccgttccaccattaatggtgaaaactgaaagtaatccggatggtttaccaaaagaagtttttgatgaccttcaaaatcaactttttaaaaatcgttctcaattttatcatgacgtacctgcaggtccattttatggatataaccgaccaggagcaaaagtatcagaacctgtggtgttaaattggtggcgtcagggcatgatgggcggagcaaaagctcattacgatggaattgttgctttctctcaaacagattttactgaagacctcaaaaagattgaaattcctgttcttatcttgcatggtgaagatgatcaggttgtaccttttgaaatttcaggtaaaaaatctgcggaactcgttaaaaacggtactttaattagttatccaggatttcctcacggaatgccaactacagaagcagaaacaattaacaaagatcttttagcatttattagaagttaa

SEQ ID NO: 46151 - DNA, 495 bp, Acinetobacter baumannii
atgagtattacagttttaaaaaatgattcattaataaattacttttctgatgacgcggtagcaacagggcaaattcaactgaccgatccaatgcaattactagcagatccaaatcttttacgtaatgctttactgacttattcagaaaaagtgattgagctagagcacaaagttgaagttatgcaacctacaatggaagcatttgcccgtattgctagagccgagggaagtatgtgcctaactgatgctgctaaagctctacaacaagaaccacataaatttaataagtggcttcacatgaatgactggatttacaaacgtcatggcagcaaacattgggttgcttatcaagagaaaattaaagcgggatatttagaacataaagtaaaggatatccagctgcctgatgggacgatcaaaatcacagagcaggtgagagtaacaccaaagggtttaaccaagctttcaaagcttctaggaaacaataatgcataa

SEQ ID NO: 46152 - DNA, 138 bp, Acinetobacter baumannii
atgcataatttaggcaataaaaaagcccttcagagaattcttggcggaatcaaagagctttggattgctaacacaaggagtattaacactgaacagtatcgtataagggtttgggaaaaatcaagtctacgatattaa

SEQ ID NO: 46153 - DNA, 702 bp, Acinetobacter baumannii
atgaatagaaaattaatcagtactattgttctcatttctgtatttggagttactgcttgtagcaaggcatcaaatgaacaagcaaaggtagatactactgagaaaagcagctctcaaaacgtaaaaacggaattatccgcaagtgataaagcgattttagatagatatgaaacaatcacaaatgaagttgtgactgctggtgaagatgaaaagataaaacaaactttagcgcctttaatacctgaaattaagaaagttactgctaaaaaacaaagagaaatggcattgatgaatatttatatgctgtctggtatgtataaagaggcttatgagttaaatgagcaacaaatcaaagagaaacccttgcctcaacggataatgtttagatgtactttgcttgaaaaattaaatgaggccaaagtaaaaattcaacagtgtcacgaagcttctgcccaactcatacaaaccgaattgagtaaatcatctagcaaaaatgatccccagtacagagacgccgaatttgtatatttaactgaaatgtataaagctggtcacactgactataaagcaaaaatacagaaatttattgatgaaactaaagatgtcgcatcaaaagataaatataagtctttgtatgatgccgatattgagtcattttatggtactgattcaccaaattatgtaccagaatcattaaagtaa

SEQ ID NO: 46154 - DNA, 840 bp, Acinetobacter baumannii
ttgacaacaccatatataactataggctgcccgacctctggtggtggccaagtaatttctgggaataatatgttcctgattgacggaattcccgttgcctgtgttggtgacaaagcaacttgtccaactcataaagtcgttgcaactattgtatctggcgatccgtgcatgcaaatctttgggaaagctgctgcccgagtaaatgattcactctcttgtggttgtaaattactgcctcaacaaaacttagttgttcaggataacggtggtggcgctgcatcatcggctgcaaaatcttcatcagctccaatttcacagaagcaaccagccacagacagttttgttaaagatgaatatgagaactactacatcgagcaaaacacaacgaaatatgtaaaatttacaaatggtattttcccgtacgatgaagataagaaaaatctttttggggcaattagtcaggctgtttcaggtgtatgtactttcatagttacttatattctaaaagggcaagaacttttcgtgacagtttctatgcttcctccaacattaagcggtgatgctacaatttttccatacgcaacacttgatcttgtgcataacaatcaaagcttaggaaaaacacgtttggaaaagggaaaaggcgtatggtcaacagaaaactctaaggagcctgtaggtcagtgtaaggtaactctacctaaacctgatttatcaactattgaagcaactttaactatgggttacaccgcaaaatttgatggcggtactgttcgaccaaacccacctcacactcgcttctcttttactttaaattcagcatcaagacgtaaatcatga

SEQ ID NO: 46155 - DNA, 297 bp, Acinetobacter baumannii
atgaagtctttccttatatatgattcattgataaaaagatatgttttattaactgtagggctaattgttattgcctttatgatagctatcttttttaaaggggaacttgaaattgattttgcgattggggctgtttgcggctatttaaatatttttctattgttaaagaattatagatttccacttattcccgaagttaaagaagatagtgatgaccttgttatgtatacaagggttagtcttcttattttttttgttttgatagagtttggttttttacttgccgcattattttaa

SEQ ID NO: 46156 - DNA, 1989 bp, Acinetobacter baumannii
atgacgacccctttaaacgaacgtcgtattgcaaacgcaattcgtgtattggcaatggatgctgtgcaacaggcaaactcagggcatccaggtgctccaatggggatggcagatattgctgatgtcgtctggcgcgagtttttaaatcacaacccaaataatccacaatgggcaaaccgtgaccgttttgttttatcaaatggccatggttcaatgttgcaatatgctttgcttcatttaacaggttatgatctttcaattgaagatttaaaacaattccgtcaattgcactcaaaaactcctggtcaccctgaatatggttatgctccaggaattgaaacaacgacaggtcctttgggtcaaggtattgcgaacgctgttggttttgcattagcagaaaaaactttagctgctcagttcaataaagatgacttaaaagtagttgatcactttacctattgtttcttaggtgatggctgtttaatggaaggtatttctcatgaagtatgttctttagcaggtactttacagcttggtaaattgattgcttattatgatgacaacggcatttcgattgatggtgaagtagaaggctggtttagtgatgacactgaagagcgtttcaagtcttatggttggcaagttcttcgtgtagatgggcatgatgctgatgcgattcgtcaagcaacagttgaagctaaagcagaaactcaaaaaccaacgattattatttgtaaaacaattattggcttaggttctccaaacaagcaaggtaaagaagactgtcacggtgcaccactgggtaaagatgaaattaccttaactcgtgaagctttaggttggactgaagaagcatttgttattcctgctgatgtatatgctgcatgggatgctaaagcaaaaggtaatgaagctgaagcagcttggaatgaagtgtttgctcaatatcaagcaaaatatccaacggaagcagctgagttacttcgtcgtattagcggtgacttaccaacagaattttcagctcaagcagatgcatttattcgtgaaacaaatgctaaagctgaaactgtagcaactcgtaaagcgagccaaaacacattacaagcatttggtcctttattacctgaattattaggtggttctgcggacttggcaggttctaacttaacactttggaaaggttgccaaggcgttcaagaaaacccggctggtaactacgtgtattatggtgtacgtgagttcggtatgactgcaatcgctaacggtgttgcattgcatggcggcttcattccttacgttgcaacgttcttaatgtttatggaatatgcacgtaatgcggtacgtatgtctgcattaatgaagcaacgcgtgattcatgtttatacacatgactcaatcggtttaggtgaagatggtccaacacaccaaccaattgaacaaattgcttctttacgtggcacaccaaacttaaatacttggcgtcctgctgatactgtagaaacagcaattgcgtggaaatctgctttagagcgtaaagatggccctacagcacttattttctctcgtcaaaacttaccattccaaacgcgtactgaagagcaaatccaaaatgcggcaaaaggtggttatgttcttgctcaagagaaaggtgagttgaaagcaattattattgctactggttcagaagtttctttagcaatggaagcttatgctcaacttgaaggtgttcgtgttgtttctatgccatgtgcagaagagttcatgaaacaagatgctgcatatcgtgaagcagtattaccagctcatattcgtgcacgtgttgctgtagaagctgctcatgttgactactggtggaagtttgttggtcttgatggcaaagtaattggtatgacaacttatggtgagtcagcaccagcaaaagacttgttccaattcttcggtattacaactgaggctgtagttgctgcggtaaaagagttaactgcttaa

SEQ ID NO: 46157 - DNA, 408 bp, Acinetobacter baumannii
atggttaacactgcccaagcacaaagtacttctactccttatcgagtaacgcttaccgatccttcaggccatcaatggtttgcagatgaacccaccgataaaggtggacaagatacagctccaaatccggttcagcttttattatcggctttaggagcttgcactacaattacactagaaatgtatgcaaatcacaaaggcatcaaaattgagcatgtacaagttgatttagcattaaatccaaatggtgatccagaagcaggtcaaaataatattgagcgtaaaattactctaaaaggtgaatttactgaggatcagcataaaagattattaaaagttgctgaaaactgccctattcataagcttttaacgtctaatattacgatccaaactgaacttaacatttaa

SEQ ID NO: 46158 - DNA, 363 bp, Acinetobacter baumannii
atgaaaagtcatgatcatttgctcgataggcaatatgacgaggatcactacaactgtgttcactttgttcatgaagctgcaatggacctatatggcatagatcgggctgaagcgcttgaactctttatgcagcctaagggcaaaattacttttttatcttcacggttaaaacttttaaatccgctacccatgcccaaggaaggctgcatagtcgccttccatccgagacaaagaaataagcccccgcatgtggggctttttcgtgggcaaaagattcttcacctcatggaaagcggagtcacttatttgcctgaagaggttgtgatggaaatggggtttaatcgggtcagttattatgattaa

SEQ ID NO: 46159 - DNA, 507 bp, Acinetobacter baumannii
atggataacgaatatgccaagttctttttcaatcggaaagttgatgtctatcaactggagtgtattgagctatcacatccttcttttatgaatacttatcgggtagtccgtaatgatgaccgaggtgtctatgtacaacataaggaaggatccggtcaggtctattatgagttcttgccagtctctatacaaagatccggaatgcttggtgatctggaccagacattaaccgtttctatctctggtctaggtgatgtgatgcctgatgagtttgaacgggtaatcgaagggcaatatccagatgtaaagccaaccgtaaattaccggatttacagttcagacaatctgaactctccaatgttttatttacttggactgcaactctcaagtgtcgccatgaaccataaagctgtgacattcaaggctgaatcaccacgattaaataccactaaaactggggacatttttgcactggatcgctttagtggtttgaagggggctatatga

SEQ ID NO: 46160 - DNA, 399 bp, Acinetobacter baumannii
atgtacaagttaaagctaaatcctcagaccagcggctatggcgtaacaccgggtgatgatgtgaaacgtcagcagatggatggcggtcgtggtcgctattacatcgatgtgaaacgtaacagccacattgttgatgtgaactggaacttaagtaaaaccgatttcaataaaatgatggctttctggcgggtctaccagaacaaaccagcctcattttatgcggatttggtgattgatcagggaacacgtcagcaatatctatgcaatttcattccaaactcgttcaagaccaatgaagtcaacggcaacttatatcgtgtgaacgcgcagctcgaagttgttcaaaaccagcctaacctgaatgccgatatagcattaattaaagattgggaggtctaa

SEQ ID NO: 46161 - DNA, 588 bp, Acinetobacter baumannii
atgaaaaaaataattgtaatttctacaacacttttaggccttacgggatgtgccattcctgcggtaaataatctcgtaagatccacaaatatgtatcaggatgatgtttcgggaaatactgcaaatttaagggtttatagaagtaatattcccatggtgcagttctatattacttatcaaaataatgagggtgaaaaaatttcaaaaaacctaataactaagcagatttcaaataatttaacaaagtatggctctatgcatgagcccaaaaaattaaatatgcctaaacccacaatcagtttaaataatggtgaagagttttttgagtttaaagtacccgcaaataagaagttaactttcaggcttacttctgttattgggtcaactactatgtatagttgtgatgtaaaaatggactatcagttggaaagaaatggaaattatgaattgatccgtttaaaacagatcaaagattttgtgaatccagctttactgactgaaccatctcaagatgaagcctactgcaagtttgtagtaaaagagatttttgaagatggtaaagaaactattattaaatcgatttcttaa

SEQ ID NO: 46162 - DNA, 1248 bp, Acinetobacter baumannii
atgagtcgccgtattatatttattggcgcagcaggtgaaatgtgtcgtttagcgatcgagcgttttgctaaagccaaaggtgattgggaacttgtactatgtgatattcgtcctgaattactttcaaatcttgttgaaaaactccctcaagggctagcaactacacaacatttagatttgtatgacaagcaaaagctacaagctgtggttaatggtgctgatttagttgtacttggagcaggtccatacattcgaacttcagcgcctgtcattgaagcatgtttagaagcaaaagttccttacttagattttgatgatgacgttgaaagtactgaacatgcgttatctttgcatgaaaaagcaaaagaagcaggtattccaatctatgtaggttgtggtgcctcaccaggtatggcaaatgtgttagtggtagatgccgcaaatgagctagataccgttgaaaatattgattgttgctggatggttggtgacgaacgcccaggtattggtcgtgccgtacttgaacatttcttacatatcacggcgggtgactgtcttacttgggaaaatggcaaacgtgttaatcacgaaacttttgtcgaaacaggcactgcaccgatgggaggtggattgggtgaaatattaatgtatgaaacagctcatccagaaccagttactttgccacgcaaatatccaactgctcaacgtatccgttgtttaggtggtttacaccctgccccatttaatggactagggcgtggagttggcttagctgttcatcatggtgaaatgacagtaaaagaaggtgtggacttccttgaagatctacttaataacaaattaggttcagctaaaggctggaaagctgcaatcagtggcatgatcggccaagttaaacgtaaagaatcctcattctctgccatggtcgagtttttgacaaaatctgctataggaaaaacctatccatataaaggcggtttattagctcgagtctacggaactaaaaatggtagaccagcagttgcaatcagaagaactgttaaatcaggtgaagattcctatttaatgcgcgatatggccgctattacagggacggcttgtgctgcattcatggtattagcgctcgatgaaacaggtaaacgtagcggaactttcgccccagaagactgggctgaaccagaagctttctacactgcccttgaacgtgtaggaacacctcgtgctgagattgtggagagtgtgctatga

SEQ ID NO: 46163 - DNA, 666 bp, Acinetobacter baumannii
ttgcaggcaattagtaattggcaagcgggtagtaatgagaaaaaaggaaataaattaaaagaattatgcgttaatctccctgaaaaatttcgtttacttccaccaaacttggttttgtttagacaaatatccttagataacgtagggctatcgcgttttttaagagaaaaaaagcttcctgagaagatatcttcttggaccacagattataaatttgctgaaaaattcaaaggcggtgtaccttctgaactcggggattttaaagctaccatttttaaaaccacgccactaaataatcaagtaatagtaagtttaagtgaactgtataagtgttctgatttctgtaatgcaatgaaacttaataaaaataagattgataggtatcatgatggtgctggtaaatactgggatacccagtctgaggtcataatggcaacagagtatttggatcactcaaatatatattcaatgggtgggtattcagggacacctgagcaaattgcagaacaagcttcgagagaaaagaatattcctatatctttaactattgatgatattaaagaattgagtagggattacattggaccttggtggttaagtccagaagggacgagacgcgctgttgctcgtactttggaaattgctcgtaatagggggatgctctaa

SEQ ID NO: 46164 - DNA, 261 bp, Acinetobacter baumannii
gtgagaaaagagctcgaccaactttggggaaaatatgaaatagctttgtatagtttggaagtattaaatattaaatataaaaaagaatgtctcgcaaatgtttctgtgattcaaaatcgtttagaaaaatataagcaaacttttaataattctcttacttcagaagaagttaaatcaagttcagaagatatttttggaagacttgcaaatgaaaaggctaatggtttagaagaacttaggaaaattagattaaagcagtaa

SEQ ID NO: 46165 - DNA, 381 bp, Acinetobacter baumannii
gtgagactaatacttatagtaattttaatgtcagttggaagtctattgcatgctgaagaaaacgaatcaacggtttgtgaaaagctcaatagtgcagcatatcaaatcatgttagaaagacagtctggtataaagcctcttgatttgcttgaaaagctacttattccattagatcgagataaggaaaatttaatactgaattaccatatcaatcacttttttggtcatgtaagtggtttggcttatgagacacctctctatacaaaagaagatgaaaaacaaaaagcggctacagattttggtttgagaattgaaagaatttgtagaaaagataagacggcattatttgctcctccgcgatttcagacttttgaggaatag

SEQ ID NO: 46166 - DNA, 192 bp, Acinetobacter baumannii
atgcaaaatcaaaatgaacagattaataatgttgagcaattagataccgagaacgagcaaaagcaagaaaactcggtgcttaattctgtgaatcctgatctagttgaagttaaagatttaattgtagaaatcgggaaagatatagttgattttgcatcatctgttttcgataacatcgatatcaatttttaa

SEQ ID NO: 46167 - DNA, 369 bp, Acinetobacter baumannii
atgggatggaaggggaaaaagccgtctagttttagtcttgatgtgtctaaagcagcagaagaccatgtgaagcatattgttatggatactgtgcaatctttagttaatttaagtcccgtcgatactggtgcataccgtgcttcacatatggtttcggttggatctggtgactatggcatacgtggacctgaaacaaatgctattcaggatgcagctattcaagccgtgaagtttaagttgggcaatttagtttatatccagaacaaccagccttatgcagagcgcttagaaaatgggtggtctgatcaagcaccacaaggaatttacaacaccacctttacctttatttctcagaagtatggcggctaa

SEQ ID NO: 46168 - DNA, 405 bp, Acinetobacter baumannii
atggttaatcctgattatgttcctgaatggtatatctcgccttttcaacatgtgcagtacacgcttgctcgaaatcaactacacatggatttgttatttgaagatatggataaggccgatcaatttttggatatgggagcggatgcgcaagttagtactttttctgatggtgcatatgcaatcgtccaaattggtgatacggcggataaagaccgaattcaagtttatggattgcttttacatgaagctgttcatatctggcaaatagtaaaacggagaatgggtgaacgagagcctagtgtggaatttgaagcttattcaattcaggcaatcgctcaagaacttttcgaaatgtacgaagcaagcgaggtgagcaatgggatggaaggggaaaaagccgtctag

SEQ ID NO: 46169 - DNA, 369 bp, Acinetobacter baumannii
atgggcttacgtgacgaaattcaggcagatattgccgaagcatttaatgatgatttagcggacgccgttcatacctttacatgtgagcggatctcaaaaactaattgggatcctaaaactgaaacatatgttgaagttaaagaaaactattctggccgaggtgtactttttggctcatacagtcaatatgagattgagacgcttggagtgctggctactgataaaaaagcaactgtgctgcaaaatgaagtatccatgactccaaaaattgacgatgaatggctaacagctttaggctcatttcgagttatccatattcaacaagatccagccagtacaatctggaaatgtcagcttcgaaaagtgtag

SEQ ID NO: 46170 - DNA, 381 bp, Acinetobacter baumannii
atgagctttatcactgaacaagaagcaattgaacgtgtagcaggctttgatgctttatctgccagtgataaagctgactatcttgaaaagtcagaagcttacttattggcgcgtaacgtcaagccttatgaagatgtgacaacagtccctaaggccctcaaaacggcttcctatgaagtcttaaaaggcatcatgaggggtgaaatatatcaaggacaggaacaagcattaaagcgaaagaaagtaaaagcagatacggttgaaacagaaaaggagtatcaggacggatcagtaaaacttagtgcatccgagcagtacattcttgatttgatcaagccatattgcaaacgaaaagctgtattttttgtcaggaaaatttaa

SEQ ID NO: 46171 - DNA, 531 bp, Acinetobacter baumannii
atggcaggtaatacccatgatatttcggctggaactggagctgcagctgtaattgatggcgtatcttttgttgatgcttcttataagttgggtgatgccgtagataaattaacggctattgcaatgcactcggcaaccatggcggctttagctaagcaaggcttaatcgaaactgttcgagatgctgatggtgtggttctctacaaaacctttatggaccgtcgtgtgattgttgatgatggtatgcccgttgaaggtgatgtctttacctcattcttgtttggccaaggtgcgattggtttccaagatattggcgcaccagttggtgtagagactgaccgtgacagtttagcgggtactgacattcttattaaccgccgtcactttgtgctacatcctcgtggcattaaatgggcaggtgatacaggtattgcacctaataatgccggtcttgctacagccggtaactgggaacgtgtctacgatcctaaacagatccgtattgtagcattcaagcacaagatcaaataa

SEQ ID NO: 46172 - DNA, 2217 bp, Acinetobacter baumannii
atgcctgagatacaaattattgccaaggataatcataaaaccttggtaaccacagagggaacttctgcaaaactttcagaagcgtcagttgtgttggtgaaagtggctgccagcgatgtattggtagtaaatagggagggtaccaatgcagtcatacgtctgaaaaatggcgagactattgttattgaaggcttctttagtggaacagctgagcctaaagataatagtctggttttccaagatgaaaatggacagttgatttgggcaaaattcaaagatgctgaaaatgatgcagatgctgatagtgatgcggacgcagatgctgacagtgacgtcgaaccacaagcacttttaggtgaagatttaccagcagctctaccagcagaagctccacaagagttggtatctgatgttatttaccagcctatttcttcaattgaacctctactttatcatgatgcaggcgtgaacccatggttatgggctgctattccactagttgcaggcggtattatcgctgcagcatcaaatcatgatagtgatgatgattcttcagcacctgttgataccactccaccaagtaccgatggcgtaactttctcggttgaccctgttacttctgataatgtgattaatgcatcagaagcatccggtaatgtcactattacaggtgttttgaaaaacattccagcagatgcggccaacacggccgttacagttgttattaatggggtaacttataatgcgactgtagataaagcagcaggtacatggacagtaagtgtaccgggcagtggcttagttgcggatgcagataagacgattgatgccaaagtaacgtttacagatgcagcaggtaacagcagcagtgttaacgatacacaaacttatacacttgataccactgcaccaaatacaccagtgattgacccagttaacgggacagacccgattacaggtacagcagaacctggttcaacagtgactgtgacttatccggacggtagtacgaaaactgttgttgcaggaccagatggtacttggactgtgccaaacccaggtttgaatgatggcgatgaagttacagctgtagcaacggaccctgctggcaatacatcaggaccaggaacagctattgttgatgcagttggtccaaatacggatggtgttaattttgctgttgattcggtaacagctgataatgtgattaatgcatcagaagcggctggcaatgtcacgattacaggtatattgaaaaacgttccttcagatgcggctgctacagccgttacaattgttattaatggggtaacttatactgcaactgtagacagtgcagcaggtacatggacagtaagtgtaccaggtagcggtttggttgctgatactgataaaacgattgatgctaaagtaaccttcactgatgcagcaggtaatagcagcacagttaacgatacacaaacttatacactggatacagctgctccttcagcgccagtaattgaccctgttaacgggacagacccgattacaggtactgcagaacctggttcaaccgtaacagtaacctatcctaatggtgacacagcaacagttgtagcaggacctgatggcagctggtcagtaccaaacccaggtttaaatgatggtgacgaagttgaggcaattgctacagatccagcaggcaacccatctttaccaggtacagctattgttgatgcagttggtccaaataccgatggcgttaacttcacggttgattcagtaacagctgacaatgtgattaatgcatcagaagcgtcaggcaacgttactgttacaggcgtattgaaaaatgttccggcagatgcagcaaatacagtggtcactgttgtgatcaatggccagacgtatactgcaactgtagatagcacagcgggcacatggacagtaagcgtaccaggtagtgacttgactgcggatgcagataagacaattgatgccaaagtaacgtttacagatgcagcaggtaatagcagcagtgttaacgatacacaaacttatacacttgataccactgcacctgatgcaccagtaattaacccggttaacgggacagatccaattacaggtactgcagagcctggttcaaccgtaacagtaacctatcctaatggtgacacagcaacagttgtagcaggacctgatggcagctggtcagtatgcaccggtgcttga

SEQ ID NO: 46173 - DNA, 1422 bp, Acinetobacter baumannii
atgtgggaattatttgtaattctactttcgcttgggctgttgatgtatacagcttacaagggcttttctgtcattctcatggcaccaatttgtgccttacttgcagttttactcattaacccagccaatgttttgccgttttattcgggtgtttttatgcccaaaatggtgaactttattaaagattactttcttgtgtttttgcttggcgcaattttcggtaaagtcgttgaaatgtcaggaattgctgagtctattgctcgaaccattgtaagatggattggggcaaaaaaagcaattttaacggttgtattactaggtgcaattttaacctatagcggtgtaagtttatttgttgctgtatttgcaatttatccctttgcaaaccagctttttagacaagcgaatattccaaaacgtttaattccaggaaccattgcgctgggtgcatttacatttactatggatgctttgcctggtacaccgcaaattcaaaatgtaattccaactacattctttggcaccaatatttatgccgcaccatttctaggaattattggtgctatttttgttctatgcatgggtttggcttacttagaatggcgtcgccgagctgctgcaaaagctggcgaaggtttctcgggttttggcgtagacaatacaccatctcaagaaattgaagccgatatgaacttgcaaaataatggaagtacggctcgtcagtttttagcgtttgtgcctctcattcttgttgccgtaatgaacaaatatttgtctaaagcaatcaaagagtggtatccaaatggttttgattttgccgcagttggattagcggattacaccgtagatgttgcaaaaaccggtgcgatctgggcagttggtcttgcgctgattgtcgggattattactgcaattttgtttgattatcagcgtgtagtgacgaacttcaaagaaggcattaatgccagtattggtggctcacttttagcagtgatgaataccgcatctgagtatggtttcggtgcaattattgcgtcattaccgggttttgccatgattagtcatgcaatgagcagtacttttacaaatccactagtaaatggggctgtgacgacaactgttctagcaggtattactggttcagcttctggtggtatgagtatcgctttaagtgcgatggctgaacaatataacgccgcgattttagctgcgggtattccaccagaagtcatgcaccgtgtggttgcaatggcatcaggcggtatggataccttaccgcacaatggtgctgttatcactttactcgctgttacaggtttaactcataaacaatcgtataaagatatttttgcagtcacagtaattaaaacattagcggtatttgtagtgattacggtctttaccgtaacaggtattgtttaa

SEQ ID NO: 46174 - DNA, 786 bp, Acinetobacter baumannii
atgacaaaacttttagacggtaaggtcgcttttattacaggttctgcaagtggtatcggtctagagattgctaagaaatttgctcaagaaggtgccaaagttgttatttctgatatgaatgctgaaaagtgtcaagaaacagcaaactcacttaaagagcgaggttttgatgcattatctgcaccatgtgatgtgactgatgaagataattataaacaagccattgagcttactcaaaagacctttggtacggttgatatcttaattaataatgctggtttccaacatgttgcatctattgaagaatttccaacggctgtttttcaaaagttagttcaagtcatgttaactggggcatttattggtattaaacatgtttttccaatcatgaaagctcagaaatatggtcgtattattaatatggcttcaattaatggcttgattggtttcgctggaaaggcaggttataacagcgctaaacatggtgtgatcggtctaacaaaagttgccgcattagaatgtgcacgtgatggtattacggtaaatgctttatgtccggggtatgtagatacaccattggttcgtgggcaaattgcagatttggctaaaacccgtaatgtaagtttagacagtgcacttgaggatgtaattttggcaatggttcctcaaaagcgtttgctatctgttgaagaaatcgctgattatgcaattttccttgcgagtgaaaaagcaggtggggtaacaggccaagctgtcgtgatggatggcggttatacggcccaataa

SEQ ID NO: 46175 - DNA, 1491 bp, Acinetobacter baumannii
atggtcggtaaagatcagctatttaaaattgatgatgggaacgttgaaaaagcgtctttttcagtttctttaagcgatcttaatttacaaggagctgggtctaacaataccgtattagaaggaggattaatttataaccatgaacaattaaccattcgaaattcacgtttgataaatggttatgcaacccgaggaggtgcaatttataatgcaggtaatttatccaacacaacaaatacagcaggtacagttagtcttgtcaataatttaatccaaaataataaagcggctcaaggtggaattttatatagtgaaatgccactttattttattactcaatcagttttacgtgataatgaagtcacaacagcagataatgctttattttatacacagactaagttttccgatgaaagtactggagggtatttaacttcacgggctatcggtataagtaatagtacaatttttcataataaaggcggttttattgcaaatgttcgggatgggatgtttgttaataacattactatgattaaaaatgataaaggactatttcttgatgcgcctcaaggtaatgcttcggtttcaaatagtatattagtaggaaatactattaactgtcaggtaagtacgactgataaagcaattatacaaagtaatttggttacagcagagtgtaatcgtaatgctacatcgaagctccctaatattctttatcctgctaatgaaaaattaattgccggtgatagcgatgaaggtgcatgtgatattacctctcaaaccgggttgttgtgtccttacaatacgccaaaagatagttttctaggtttctttaggccacgcttacttgaaagttatcaatctttatctgactctttgattattaataaaggccgtctttatagtgatggttcttcaattggtttagcaagttgtgaaagatatgatcaacgcggtaaaaatcgtagtggatatgatgaactttgtgatttaggtgcgattgaatatattttggatagccaaattgctcctgttggccaagatattaaatatggtcaagttgcaaaatttagtattctgagttctctaagtgaagcagatctggtcactcctacaacctgtaagcgtttattcggtgaacgtcctgatggtaaagaatggcaacctggatgccttaaagttacacaaagtactgatacaccaacttctaaaggtgttattactttagatcagaatggaaatgtagtttatacgccaaatggaaattggcatggtgcggacatttttaggattcaagttgttacgagtgtatctcgttttaatgatggcatagagtttcaatatgtcactatccctgcaactgtagtccaagaacctgtatctggtattgaagataaatctgtgagtacgggtggaggaggaagcgtcggtagtggattaattttaggattatttggattaattgcattacgccgtttcaagtcataa

SEQ ID NO: 46176 - DNA, 321 bp, Acinetobacter baumannii
atgctcgatgcattaaagcttgatggtttaaatcagtcagaacgagataggttgacttcaactgtggacataagaagtaagtcatctttatatgtggctatgctttttattattcttgtttttagtatgtatatacttaatttattaggcttactttcagctaagcatcttttagctctaatactttctgttggactcacctcaatttttagcttcttcttagcttggtctgacttaagagaaatctctttgcttgaaaaaacattaaaagatcgcaaagaatcaagagaggcaaaagcaaaagtattgagcaataagtaa

SEQ ID NO: 46177 - DNA, 204 bp, Acinetobacter baumannii
atgaaaactgaaatcatagaagctctagcgttagagcttactaaggcaaccattgctgatactgatccttcaaccatcaatataaaaagtgctgatctttgggttaaaacctaccaggaatcactgaaagcggtagaagaagctttaaaagaacttaagccaaagcctaaagccacatcaaaacccatttcaggaatgagctaa

SEQ ID NO: 46178 - DNA, 243 bp, Acinetobacter baumannii
atgagtctaggcgaagaaatgtttgaatggcgcaagcagatggttgagaaactactgcttcaggaaagtaatattgatcaactagaagaaaaagttgatcgtgctgaaaagattctttttggtgattgcacagccgctttcaaaatagagtgcacgcttcggaacgcgtatgcgctgaaagctattcttgatgactttgccaccaagaataactgcaaggtaagtatagtagagtgtgagtaa

SEQ ID NO: 46179 - DNA, 444 bp, Acinetobacter baumannii
atgaacgtaaaagctacccctttcaactcatttgcatttgtcagcatggctgctcttgcaatctctggtggttctttagttgcttgccaattgcaaccagctttccaaacaaaagacgcacctactctttttacacctaaaactcaaccaagtacttacagcgtgttaaccgcaaaaatcacaggtaagcattctggagttgctgtaattaaattagatagcttccgtttaaacgttagctttgattttgaagctcatccagacagctacggcgttccgggttctgaattcaccactgttgatattacccaactcacagtaaatgaaatcactgacattaatggtaagtcatataacgatttcaccgaatttgaagacatccgcaacatcaatagccttctaaaaggcttcatcgaacgtaacaagttggtggaggcagcctaa

SEQ ID NO: 46180 - DNA, 291 bp, Acinetobacter baumannii
atgaaagattacaactgccctacttgcaagaagatgattcctgttgaccgttcaaaaatcaaagctggtgatgaggtttcattttgcagagtaacccaatcttctaaatctgctcgtttttcttcaaaagaaggaattgtcgattgccgtgaaggtgatgtggttttagttaaatatcgcaaagaaattattcctttaaatattaaggacgtctcacctgtagatgctcctagcccgcttacgtatgcctttgttggtgcatgcgaatgtaaggaggctgaacatgtctaa

SEQ ID NO: 46181 - DNA, 588 bp, Acinetobacter baumannii
atgataattgagatagaaacccatccactgcaaccgtttttgccagaaaatgcccgtttattaatgttaggaagttttccaccgccacgtaataaatggaagatggacttttactatccgaactttcaaaacgatatgtggagaatttttggtttaatcttttttcaagataaaacttattttttaagtgagaaccaaaaaagctttaacgaagaagctatccgcaactttctgattgagacaggcattgctatttttgatacggcgtatcaaattaaacgcctaaagggcaatgcttcagataagtttcttgaaattgtcactccgacagacttagcggttttattgaaacagattcctcaatgtcacactattatgactacgggcgataaagccacagataccttaatctcagttttacctgagaacacggaaaaacccttaattgggacatctacatcaacttattttgcagaccgcgatattaatttatatcgattaccgtcatcttctagagcatatccattagctctcgagaaaaaagcagaagcctatcagaaattctttaaggaaatcggtttcttgtaa

SEQ ID NO: 46182 - DNA, 429 bp, Acinetobacter baumannii
atgactgctcaaatgaaaacaaatgcatcagcaaaaaaagctgtcaattcacctagccatatttacgatacctttattgtcggtgccggaatttccggtatcgccgcagcgattcgtctcgaccaagttggctataccaactataaaattattgaaaaagcaggacgtgtgggtggcacttggcgtgaaaacacctatccgggctgtggctgtgatgtaccgtcagctttgtattcttattcgtttgcgcctagtgcaaaatggagtcacttatttgcgcgtcaaccggaaatcttaagctatttagaagatgtaagtaacgagtttaatattacgtctaaaattgagtttaacaacgaactactcaatgctgcttgggatgaatcacaccatttgtgggtacttgatacggcactgttgcaaagttag

SEQ ID NO: 46183 - DNA, 834 bp, Acinetobacter baumannii
atgattttatttggcaaaaagaaggttaaaccaagccaaaaagcttatgccgtcgtgacgggtgcaggcagtggaattggacgaagttttgcaattgaactggcgaaacgtggtggtagcgtagtctgcgcagatattaatttagaagctgcagaagaaactgtaacgttgcttgaacaacagggtgcaaaagcttttgctatgcgctgtgatgtgggtgacgctgaacaagttaaccacctagctgaaactgctgaaatcttatttgggcatcctgtgactcttgtcattaataatgctggagtaggtttaggcggtaaatttgacgaactcagcctagaagactggaactgggtcatgaatattaacctttggggagttattcatggctgtcatgcatttgttcccaagtttaaaaagttaggttacggcgcgattattaatgtggcatctgcggcatcttacacggctgccccagaaatgactgcttataacgtgactaaagcgggtgtgcgtgcgctttcagaaacgctttcggctgagcttcgtaaattcaacattaaagtcaatgtgctctgcccgaccttggtgcctaccaatatcattaaaaatggtcgtattccgggccgttattcaaaacttgcagaccatgcgctcatgaactacgcactcaccacaagtgatgatgtagccaaactcacacttaaccgccttgatcaggatgagctttataccatccctcaaatcgatgcgaagttgttctggctgatgaaacgtgcatcaccaagtttgtataccaagttccttggtacctcttacaaattatttaaataa

SEQ ID NO: 46184 - DNA, 792 bp, Acinetobacter baumannii
ttgttttttgcaacgctttcggtttttttgacctatggtgaagatctggtgatagaaacagctcgtcaccaccgtgaatttattcaagatccgattttaaaacagcgtgttacatcgctgattggtcaagaagccatccattcaaaattgcataatgagttcaatgatgcaattaaagagctggaatatccggtcgatttttatcgtttcttgggtgagaacttctttaaatatgtgttcttaaaattcccgcagccattaaagctttcactcatggcgggtattgaacattttacggcggtacttgccgaatacatgatgaagcatgaaaagaatttctattataccgacgatgccaaaagccgtgctttatggatgtggcatatgcttgaagaatccgagcataaagatattgcctatgatgtatatcaattactcaatggtagctacccactacgagcttctggcttcttcttagcattcttcactattttaggtctaatccctgcgactaccttgtttattccggttttaagaaaaccgcaggaaatgttgactagaaaattctggaaagacgcgcgccgtggtgtaggacttatttttggtccaaaagatggtgtattcggtagcaccattggccagattttcgattatttacgtcctgacttccacccaaatgatcatgacaccactgaatatctagagtactacaaagacaaattactcaaagaaggcggcgcgattgcaccttactttgtgaaggaatttaccccacctgtacgcttgtcttaa

SEQ ID NO: 46185 - DNA, 1107 bp, Acinetobacter baumannii
atgaagaaattgcttctcgctgccgcagttgcaactttgagcgtaaacgcggtgcaagcagcgccaactttgtacggcaaactaaacgtttccattaaccaagttgacaacaaaaatttcgatggtaaaagtgacgttaccgaagttaactcaaactcttctcgtattggggtaaaaggtgaagagaagttgactgataagctatctgctgtttatttagctgaatgggcaatttctactgatggttctggttcagatactgaccttagcgcccgtaaccgttttatcggtttaaaaactgaaggcgtcggtacgttaaaagtaggtaaatatgattcttacttcaaaacctctgctggtagtaaccaagacatctttaacgatgacacacgtttagatattacaaatattatgtacggtgaaaaccgcttagataacgtggttggttttgaattagaccctaaattattagctggtttaacattcaatatcatggctcaaactggtgaaagcacttctgatagcaaaaaaggcgaaactggtaaagacagcaaaaatgatagcttcgattcagtttcgacttctctaggttatgaaaataaagacttaggtttagcaatcgctgctgctggtgacttcggtatcaaaggtaaatatgctgcttacggtttgaaagatgtttatacagacgcttaccgtgtaactggttcttatgacattgctaaatctggttttgtagtaggtgctttatggcaacatgctgaacctactgatgacttgactgcatatggtcaaacatataaatcagatggttcaatcgataaagctggtaaagcttaccgtggtttagaagaagaagcatacgcggtaactgctgcttataaaattcctaacactaaacttaaagtaaaagcagaatatgcttctgctgaaacacaagtaagtggtcaggcagatcgtaaaattgacttgtatggtttaggtcttgattatcaaatcaataaacaagctcgcttctacggtatcgttgctcaacaaaaacgtgactggttgaatgacgacgacaaacaaactgttgtaggtactggtattgaatataacttctaa

SEQ ID NO: 46186 - DNA, 900 bp, Acinetobacter baumannii
atgaacattgaaatttgtactcctaattcagctacaacaaaagataaaggcgacttgcttgaaaaattaagtaaaaatatgctggaagctcaaaattatcatgttgatgaagaagtacgtaaaacaggaagtgaattagatttactatgtaagcataatgtctctaagaaaaaaatttatgttgaatgtaaagcctatcgggataaaaagattgatgcgacgataataagacagttacttggtactgttgtatttgaggactatgacgaaggatggctaattgggacttctgattttagtaaggatgcaaaagggctttgtgaagagttaccaaatcgacctcatggaaatcgagtaattatctacactcctaaagatattgttcagtcattacaatcttctagaatcattagcaatattccaaaagaacatttagaaagttatattgatctgaataaggttggagaatggtatttattaataacaagttttggaattttttgggctgttactatcttaaatgcaggtataccaacaaatgttatctgttatcatgctaagactggaactttagtcgaagatcaggcacttttagataatattgcctcaactgactgtagtctatctaaactagacttttccaaacttataaatacaaagaaagatattaaaagttctcttgattcccaaatagaagtagtagaagtgcaaagaggtgaggattggaatgactatcgacctgcacgacctcaagactttgttgggagaacgaaagatataaaagaaatatttgatttttttaaaaaaataagagaaaaagaaatcggtacacgaattttcgcaattactgcatgcgactccctatctgaaaaaggatttaattttctaacaatccgataa

SEQ ID NO: 46187 - DNA, 555 bp, Acinetobacter baumannii
atgccaactttagaaataccttccaaaaaattacaggtggtccaaaccgcaatccaactctttaccacgcatgggttccataatgcaggggtagacctcattatcaaagaagccaaaataccgaaagccacgttttacaactacttccactccaaagaacgcctaattgaaatgtgcatcgcctttcaaaaaagcctactcaaagaagaagtgctctcgattatttactcaagccgttactacacccaaaaagataaacttaaagaaattattgtcttacataccaatttaaacagtctgtaccatttgctgcttaaagcggtttttgaaataaaacggctgtatccgcaagcctaccgtatggcagttgaataccgaaaatggctacatcgggagctttttgacctgatttttagctgtgagacccgtgcttttaaatttgatgcagacatggttttaaaccttatagatggcctgatgctacaggttttaagctctaaaaatttggatgaacgagatgtggttttggagaagttttgggggcaggtgttataa

SEQ ID NO: 46188 - DNA, 372 bp, Acinetobacter baumannii
ttgttatacaatgataaaaatattgtggcttttagaattcgggaaaatagtaatatagattatgtgaaagaaccatataaaaattttactgcaaatgcatatttttataatttgataaataataaatttattgaagtaccagttttgaattcagatagtgaggataaaagtaagtcgaccgatatcttacaaggagatcagttaacatatgattcaaaaaaaggacaatatatttatctagcaaatataaaatcttataaaacaggaaaaactcaatctataaaaactatttttaatagtaatttaaagtgtatttcatctactttaggatgtgagacaataggggttcttcctgctacaaaagctaattag

SEQ ID NO: 46189 - DNA, 1344 bp, Acinetobacter baumannii
atgccgagcttaacaccgttacatgaaacttattgtaaatgggatcgtacgccacctagtcaggccgacgtactagaaggtttagctcaactgttcagtaccagcttaaatggtgtacatgaattaatacaagtcattaatattgaagtattaaaaaatgcttttggtattagtgcccaaaatgctaaaaatttccaaaaacggccctctgtccaaaaggcatatcagttttcttatggtgccttacaaaaatatggtagttgttttttagcaccagggttacgtcgtattattgaaaaatttccaacccttcatgagaagccattaacaccaacccttcattttttagtaggagtgttaaatggtattttcggagactatctacttaaacagcacagtcccctcgccttgccaatggttctatacgaccactacggtgcaatccaacaaggcgaacttgcaggccgtattgtaattttggttcatggtttgtgcatgaaccatcttacttggtcaaatgcgcattatggcgggattggtgagcgtctgttagcacagcgtgatcacaacacgatgctgtatttaaattacaatacaggccgccgtatttcagccaatggccgcagtttctcaaatttattagaagatttagtacagcgtaatccaagaattaccagcattgatttaattggtcatagtatgggtggactagtttcccgtagcgcactgttttacggtaaacaaaatatgtaccaatggattcatatggtcgaaaacctcgtctgtattggatctccccaccacggtgcagtacttgagcgttttggatttgcgttacaagatcggctaggcgcttttccatttgttggcctaattggtcagttggttaatatccgtagtaatgggattttagacctacgccatggtagtgttcgagatgatgactgggaatacatggatgcccgtattggtatgatggatgacaaccgtgctccggctcctctaccttcccatatcaatacctttttagtggcaggaacactcgagtttgaaaaggtgcgtaataaagcgcttaccgtgattggcgattacttagtgagtgtaaaaagcgcactaggtgaacatcctaatccacgttttcagcttaaagttccagattcacataaagcggtgttttatggcttaaatcactttgaaattcagtatcactcaagtgttgccgaacagattactcgctggttatatcctcatgtgaatgattatgtacaagacggtattcaaacccatattattgatatgccgaactatacgctcgaagatttagaaggaattgtagagacgtaa

SEQ ID NO: 46190 - DNA, 1302 bp, Acinetobacter baumannii
atgcaacagcttcgtaccggagatattattgccttaggttttatgacctttgccctctttattggggctggcaatattatctttcctcccattgtcgctcaacaagctggtgatcatgtatggctagctgccataggttttttgattactgccgttggtttacctgtaattaccattatggccctctctcgtatgcagggttccattgaaattattagttcaccgctaggtcgtatcgcaagtctgatcttaactgtagtttgttatctatcagttggccctttatttgctacaccacgcaccgcaactgtttcttatgaaattggtttctcatcttattttggaacgtctagcagtagccttttaatttatagtgcaatttacttcgcatttgtaactgtcgtttctttatatccgaacaagcttttagacacagttggacatgttctagctcctctgaaaattatcgctttagcaattttaggtattgcagcggttatgattcctgcgggttatgttcctgctccaattaatcattacgttaactctcctgtttcagaaggtttcgtaaatggttatctcaccatggatactttaggtgccttagtatttggtatcgtcattattcaagcgatctattcgcgtggtgttactgacaacaagctagtaaccaagtatgcaattattgccagccttatttctggtgtaggacttactttagtttacttaagcttatttaaattaggtttgggtagtcatgaagtcgctcctaatgcagcaaatggtgctgtaatcctacatgcatatgttcaacatgcttttgggaatatgggttcactcttcttaacaggtctcattttcttagcatgtatggttactgcaattggtttaacttgtgcatgtgctgaatatttcgctcaacttactaagttgccatataagcttttagttttcatcttggttggtttctctttcattatttccaaccttggattgactaagctaattgccgtatcagtaccagttttaagtgcaatttatccacctgcaattgtagttattatgctcagtttcttctggaaattttggcacaaaccatcttttattgtcggttcagtaacaagcattgctttaattttcggaattattgacgggcttaaagttgcaggctttggtgactacctccctaattttcttcaacacttaccgttaaatgaacaaaacttggcatggttgatcccatctttagttgttcttgtagtgactactcttatcgacaaagttaaacataaaagcatttaa

SEQ ID NO: 46191 - DNA, 291 bp, Acinetobacter baumannii
atgaaacgtctagatggcgcttctcctctcaccacacatctttgcttagaaaaagctaaatgctcatcaatgagtggtcgtccttcaaaattttacgaagagcttcttcaaaatggtcgtcttggtttcttgagtatgccaagtgctaaaggtatgctagaaggcggaaaagcgattatttatgaaggccagattttaggtgcgattggtgtttcaggtgttcaatcttttgaagatgctgaaattgctcaacacgctattgatgtttttttaaaaaaacaaagtagctaa

SEQ ID NO: 46192 - DNA, 504 bp, Acinetobacter baumannii
atggctaaacgctacttgccgttttacaacaacgctaaatttattgcattagtgttagtagctctatttgtcattttttcagttacttttaaatttcttgcccttgatgtaaatatcaacttggttcaattttcctttgttttgttattaccgttaagtcaaatttatctagcctacaaaggtatgctcgatgcattgaagcttgatggtttaaatcaatcagagcgggatcgcctcacgtctactgtggatataaggagcaaatcatcactatatgttgccattttatttatagtgattgtttttggaatgtatgttttcaatgcattgaatttactatcaaatcagcatcttttagcattagtcttatctgtaggcttaacctcaatattaagtttctttttggcatggagtgatttaaaagaaatatctatgcttgagaaaacccttaaggctcgtaaagaggcgagagaggccagaagcaaagtaatgagcaataaataa

SEQ ID NO: 46193 - DNA, 1008 bp, Acinetobacter baumannii
atgagtaaaacagtagtaaaagacaaaacagtacactacaaaaaagtagattttctaaaaggcgccaatctaggtcaattactaaaagcacaattgctggataaggattctttttactataaagccataaatcgtcaacaatttgtctccgcaacaaaagatgattttattctaattaatcatgctagttcacaccaaagcatgttctttggcgagttgattattgttgagtcaggcaaagctcaggctgtattaaagatagacagtgatgatgctactgaatttcccattaaaacctatttaacagatgatctgccagatgatgaagatggcgttgacgctacagaggttgtaagaaaagagtttattgatagtgttctttactttggtgttattgataaccatgtcgcaatcattcaatcaagatcacttaccgctagaaccttggagtcatatttgggctggcttttgggtgaagcagccaaagcattgccagagaatagtgcattaatattaaaagatgctccaaatcccactgttaagcaaaagcttgaatcaactccagctaaaactatttcaatctcatctggcattgggtcaacagaacttcaacctgttcatactgtcgaatcaagcatacctgcgaaaattgactataaaattgaagataatgtggttgatgtgcttaagtcagcttttggagttgatttagaaaatttaaaactagaggatgggcttgatgacgcaaacctaaagttaaaattaacacttacatacaaccgcaaaacctcaaaaagtgggcaaaaagttattgatactgtagcttcatccatgcgacataatgatgattatgttattactcttgaggatgggaccaaggttacggctgataatctaaaaatgagcggcaagatttcagttgaaacaatcaataataaagtttataacgacggcctaaaagttcaattgtataattggatgactaccaatataaattttggtgactaa

SEQ ID NO: 46194 - DNA, 1203 bp, Acinetobacter baumannii
atgcttgaattcttttctcgattaagcttagtcactaaaattattatcgccattattttagggataggcgtcgcactattatttccaaccgttacgccgtacttaagcttgtttggtgaactatttattaaagcattaaaatcggttgctcctattttagtctttgtactggttctctcatctattgccaacttccaagtcggtcatagtgcaaatttacgcccagtattactactctatgtagtaggtatgttattagctgcttttagtgctgtgatcgctagcttatcttttcctagtacgctttatctcaacactgtttctcataataatttgcaagcgcctggtagtctcgctgatatattaaaaaatctgcttttaagttttattgcaaaccctgttcaagcaatcagtgaagcgaactttattggtattcttgcgtgggcaattggtctcggcttagcaatgcgtcatagctcggatacaaccaaacaagtaatgcaggatgtttcacatgctgtaagcgctattattcataaagttattgcgtttgcacctgttggtattttcggtctagttgcagtaacttttgcagatgctggactagcaacacttgaaagttatgcacaattacttgctgttctattaggaacaatgctgtttgttgctctagtgattaacccaattctagtaggtttaacaattcgcggtaatccctacccattagtatttaaatgcttaaaagaaagtggtatcacagcgttctttacacgcagctcagcagctaatattcctgtaaaccttgatttagctgaacgtttaggcgtaaatccttcaactgcgagcgtttcaattcctttaggtgctactgttaacatggctggtgcagcagttacgattactgtacttactttagcaactgtgcatacgttaggaattcatgttgatttggcaacaatgattattttatctattgtagctacaatatcagcatgtggtgcatctggtgttgcaggtggttccctacttctaattccagtcgcatgtagcttatttggtatttcatcagaaattgcaatgcaagttgttgcagtaggtatgattattagtgtattacaagattcaacagaaacggcgcttaactcatctaccgatgttttatttacagccgcagttgatattcgctcaagacaaaactcatag

SEQ ID NO: 46195 - DNA, 495 bp, Acinetobacter baumannii
atgaatatgccagtacaacaacacattttacaagcggtcgattggtctagatttagttttgaagagtggtgtcgccagcttggagcttggctaaacggcgataccgaaacaatggtcaaaattgttaagacgatgccaacaaaacgcatcactcaaaaacaaagagaaaaattaatagctatgtatatgagcgatgaaaatctaaaagatcgtttatgcattcgccgtaagggtacttgctgtgagttaaatgacaatgaggcacgtgcaatccatagattgattattgatattaaattaattgaagaccatattttacaagaatggatctcagcaatttggtcacatcatgttatgggcaattcattacgtgatattgctcaaagtaatgacacttcagttaatcaaatcagacaggatttaaaatgtggtatggcttatatcaaaagtcgaaatccgcatttcagatttgaaacttttgaaaaaaccgcttga

SEQ ID NO: 46196 - DNA, 651 bp, Acinetobacter baumannii
atgagaatcatattttctttaattacgtttgtcttattttcatttatttcctttatccttttaaggaataaatatattgagccaaaccacttcgtcattttgataatattttctgcaattgtatccgcaataattgcatattttgatgaggttcaagagctatctattggaggcaatatcgttaaactaaaagaagcaaaaaaggagttacaagtaacaatagatcaattaaagtcaattaaagtttcaacatatcggatgttacttttgaaaagtttacatttttcaggtgtttttggaagcagccatttagtggatagtagagcagaatattttttttcactcatcaatgaaattaaacaatcggattgtttcaatgatcttaagtctgaaataaaagttcaattaacaaggttgttaattgatcaattaaataaattttatcctttattttatggcaaacaattcaatgatagcgatgaattccctaaatctacggttttttatatcgagttgaaagatgagattattgataaagttcatcaaaaacggacacctgttataccatttgatcaaaaaaagcaggaaattgttacagctatagataactatgcagctttgtatattttatttaaagaagttgaacagtag

SEQ ID NO: 46197 - DNA, 222 bp, Acinetobacter baumannii
atgcttaatagtgtccctaatagtccgccatcaattgcatcaaaaagagcaaatacagctaatgtattatcttttttcacagtttggacaatagggcctccttcgaaaactgtagtagagggagttatttctttgctagaagaaacttctattttttttgatgattctgaagtaggttctgcagtttttattagagcagcttgttgtttttcaaaactatga

SEQ ID NO: 46198 - DNA, 411 bp, Acinetobacter baumannii
atggaactacaaggcatttgccataaaatgcatgcaggcctaaaagatgctagtgtaactgatcaacagacaaccaaggcaaatgttgaatacaaatttgtattagaccgttcagaaattgatcttccttttaatttaggacaagaactagaaatcgaatggacaggtaatatttattgcacttcttgtggtgctaaaacaccaaagtcttattcgcaaggccactgctttaaatgctttaaaacgaaagcggaatgtgacctttgcattatgaaacctgaaacatgccactaccatttgggtacatgtcgtgaagatgattttgcccacagcgtatgtttccagcctcatattgtgtatttggcaaattcaagtgctttcaccagtttgagccatgatattgaatgttaa

SEQ ID NO: 46199 - DNA, 750 bp, Acinetobacter baumannii
atggcgggtcattctaaatgggccaatattaagcatcgtaaagcgaaacaagatgccagtcgcggtaaagtttttactaaatatattcgtgaaattgtcactgctgcaaaacttggtggtgcagatcctgccagtaaccctcgccttcgtgccgttgtcgaaaaagcgctttctgtcaacatgacacgagataccattaaccgtgcaattcaacgcggtgtgggtggtgaagataatgatgatttaaaagaagtaacctacgaaggttatggtgtaggtggtgttgctgttcttgttgaaacaatgacagacaacctgaaccgtacagttccagatgttcgccattgtttcagcaaaactaatggtaacttaggtaccgcaggttctgttgcttacctatttaccaaacgtggtgagattacttttgacgatgtttctttagaagataagatcatggacgttgctttagaagctggtgcagaagatattgaagtttcagaagatgaaattttagtaatcacttctccagagacttttggtgaggttcaagatgctcttgcagctgctggtttaaaatcagacaatgctgaagtagtgatgagcccttctactaaagcagaaatcactgatattgatcaagctaaacaagtaatgaaactcattgatatgcttgaagatctagacgatgtacaaaacgtttatacaaacgttgagtttagtgatgaagttttagcgcaacttgatgcctaa

SEQ ID NO: 46200 - DNA, 546 bp, Acinetobacter baumannii
atgaaaaagtttttaggcaattctatcttcaaagcagttggttggacctatgatgcagatcctaccattcttgagaaaaaacaagttattatcggttttgaacatacttctaaccttgatgcgatcttatcaatcgctttgtttcaaatattagatttaaaaattcatacactaataaaaaaagaacttttcaaaggtccaatgaagcctattcttgaaaagctaggtggcattcccgtagaccgaaaagcaagcaaagatatcgtctctcaaatggttgaaaaattccaaagtagcgatacattcaatctagtgattgcacctgaagcaacgcgtgccaaagatggatcggaacgcaaacctattcgaaccggtttttggcatattgctaaggcagcaaatgttccaattgtactgatgtatgcaaatgcaagaaccaaaaaaggcggtattttaggtaagatttatcctacggatttacagaaagatcttgaaacgattaaagaactttatgcgcaatatgatattgatgtgaaaattaactag

SEQ ID NO: 46201 - DNA, 453 bp, Acinetobacter baumannii
atgtactatgtcggtaacgtaaatccacatgctaaaaaattagttgaaactacttatgaagcaatggtcgctggtatacatgcagttaaaccaggggcgactttaggggatattggttacgctattcaatcggtcgctcatcgcgaaggatatagcattgttcgtgaatattgcgggcatggtattggtaaagtttatcatgaacaacctaatattctgcattatggacaacgcggccaaggtcttgttttgaaaaaagggatggtctttacaattgaacctatggttaatgcaggcaaacctcaggtaaaagagctaaatgacggctggaccgtaattacccaagatcattcgttatctgctcaatgggaacatatggttgctgttacagatacaggatttgaattattaacgccgtggcccgaaggtgtgggaaattatccagaaatttaa

SEQ ID NO: 46202 - DNA, 690 bp, Acinetobacter baumannii
ttggactcgattaaacaatatgatgatgggcacgtatttacagcgtgggttgcattaatcggcacagtaatggctgcgacatgcctgctttgttttcttgcagttactggctttgatttgcaccaaatatttaaacctgaatttgcattaactttgtcggcaaaagaccaagcacttttcagaacctcaatgatttctgattgttttgggttttatcttccttttctggctgtaggtgtatatctgtggagaaagctacgtccttcaggtggattattgtcggatatagctattttattcctcgtgatttcaacaatgttaggtataacaggggctgctttacaagcctccgtgttaggaccacttgctgaaacatatatgtctggaaatgaaatagctaagcaggcggcgggcactgtttgggccaccatttcgcaaggctctcaaaatggtttatggccaatggaaggaccgacaataggtttttgggcaatagtcaacggactacttttgagaaaaaacaaatccgtattaggtttcccactggttctggttggcttgggatatgttggatttgctgtgcttcttttctcaggcttttctcaagcggctttattccttgaactgttcttattaccagtgcaagtagtttggttaggtattttcggtttgagtttattacaaagatag

SEQ ID NO: 46203 - DNA, 678 bp, Acinetobacter baumannii
atgatctctccacgattggttaactcaacctcactgtcttttaaaaagtcagtgtttggaagtaaaccaatctgtacaaagatccctgcaagctctaccacatgctctccatcagttgcacggtctttatatttaagaccggttacttgtgaaccgtcacctaatacttctgtgcttaatgcattcataatcacggtggtgtttggcaagctatttaacttgttttgcaagacttggtcagcacgaagtttagtgtcgaactcaaccagagttacatgctcaacaatacctgcaaggtcaatcgccgcttcaacacctgagttaccaccaccaatcacagcaacacgtttgcctttgaacaatggaccatcacagtgtggacagtacgctacaccacgggtacggtattcagcttcacctggtacattcatttctctccaacgtgcccctgttgaaaggatcacagttttcgattcaagttttgcaccgttttcaagttcaacttcaaccaagccatttgctgtttggtctgcaccagtgattttgctgacacgttgcaggttcataatatccacatcgtattcacgaacatgtgcttccatttcagcagcaaacttaggaccttgtgttttttgcacagaagtgaagttttcaatgtccatggtatccatgacctga

SEQ ID NO: 46204 - DNA, 795 bp, Acinetobacter baumannii
atggcaattgccaatattgaagcagaacttggttaccacttatttgaacgtacacaccgcaaagttattcctaccgcggcggctttagcattggaacctcaagcccgtattattgctgaacagcttaggctattagctacgcatgcttatgaactttcacttggtcttgaaagtaaattaaaaataggtgtggtttcagatgcgaatactgaattactttttaaagccataaagcaactagcagagaagtttccccttcttaacctagaaattattacagctcctcaagatgatattctaaatttactttatacagaaaatattagcctttgccttgcaggttcaaatctcaatataaaaatgcgtgaaagcctacaattagtaatgacagaaacagttattgctacgatctctgctcatcatccgtttttaaaagaacagaataagttaaacacgattgaagagttaattaatattcggcaaattgtggtcgcaagtagtgagctggatatggaagactcacgttcaatcattggagcaatgtactggaaaacgaatagcttacaaacagcaattaatatggtcgaagctggcttaggatggggaaattttcccttatctttggtaaaagaaaagattgaacaaggccacttagttcaattagattttaaaaatacgaaaaatcatttgcctttatctatttatctcatttggcttcaagataaaccgttatcgaaagcagccagagagcttgtccagattgttcaagcaaacttatctcaaacttgtcattaa

SEQ ID NO: 46205 - DNA, 210 bp, Acinetobacter baumannii
atggaagtaagaattaagtctgtaaatggccccagccctttaccagcaaatttacaaatggatgttgtttataaagctgttcgcatagatgccaatcgaatgaaagtaacttgtgatgatggtcaagtgattacaacaagcatttcaaaatctggttatttgggcgattggggtgaatgggaaattttaagtgaggattctcaacaatga

SEQ ID NO: 46206 - DNA, 705 bp, Acinetobacter baumannii
atgcttcagcatggccaagtccactcaagttttgataatgcttttgctcattgctgcgcgattattaaagtcagtggtggtgagtttgctgaagatatgctcaaacttctgaacaagccaactgatgaagttgaagaagaaaagcctttagaaaatgaagttgagaaatcacctcaggttaatactgaaaaaacagtaattgaagagcctactaaagatttaaaagaggatctcgatagtgcaattgttgttactgaggggccttatgtttcatcatccgaggatctattagttccagaaactaacgagcctaaagtagatccagaatatcagcaaaccctagatactcttctacagcgtgtaaaagagtcaaaaacacctgcagaagtaaatgcggtttatcgttatacccgcaaatgggatgacgaacaaatgaagcctatccttctcgccactcacaaacgtcttgaagagctagaaaaagaacaggcatctgcgaatgagccaccctctttaatggttcagatccagactgcaccagaccttacaacgctagatgctttggaaatagacgtggctgcacgagacccgcagattcaaccgaagctaatggggtatgtgagaaaacgccgctatgaattagagaatcctacacctacccaacctgaagctgatcctgattatctattagtggacggttactag

SEQ ID NO: 46207 - DNA, 522 bp, Acinetobacter baumannii
atgaaaaaatcaactttaggctggggtgccgcaggattagtagctttagggatttttggttcaggcaatgataactctccaaaacaaacttcagactcagaaaatgcgcagagtgcagtagaggaagttatcgaatcaaaatatatcaacactaattctttaaatattagagataaaccaaacggtcaagtagtaggaaagttaggacgtggggaaaaagttgatatttatgagatgaaaggaaactgggcacgtatttccttaaattcctcatcacctcagtggttatcaacaaagctattatgtgaaacggatggctgttttaaacaaaagtctcgatcaaccacgtcaaataattatcaggccttaaaatctcatcctcatcattctgaaagaaaacagaaaaaaacctactacgatagtgattgttcatgtgctgtggtggattattgcgtgggtcctagaggtgggcactactgtattacgagtggaggaaacaagagatataaacctagatattaa

SEQ ID NO: 46208 - DNA, 219 bp, Acinetobacter baumannii
atgtcatgtatgctgactttagaagaaatcgaaattaaacggcaagaactggaacggcatcttgaagatgttatgtctgttgagttgagcaaatggcaatctgaaaacaagctatgtgtttctgatgtgaatatacgcttggctaatgttgattgtctcggagggcctaaacataacgttgttactggagtaagtgtcgatttagataatgagctttga

SEQ ID NO: 46209 - DNA, 1245 bp, Acinetobacter baumannii
atgaaggactttctcaccaagaaaatgtacgcaactagagctttattttttgctgtaggtgttatggctttgaatgtttcccctattgctatttctactactcatgcagcgacagaacaaaaaatggatatatcgactacactttcattaatttttgcagataaacccatagaagcttctttatttagccctcaatttttagaacaagttcccatcacacaaattcaaaaaatcgttgatgatttaaaagtctctttaggtgctcttaaaaatcttaatgtttcaaatggctctgggactattgatttcgaaaagggagaattacccgtttcaattagcttaaatgagcaaggacaaattagtactctttggtttagcgcgcctcattttaagacaataagcctagacgaaatggttaaaggtctacatgaaaatgcaatcggtaaaacatctcttttagttattgtagataacaagcctgtggttgtagaaaacgataaaacccctatggctgtcggttcgacttttaagttactggttttaaaagcttatgaagatgcgataaaaaaaggcgaattaaaaagagaaactattgtttctttaaaagaaaagaatcgctcattgccaactggagttttacaaaacttgcctgctggtacgcctgtaaatctcgaacttcttgcgcagttaatgatacaaattagcgataatacagcgaccgatagcttgatagaggtattaaagaaacctcgtatagaaacgttgtcacctagaaattctcctctgctgacgacacgagagctatttcaactgattgacccaagtaatgaaaagctcagaaataagtttaaaacaggaacaaagtcggctcgtctagaagcactcgctgaactagacaaactgccgctaccaagtgtgagtagcattggaaaattggctacttggcaagatgctgaatggtatatgtcagcccatgagatttgtcctcttcttgaaagtgttcaagatgctccggctctgaacagttctttaaatccactttttaaaaatttaaattggcaaaagatcggtttcaaaggaggttctgaatacggcgtgattaacttttccgtgattggaaaaactcaaaaaggccataaagtttgtgctgtatttaccgcaaatggaaatgagccacagcctgagtcaaaactagccatattatttacaggcatacttcaagctgttgattttatgaatcattaa

SEQ ID NO: 46210 - DNA, 1122 bp, Acinetobacter baumannii
atggctctaccgattattactgctgaccaaactttattggttcaagcaattattgtgtacctatacgctgatccgggtttaggtaaatcatcgatgggctttactgcggaaaaagcaatttcttttgactttgaccgtggtgctcaccgtactggtgaattacgtcgaggtgcggttgtacaggttcaacaatggagtgatgttgcaaaccttacgccgcaggacttagcaccctataaaaccgtagtcattgataccgtgggtgcaatgcttgaatgcattaaaacccatctattgctaactgctaataaccgtcaaaaagatggctctttaaagttaaaggctcaaggattagcgaaccaaacttttaagcaatacatcaatactttgatcagtttaggtaaagacgttgttttcattgcacacgcttcagaagatcaaaacggtgatcaaattatttaccgaccagatctaggtggtaaaaaccgtaacgagctttaccgtattgcagatgtcatgggttatctaacaactgttactacaggtgaaggtaaaaatgcccgcgttattaattttaaaccctcgcctacacatcatgcgaaaaactcaggtgctttaggtggtgaaactggtgaagtatgggtaccagatcttaaagcacatcctactttcttggctgacctgattactcaagctaaagatcacattaacaccttaacgcctgcacaacttgcagcagctaaagcccaagaagagctagaaaactggaaacaaagctgtgaagaagctgagcatgcaggtgaccttaatcaattaactgagtcgcttgataaagaacacatgtattaccagaacatgcgccaagcaatgttaatgagagctaaagcattgaattgcacgtttgataaacaacgtggcacttggattagtccaccagaatttaacggtatctcagatcaacaaagagatgaacttcaaaactttattgctgaacgtggcctcgatgtaaaaacagtttgtgagcacttcggcatagatgccctgatccaaattgaagcggcaaaactaactgcagttaaacaagaaattgaaaccttagctaaaacggggatgacagcatga

SEQ ID NO: 46211 - DNA, 753 bp, Acinetobacter baumannii
atgttggttgaaaagtttgattttattgagttacttcgccttgctattgctcaaggcaaagctgaaggtaagaaaatttctaaagatgtagttttaggtgaattagcgctgttatcgccagctgcaaagctttgggccactgtcttgattgaaaaggttgattttgagcgaatcgcaataattaccccagcacaaaaacagactgaaactttttacagtaagtatgactttaattttcaaactgaacgccgtattgaagatattccgggcaaggttgagtttgttcgtggtgagattaaatcaggtaattttttcagagcgcgaaataaattagcggtagagattcataaagaaatggtaaagaaaaaatttacccctactaatgcccaaggtgatcttactaatctggcaaaaggtatggctgagattattttgcgtggccatgtttttgttaaggctatgtgtggagtctgccaagggttgggtaaaattgagacatttggtttaaatggctttccaaatggggcaaggttttgtgaaaaatgtaatggtactggaaaacgaccatatacgttgaaagagaaaatgaatattgctggcattgatgcaaccaaaacagcttatataaagagttatcagaaatttgagctgtttggagaatcaatcgttgctgaatgggaaaatgaaattagaacgcgtatttctcgatcattccgttttgaacttcctgatagtcaagaaacttacgcttga

SEQ ID NO: 46212 - DNA, 219 bp, Acinetobacter baumannii
atgaatatctgtgttggtggtgaacttgacgggcaaaagattgaaaaagaagggcgattgttaaaagcttcagatatcgacccatcttttaaaactgagtactacaagcaagtttttaaccgtgacaacattaattatcatttttggctaccaatagggtccaacttgcatgaaatgtcaaagcgagttttggatattttgagagcatcaaaaaattaa

SEQ ID NO: 46213 - DNA, 816 bp, Acinetobacter baumannii
atgagccatattcaacgggaaacgtcttgctcgaggccgcgattaaattccaacctggatgctgatttatatgggtatagatgggctcgcgataatgtcgggcaatcaggtgcgacaatctatcgattgtatgggaagcccaatgcgccagagttgtttctgaaacatggcaaaggtagcgttgccaatgatgttacagatgagatggtcagactaaactggctgacggcatttatgcctcttccgaccatcaagcattttatccgtactcctgatgatgcatggttactcaccactgcgatccccgggaaaacagcattccaggtattagaagaatatcctgattcaggtgaaaatattgttgatgcgctggcagtgttcctgcgccggttgcattcgattcctgtttgtaattgtccttttaacagcgatcgcgtatttcgtctcgctcaggcgcaatcacgaatgaataacggtttggttgatgctagtgattttgatgacgagcgtaatggctggcctgttgaacaagtctggaaagaaatgcataagcttttgccattctcaccggattcagtcgtcactcatggtgatttctcacttgataaccttatttttgacgaggggaaattaataggttgtattgatgttggacgagtcggaatcgcagaccgataccaggatcttgccatcctatggaactgcctcggtgagttttctccttcattacagaaacggctttttcaaaaatatggtattgataatcctgatatgaataaattgcagtttcatttgatgctcgatgagtttttctga

SEQ ID NO: 46214 - DNA, 747 bp, Acinetobacter baumannii
atgaaaatactagtactgtgtatcgtgaacttcataatctttacacaatccgctttagcactagagtatcggcagattagaaatactactgatgatcagtttgaagtaattgaaatttctaatttagaacaattacgcttatttctgaaaaatccgcaaactgatcaatattataaaagtttcgacaatattcaatatcaacttaaagcatgtgaacagcttacttttgcgatgaatggaggcatgttccattccggtttttctccagtaggactatatattgaaaacggacgagagagccaacctttaaatgaagataaaggctggggaaacttctttttgcagcctaatggagttctagcatggaatgacaaacaagctgttatattgacaactgaacaatacaaagcaaaagtttttcaacccgattatgctacgcagtccggccctatgttagtgattaatggcaaaataaatcccttattcctagcaaatagcgattcaaagaaaatacgtaatggggtaggtgtaaaaaataataaattgtattttgtgatatctaaaaatagagtgaatttctatagttttgctcagttcttccaaaaaaatcttgaagtcgagcaagctctataccttgacggttctatctctagtttatatttgcataagaataatcgaaatgacaaaaaatttaatatggggcctattattggatgggtggatcaggcagattgtagacacaagtaa

SEQ ID NO: 46215 - DNA, 321 bp, Acinetobacter baumannii
atgagcaaagtattaaatgaattgcctgcaagcgctagcaataacgaatcgctcatattgcaagcacttaacgctagcaatcaaagacaagtagcagagatgataaatgtcgatgcaagcatcctttcacggatgaaaacagaaaagaaatcaaatggatggactgagattgagtttattagctttttgttgacagccattggtttgaaggttgtgcaagaaagtgatgtgtattgctcacctgaaattgcagaagcaacgcgagtttatttagcacatgcattcacttcacctgaatacatgcggattttattcaaataa

SEQ ID NO: 46216 - DNA, 345 bp, Acinetobacter baumannii
atgaatgaccaattaaatagggaattaagtcttataaaaattggttcttggcctggagggcatgatgattttatccatttttttaaatttactatagccattaggagatctaaatcatctacttcaagtttttctaagttgagacctgttacagcaattgcctctaagtcatgttttgagctaataggttttaactcacgatatattgatattgccggattagatacgatacatgctccaatggataataagctaaattcacctggtataggtcccgatattctcaatatcgaccaatatgtagaattcattttttgtcatgagttaaactcgcatttttattaa

SEQ ID NO: 46217 - DNA, 927 bp, Acinetobacter baumannii
atgaaaattaagccattgccgccaatgaacagcttaattgtattcgaggcagccgcacgccacctcagttttacaaaagctgcaaatgaattgaatgttactcaaggcgctatcagtcgacaaattcgacagctcgaagaatacctaggtaaggaattattccttagagctaatcgaaatatttccctaactcctaccggattgcaatattatcaaacgatttatagtgctttattagatgttgctcaagctactgctgaaattaagaaatggcaaggagagcatcaaataactgtggctacgacaaatgctatggctgctctttggttactaccgaaagtagctgcttttcaacagaataatgaaggcgttgatttaagaattttaacgacagacaatatttcagatttgcacaaaatggacttcgatctggcattattttattgccgtgtccctccagcaggaatgagagttactactttatttcctgaagaggtttttcctgtttgtagtccaaattatcttgctcagtttaaggaagatagttctccagaagaaatttttggcaaagctttactatacttagatgacgctcaaaaggattggattacatgggcagagtggtttgaagctgtaaactatcctattgtaaaaccgaaaaatagggtgaatatcaataactatccaatgcttttacaagccgcaattaatggtcagggagtagctttggcatggggttcactcgtagacgattatttacaaagtggtgctttagttagacctgttgaaactgttcttcgtactcaagcaaatttcagtatgctagaaccagcagataggggagttattccttctagtgttaagcatttccgtagttggttattagatcaactaccaggacaagtgggacaaaaaggcttaagttaa

SEQ ID NO: 46218 - DNA, 1173 bp, Acinetobacter baumannii
atgtcaaaattaatacagcctatcagttttaaggctttgtttatatttactcctcttctgtttgtatcaataggttgtagtgaagcgctatattcccaaacaatcccatcagtaaagtcttcttcagaaaatatcgactatccagagatcgatacagcattaggagaaaagttacaaccgaatgaggaagtaatagctcatcaaataactcaagttattgagaagtctattcgtgaacagtatacagcgggaaatgctttgcgtgatgcacaccctaaagcgcatggatgtgttcgtgctgaatttcatgtacttaaaaatataccagctcaacttgcaaaaggtatttttattccagataaaaactatgaagcatggattcgtttttcgaatgcttctaatgatgcttctagagcagatattgaaaaagacgcacgtggaatggcaataaaaatcttagatgtatcaggtcagaaaattttagaaaatgaaaaagaagctacaactcaagactttattatgattaatcaccccgtcttttttgtaaatgacgggcaaagatacctgtcttttatgaatgatctaaatagccataatatgatcagaaagcttcatatgccgtttgctttaggttttaaaggtaccatgaatgctttaggtgcgcgtaattctaaaattgcaaatccactatatgcgcggtattggtctatggtgccctatcaattaggattaggtgttgaccgtcaagcggttaaatactccgtaagaaattgctctacagtgactgcagctctacctgatcatcctagccataattttttacgagatgccttaaaagatacattgcaaaagcaagacgtgtgtatggaatttcttatacagccaagaacttcgactaaaatgctggttgaagatgcaatgaccgagtggaaagaaaatgaagcacctttttatcaagttgcgaccattcatattccaaagcaaagctttgatacacctgaacagaatcaattttgtgaaaatctctcttttacaccgtggcatgctttacctgagcataaaccgcttggcgcaataaatagaatgcgtaaaattatttatgaaaatataagcagagttagacacgatatcaactcagctccccgacaaatcatacagataaaaaattactaa

SEQ ID NO: 46219 - DNA, 294 bp, Acinetobacter baumannii
atgaaaattggatttattggaggagccaatgatggcatagtgatcaatgctgccaatggtattgatacttataaacttgaatggcattacaaggctgagaagcattgtgaagaacagccatcattagggctaaatggccctgaatatgactattacaatttattaattttgagaaaaaataaagaggcaaaactcttctacgttttaactaccatggacaaagaagatattgcggataagattaatgagtattgggagtattccacctctgtaggttatgactttgatgagtag

SEQ ID NO: 46220 - DNA, 1110 bp, Acinetobacter baumannii
atgaaatctcgtgcagctgtcgcctttgccccaggaaaacctttagaaattgttgaagttgatgttgcaccacccaaggctggtgaggttttaataaaaattacccatacaggggtatgccataccgatgcttttacattatctggcgatgacccagaaggtgttttcccagcgattttaggtcatgaaggtgcaggtgttgtagttgaagtaggcgagggcgtaacaagtgttcaacctggcgaccacgtgattccactttatacagctgaatgtaaagaatgcttattctgtaaatccggaaaaactaacttgtgtgttgcggtacgtgcgacgcaaggtaaaggtgtaatgccggatggaactacacgtttttcatataacggcgaaccgatttaccattacatgggttgttcaacctttagtgaatatacagtagttgcggaagtctctttagctaaaatcaatcctgaagcgaatcacgaacaagtttgtttacttggatgtggtgtaacgaccggtattggcgccgtgcataacacagctaaagtacaagaaggtgattcggttgctgtatttggtttaggtggtattggtttagctgttgtacaaggtgcacgtcaagcgaaagcagggcgcattattgtcgtagatactaatccagataaatttgaacttgctaagcagtttggtgctacagatttcttaaatccaaaagattatgatcaacctattcagcaagtgattgtagaaatgacaggttggggcgtagatcattcatttgaatgtatcggtaacgtcaatgttatgcgctcggctctagagtgtgcacatcgtggttggggacaatccgttattattggcgttgctggtgcagggcaagaaatttcgactcgtccattccagttagttacaggccgtaaatggttaggcactgcttttggtggagtaaaaggccgttcacaacttcctaaaatggtcgaagatgccatgaaaggcgatattcaacttgaaccttttgtgactcatactatgcctctacaagacattaataccgcttttgatttaatgcatgaaggtaaatcaattcgtactgtcattcatttctaa

SEQ ID NO: 46221 - DNA, 1044 bp, Acinetobacter baumannii
atgttcaacaagcttaatctccctcgaacagttactgctttatccgtaagtttattattgagtttttcagctcaagcggttgagactaactcaagttctgtacaacaaccatcaaactcaagcacttcacaggaaacaactgttgtagagtttgggccttataaagttaatgttccaaaaggcggctattacgatcgttttcgtatgaacccgaatctagacgaagttgcaaaagatcctgcagctggaaatattgattatttccgtaccatcccaaaaaaacttgtagatactagagtgggtaaagtatggtctccgaatttttattaccgtactagcaatatccaactcttgatgcttgctccgatttctaaaataaaagcaaaactccctgctccacttgaaccattacaacctatcccaggctatggtttggtttcattaacattcttctcttatgcagtcggtgatgtcgacccatatgatgaagtttcggttgctgtggttgtacgccaacctggtgctcatcacttcaataccacagaattattgagttcaatgcgtaaccataaatattatggccatgtactcgcattaccagtaaatacagaaattgctcgtgttcgtggtgtgtatggttaccaattaccaaaatggttaacacctattgatatgaaaattggcgataaatcagttcaagctcatatttataatactgatggtaaacctgatttaagtgtagctgcgccattgccagaaattaaaactgtgaaaccacaatctcgtattgaaacaaaaaccatgtatcaattggtagatgggaaatggcacagcacttctgtagagtctaatactttggcatttggacaaaagctttttccaaagaacgttcaagttgtaaaaagtggtggaccgctgagtaaattacttgatgaactaggagctaataaagttctacgttttgatgtagtgaaagatgcacaattggcattaaatatgcctgttccatatccatcacttgataaatcgacagctaaaaaataa

SEQ ID NO: 46222 - DNA, 435 bp, Acinetobacter baumannii; identical to SEQ ID NO: 26756

SEQ ID NO: 46223 - DNA, 570 bp, Acinetobacter baumannii; identical to SEQ ID NO: 13730

SEQ ID NO: 46224 - DNA, 534 bp, Acinetobacter baumannii
atgaaaaaacttgctttgatcgctgctctttcggttgtagggattgcgaatgctcaagctgctgatggtacaattacaattaatggtttagttacagacaaaacttgtgacatcgttactcctgctggtaaagatttcacagtgactcttcctactgtttctaaacaaactttagctgttgctggggatgttgctggccgtactcctttccaaatcaacttagctaactgttcacaaggtaaagtagctacttactttgaaccaggtgcaactgttgacttcaatactggtcgtttacttaaccaagacgctactggtgctaaaaacgttaacgttcaacttttaggtagcaacaataacttcatcccagtacttgctgctggtgcaaacggtgctcaagctaactctcaatgggttgacgtagctgaaggtgcaagtgctgaccttaactactatgctgaatactatgcaactggtgcttctactgctggtaaagtaactacttctgttcaatacacaattatctatcaataa

SEQ ID NO: 46225 - DNA, 234 bp, Acinetobacter baumannii
atgatttcattatttggttgtgccaattccaccgctaagcatcaagacaaattcttagcgcatattcatgaaaatacaccaaatccttacaaggaatgtatggtcaaatatattaaagaccattgggatgaagtttggaaaacttacaatactgaaaaaactggggaggctcgtggtgaaacagatatagtcaatttcatgattggaaagtatctatctgaatgtaaaaaataa

SEQ ID NO: 46226 - DNA, 465 bp, Acinetobacter baumannii
atgacaaagaagtatgcgcgttttttacctacaacagaatctttcactcttgaagattttccatattattggattactcaggtccatgctcaatatgttcaaaatattgataatgccctcaaaaaatatggcctagataattcacgtcgacgtattatgcttgcgctaagtagtaaacctcacgctagcgtatcagaactatctgatatgattatttcaaaaatgtcgactaccactaaaattgtttatcgcttaaaagatgaaggcttagttgaaacctattcttgtcaatcagatggtcgtattacacgtgtatatcttaccgaacgtggtacagaaatgattaataaaattaatgatctaacgagtgtagtacttgaacaatcattcgaaggtatcacccctcttcaactagaaaaaatgatggaaagcttaaaattgcttttaaaaaatctttctcgataa

SEQ ID NO: 46227 - DNA, 471 bp, Acinetobacter baumannii
ttgttgggagggagctatcaactacctgatatagcattaaaagcagcaattacatatcggtctaaaatcaaatataaatttcaagtggaagaagatatttttggtgaaccattaaaacttgttgaaaatgagaaaaccaaattagagactccagcatcattaaatattgattttcaaacaggtatttccgaaaaatcacttgtttatatgaatttaagatgggttaactggaaagaatttgagactcggccaccgcaatatggcgctctatctgaaattattatgaaagaggtaactggtggagcttatacccaaggttttaagctcgattcttatcagaatgatcaatatagtgcgactgtcggtctcgcacatcaatttaaagaaaaatggggtgcttcaacagatgtaagttgggactctggtactggtgatcctgcatcaacaatgggaccaatcaaaggatcatag

SEQ ID NO: 46228 - DNA, 342 bp, Acinetobacter baumannii
gtgaataaagcccaaccttataaagcagttttacgttttgcccatgctgaaattattattcctttagcaactagcttagatttgcataatatgatgcagccgttaccactacgtcagacttataattactcgacaagcgcatggcgtggtgaagtaatttcacctatggcggcaaatttacaatgggatatttaccaaaataaccaaggctctactttggtaaaaatgctttataacgaaaaagaaactttatttaaacctgcatgtaattatgcactttatacaccaaccagtttttactatgactacatcaaattgaaacagtgctatcaaatgcaatag

SEQ ID NO: 46229 - DNA, 627 bp, Acinetobacter baumannii
atggctatggcaaatgcagctcaacacttcggtaaaattgacgtggtgattgcaaatgctggcatagctacaacagaagcactagaacatatggctcctgaaacctttgagcgaaccatcgatattaacctgactggagtatttcgtactttccgcgcagctataccctatgtaaaacaaacacaaggatatttactggcagtgtcttcaatggcggctttcgtccactccccattaaacactcactacacttcgagtaaagccggcgtttgggcactttgtgacagtctccgcttagaattaaaatattcaaatatagatgttggtagccttcatccgaccttctttaagaccccaatgatggacagtattcaaaatgacccagcaggtaaagctgtgtggaaaggtaactcgggtatttggaaatatataactattgatgaagttgtctcgggtgtagttgaaagtatagaacggcgtaaagatatgactgttgtacctaaaataaatactccgattgccaaagcacccgcactgtttagaaatgtgattgagtttttaggtttcaaccgtaaacagcttaaacagaccatgcaattggcagagaaaaaccataattcattttaa

SEQ ID NO: 46230 - DNA, 849 bp, Acinetobacter baumannii
ttgtctaagaaaccaatttctattcaacagttgcaggaaaaaactgatttttcagagggtacaattcaaaatataggaactgatgttttattatttggtttagcaactagagaaaactcacaatatgtattatcggaagatttgttggaagaagaaaatacacaagagaatattctgaatataattagagaaaaatttaagaaacatattattactttacatctaaaagacctttcaagtggaacattattaacaattacaaatttcatagatttaatgaaagaaacttatcctgataataaatatgcagataagacttggagatcttatactattagacttattcgctggttagaattaacaggtttcttacagccagctacagagccaaatacatggatttataaagatttaggaagtcccaaaacttctgtgatgagtagaagacgtacttctaacttttttgtgccaagaattacacctcagttatttatatcgatatatcctcagattgcaggtaagaatcttcaagaattaataaatgatggtagaactaataaggctttagaaattttaaaaaaatttgaattaatagataatgaatttattttagatattaaagattttgagtctgtggtttatgctaaagctaattcagaatttagtatccaagctatgcttgaaattaaagagctatattctgctgataaactatcaggacaggctttaggtaagttgcttaaagaaaaatatgatttaaaatggactgatgtaactactcaatattcaggcaataaattgaatagttgggctaaatgggttaaatcttatgaagtgaaaaatgaataa

SEQ ID NO: 46231 - DNA, 225 bp, Acinetobacter baumannii
atgaagagattgttacttgtattggctacaggatttggtttagatgggtgtgcatcgttaacacaaaaagcagatgaaaattatattactaaatcgcctgttactccggtcaatactgcctttaatggcactaaagtacttgaacatggaatttttactgagcaggatattgctgatatgcctgaacgctcaagtataaattcacgttataaaatatctttttaa

SEQ ID NO: 46232 - DNA, 570 bp, Acinetobacter baumannii
atggagtcattaattgagtctaatataaacttttctatattcttttataatcctaatattcatccggtaaaagaatatctcattcgtaaagaagaaaatatccgcttcgcagaaaaacataatattccctttattgatgcagattatgacaccgataattggtttgcccgtgctaaaggtatggaaaatgaacctgaacgcggtattcgctgtaccatgtgttttgatatgcgcttcgagcgtaccgctttgtatgcatatgaacatgggtttagtctaatcagcagctctttagggatttcaagatggaaaaatatggcgcaaatcaatgactgcgggattcgcgctgcttcacactatcccgatattcagtactgggactacaactggcgaaaaaatggtggctctagccgcatgattgagattagtaaacgtgaagaattctaccagcaagaatattgtggctgtgtgtattccctacgtgatacgaatcgctggcgtatgagtaatggtcgagatcgcattaaaataggtgttaagttttatagtaatgcaatggaaaatgattaa

SEQ ID NO: 46233 - DNA, 288 bp, Acinetobacter baumannii
  misc_feature (236)..(245): n is a, c, g, or t
atgaatttcttaatattgataaattctgcccccaactataaatatttcttttatgagttagcgaaagaaatagaaagccgtgggcacaacatttattttgctatagattctcatcgttcaaagtatcttgaaccattacctgaattagataataatcaaaattctttcttttttgatagctatttagagaaaaattttgataaaaatttaagtgtttcacacaataataatcaagnnnnnnnnnngttttgcttatgccgcttatttacagtgcacgaaacttggtaa

SEQ ID NO: 46234 - DNA, 354 bp, Acinetobacter baumannii
atgactgtgaatcgccgacgtcctaaacatgacccgaaagaatctgaaagggaaattttaaatgctgcagaaaaatttttaagtgaacgaccatttcgtgaactaaatgtagatgaagtgatgaagcttactggacttaagcgtccagctttttatgtacattttcgtgataaatatgacttagctttacgtgttgttcaagacattggtcaggaactatttacattagccaatcattggttaaagggaaataattttccggaagattctcttcaggcattacaaggaatagtcaatgtttatcagaagcatggtgctgggatgagcgggttgagcaaatttatcgttctttaa

SEQ ID NO: 46235 - DNA, 273 bp, Acinetobacter baumannii
gtggcagttgatgaaaacggggatgtggtcattggtaaagacggccaaacaccgatgaccccaaaagaatgggttgaatctctacgcgagcaaaaaccgtattactggcctaaacctaatggcatgggcgcacctggtagcaacaattcaaaaggtcagccagacattctcaaagcagatggctcggtaaatatgaccaaattggcgcaattacgaaatgaaaacccgcaactagctaaagagctagcggcaaaacacggtattaaactttaa

SEQ ID NO: 46236 - DNA, 468 bp, Acinetobacter baumannii
atgccacaatatttaatgattgctgaaaaggtgtataaaaaaattaaagaagatgatcttttctctgatactccgaccgagcatttaaataacctaataggtgtgattcgtaaggaaatcaaaggtacaaagtttaagcttaaatataattttattgactttgacgaatgtttaacaaagccactagatgaatgtgccgtcaaaattgatattagcctcatgcctagtcataaaaataaagatgaatatattttatggttagctggatttatagaacgaatgacgacaggcggggaaacccatcttccacctatctcaaaatttattccgcccgattttaagtttaattacgaatttgacaacgctaagacaccagcaaaatctacacatccagatgatgaaggtgaactgattattaactattttaaatctgaagcttttatgaaaattataaacgaagaaaaataa

SEQ ID NO: 46237 - DNA, 294 bp, Acinetobacter baumannii
atggtaagtcactataaaggaaccattattaggactactcacttatcgggtgtcttaacagatcttgggcttgcacttggttatatagcacgaggtttaaaagtagagaatcgccgcattattttgcatctacttatttttataggttttctatctggcggtataattgctgctttagttcacccttatttaaaattgcaatcatttttgcttccagcaattttaagcttaactctcagtatttcgtattgggcagtttactttcatagttcttcctcttcaaattcggattaa

SEQ ID NO: 46238 - DNA, 522 bp, Acinetobacter baumannii
gtgagcaacaatgccggtaatggggattatggtctggctaaactgctcaaagccggttcaattaaaaaagtgatttgctctttcccacgtcagtctgactcttatgtgtttgatgaactgtaccgtgccggaaaggttgaacttgaactggtaccacaaggcaatctggcgtgccgtattcaggcagcaggtatgggccttggggcggtgtttacaccaacaggctttggaacacttttagctgaaggcaaagaaacccgtcatattgatggtaaagactatgtgcttgagtatccgatcaaggctgactttgccctgattaaagcctataagggcgaccgctggggcaatctggtttaccgtaaatctgcacgtaactttggcccgatcatggccatggctgctgatgtcaccattgcccaggtttctgaagtggttgaactgggtggattagacccggaacacatcattaccccaggtatttttgtacagcacgttgtacaagtacagcccgcacagtaa

SEQ ID NO: 46239 - DNA, 477 bp, Acinetobacter baumannii
atgatgaagcatgaaaagaatttctattataccgacgatgccaaaagtcgtgccttatggatgtggcatatgcttgaagaatctgagcataaagatattgcttatgacgtctatcaggttttaaacggtaattatccgttacgggcaacgggctttttaatggctttcattaccattttagggcttattccaacagcaactttatttgtacctctactgcgtaagccaaaagaactgttgaccagaaaattttggaaagatgcacgtcgtggcgtcaacttaatttttagtccaaaagatggcgtatttggtagcaccattggccagattttcgattatttacgtcctgacttccacccaaatgatcatgacaccactgaatatctagagtactacaaagacaaattactcaaagaaggcggcgcgattgcaccttactttgtgaaggaatttaccccacctgtacgcttgtcttaa

SEQ ID NO: 46240 - DNA, 228 bp, Acinetobacter baumannii; identical to SEQ ID NO: 43201

SEQ ID NO: 46241 - DNA, 528 bp, Acinetobacter baumannii
gtgcattatataggaaaaacaaaagaccccgtaagtcgtacaatgactagagagcatcgtggttattccgatatgctttactacttgttgcatttaaaagaaaagagagatatttttctgaacgttttaatttttaaagtatcagttatttctcctccacataatagtattggaatattttcaacaaactccgtacttgatcatattccaaaggaattggaaatatttgttattgaatattgcctaatttattattttaaatcttcaattcaaaaaggtgatatggatacttcttggagtaagtttgttaattactttagggatttccagaaagaaggaataaacgcgttgtattttaagttggaaatgaaagaaagtacagaatataataatttgggtacacctaatttagctgccaagaaaagccattacttttcttggcaattaaatgaaaatggacttcagatggaaagattttatgaaagtaaagatttagatgaagaggtttttaaggatttctttgtttag

SEQ ID NO: 46242 - DNA, 246 bp, Acinetobacter baumannii
atgttatcattacatttcaacaaacaagtcttcattaacactctgaacagcaaagattcagttgtttatggagtaacgacgcttgctcttatgctgactttactgtttcaaggtatgattaaagggaatctgaaacccgaatactttatgtatgccatggttgtttcttttgtattttgtgtatgggcctttgtcgaccacaaaatgcgaaaattagctaaaagacgacttagtcaacagaaataa

SEQ ID NO: 46243 - DNA, 411 bp, Acinetobacter baumannii
atgcttgaagaatccgagcataaagatattgcctatgatgtatatcaattactcaatggtagctacccactacgagcttctggcttcttcttagcattcttcactattttaggtctaatccctgcgactaccttgtttattccggttttaagaaaaccgcaggaaatgttgactagaaaattctggaaagacgcgcgccgtggtgtaggacttatttttagtccaaaagatggcgtatttggtagcaccattggtcagatttttgattacttacgtccagacttccatccaaatgatcatgacacgaccgaatatctggagtactacaaaaagaaattacttaacgagggcggtgcaattgcgccttactttgtgaaggaatttacaccaccagttcgtgcagtttcataa

SEQ ID NO: 46244 - DNA, 249 bp, Acinetobacter baumannii
atggcctggaaatttataaagttagataaagttgtttctcaaaaagagtgtaataattttcttgaaaaagaagagaataagaagcttttgaaactattaagaatacaaaaaacatgcgctgatggtgctataactctaaagctatatcctaaagaaggtgtgcttatagaagatgctttgggagtagcatatgcacttatcggcttgatggttgctaattatttgcaaatcgacgcgcatgatatttga

SEQ ID NO: 46245 - DNA, 378 bp, Acinetobacter baumannii
gtgaccattcctttaagcagtgtgaataccaatgtacctgctttagataaagagttccaagaagaagcttggtttaatgcggctaaatacccaaacattactttcaaaagtacgaaagtagaaactaaagataaaaaacattttaaaattactggtgatttgactgttaaaggtatcactaagccagttgtacttgatgctgtcttaaataagcaaggcgagcacccaatggcaaaagttccagcgattggttttaacgcgacaacttcgttcaatcgctctgactttggtttaggtaactatgtaccaaacgtgggtgataagatcactgtaaacattacaactgaagcaactgcggctagtgcagctaaaaaataa

SEQ ID NO: 46246 - DNA, 225 bp, Acinetobacter baumannii
atgagtgagtttgagggtaaatctggaaagtgggcttgggagattcaaaaagaacaacaagcgaaagtggaggagctgcaaaagcgtttagatggggcattaaaagagactcaatatgctttgcagtatgttgaagaagacatgcgcggcaatcatgaatttctacaaatggcaatgattcgaacccttaaagctatagagcaagtgctcaaaggtggtgcttga

SEQ ID NO: 46247 - DNA, 426 bp, Acinetobacter baumannii
ttgaatgattatggtttgagtgagaaggaccgtagagggtatcaaccttcaaaaattgcagatcaggtaagaaattttctagaatcatcttatgatagttatattaaagtagttgctttacttgcagtggccgaagaagaagtgattctttttagcccaccacttcgtgaagcgactaaggctattggtgtagatgttgaaggtggcggctattaccatgttcatggggtatctactgacgaaacctcagaagcagcagatgatgatcatgaagatgatctctggtttgcgttagcgcaagcaataactaaagaagactatgagagcttaacaacgctttgtatggattattgtgctttatggaatgagttttgggatgcacaaattgctgatattcactacttagaagcaaagaagttagcataa

SEQ ID NO: 46248 - DNA, 411 bp, Acinetobacter baumannii
gtgacggaggaagagcgccggagttatcaaccaacagaaattgcacatcagctgagagagtttctagaaaattcctataaagactataaagccgtttctgctttattagctgtagctgaagaagaagttattttgtacagtccacctttacgaaaagcaaccagtgctgtaggtatagcggtggagggtggtggctattaccatgtgcatggagtatctgaagatgaaactgctgaggcagcagatgacgatcatgaagaagatctatggtttattttaatgcaagcttgtacagaagaagactacacttatttagaaaacctatgcctcgaatattgtgatttatgggaaaagttttgggatgttcaaatagaaagctcaaaatcaatcctgaaacaaaatttagcttaa

SEQ ID NO: 46249 - DNA, 162 bp, Acinetobacter baumannii
atgtctgctgaaactgtgcctgtacctggcaatgaagtgttgcctgcagggtcagttgctgttgcagtcactgtatcgccatccaccaggttacccgggtttggtactgaccagctgccatctgtgcctgctaccactgttgcagtggtgccatcaggataa

SEQ ID NO: 46250 - DNA, 162 bp, Acinetobacter baumannii
atgtctgctgaaactgtgcctgtacctggcaatgaagtgttgcctgcagggtcagttgctgttgcagtcactgtatcgccatccaccaggttacctgggtttggtactgaccagctgccatccggtcctgctaccactgttgcagttgtgccatcaggataa

SEQ ID NO: 46251 - DNA, 162 bp, Acinetobacter baumannii
atgtctgctgaaactgtgcctgtacctggcaatgaagtgttgcctgcagggtcagtcgctgttgcagtcactgtatcgccatccaccaggttacctgggtttggtactgaccagctaccatccggtcctgctaccactgttgcagtggtgccatcaggataa

SEQ ID NO: 46252 - DNA, 456 bp, Acinetobacter baumannii
gtgcaatttaatgattacccaagtgatcagcctgttaaatttctgttaaatcttaaaaagatttttccaagtactggtgatttattattacctgttttacctgaagataatgatctggaaaatgtaacttgggaatcaacctcaaaagactttgaaatcttcaaaaagttattggcaggttggggggtgattgagcttcgtttaaatgccattaccgcttataaagataaaaattttgcaaatgagctaattaaacaagctcaagcgaaacgtaaaaaagtagcacaaaaaaatcatcaactttctctagttgcattggattatatttttatgcacgaaattcatgcactcattgatgctgaactgttcacaataggcgagaaattttatttgccaaccttgcgggagcaatggaaaggtaccgtttcggaccaagtgcttaatggaaagctctaa

SEQ ID NO: 46253 - DNA, 267 bp, Acinetobacter baumannii
gtgatttctgaagctataggtttaagaaaaccagatcctgaaatctatttatacacttgcaatcaactagattgtaagccatcagattgtatttttattggagacaatcccaaagcagatatagaaggtgccaaaaaaattggtatgaaaacaatatattttcatccaactcttacccttcatccttctctttcagatgcaagtattcatcattacgatgaacttgaagaaacggttagaaggttaattaatccgcctcatttttaa

SEQ ID NO: 46254 - DNA, 177 bp, Acinetobacter baumannii
atgcaagatcttcttattcaatatgaaattgaagagtctcgacctttggcattgcttttagtcaatattttagagggtatgaccattcaagctcaagttgagcatggttcagtaaaaattgatgactattggaagcgtgtagagaaactcattgaatttgaaaaaattgcacattaa

SEQ ID NO: 46255 - DNA, 162 bp, Acinetobacter baumannii
atgtctgctgaaactgtgcctgtacctggcaatgaagtgttgcctgcagggtcagttgctgttgcagtcactgtatcgccatccaccaggttacctgggtttggtactgaccagctgccatctgtgcctgctaccactgttgcagttgtgccatcaggataa

SEQ ID NO: 46256 - DNA, 411 bp, Acinetobacter baumannii
atggctaatgcaatcgcaactttagaaattccagcttcacctgaacaagtttggcaacttattggtggatttgacagcctaccagattggcttccatttgttgcaaaaagcgaattaagtgaaggcgctcgtgttcgcagcttgattttggcagatggcggaaatgtagttgagcgtttagaagcatttaaccaacaagaacgtacatacagctactctattattaaagcaccattcccaattgtggattatctatctacgattactgtactagaaacagataaaccgaatgtttcgcttgtagaatggaaagggcaatttacacctgtaaatgtaagtgatgaagaagttatcgctttatttacaaaaatttattcagatggtcttagagatttaagaaataatttctaa

SEQ ID NO: 46257 - DNA, 795 bp, Acinetobacter baumannii
atgaaattagatcttcaaaataagatcgccgttgtcagtggttcaacttcggggatcggtttaggtattgctaaaggcttagcatctgcgggtgctacggttgtggttgttggccgtaagcaagctggtgttgatgaagcaattgcacatattcgtcaaagtgttccagaagcgagtttacgtggtgttgatgcagatttgaccactgaacaaggtgcagcagctttatttgcagctgaaccaaaggcagatattttggtgaacaatcttggcatttttaatgacgaagatttctttagtgtacctgacgaagagtggatgcgtttttaccaagttaacgtgttatctggcgtgcgtttggctcgacattatgcaccatcgatggttgagcaaggctggggcagaattatctttatttcttctgaatctggtgtagccattccgggtgacatgattaattacggtgtgaccaaaagtgccaatttagcagtttctcatggtttagctaaacgtttggcgggtacaggcgtgactgtaaatgcggttttaccagggccaacatttacagatggtctagaaaaaatgctagcggatgcagcagcaaaagcagggcgtagtacacgtgatcaggctgacgaatttgtcaaagtgttacgtccaagttcaattattcaacgtgcagcagaagtagacgaagtcgcaaatatggttgtttatattgcttcgccactttcatctgcaacttcgggtgccgcattacgtgttgatggcggtgttgtcgatacactcgtttaa

SEQ ID NO: 46258 - DNA, 1011 bp, Acinetobacter baumannii
atggcaattaaacacttactaccaggaaaaattggttttggtggcgcaccactgggcaatatgttccgcaatattcctgaagaagaagctcaagcaacagttcatgcagcttgggacttgggtgtacgttattttgatacagcaccactttatggttcaggactttctgaaatccgtatgggtgaagcgctttctcaatattcacgtgatgactatgtgcttagtactaaagttggacgcatcatgttagatgaagaagaagatgctgcatcacgtgatttgggtgaaaaaggtggtttatttgaatatggtttgaaaaataaaatcctgaatgattattcagcagatgcaacttaccgttcaatcgaagacagcctaaaacgcttaaaaacagaccgtattgatattgtgtggattcacgatccagctcaagacttctacggtgataattggttagaacagttcaatattgcccgtactggagcattccgtgccttaactaagttacgtgaagagggcgtcattaaggcgtggggcttaggtgttaaccgtgttgaaccatgtgaattaactttggatttaagcgaagctcaaccagatgcattcttgttagctggtcgttatagcttgcttgaccatgaccgtgctttacaacgtttaatgccagaagcattccatcaaaatgtagatatcgtggttggtggcccttatagctcaggcgtattggttggtggagaacattttgaatatcaaaaagcttcatcagagattttggataaagtagccagaattaaccagattgctcagcgatttggtgttgatgtgaaagctgctgcactccaattctcattagctaacccagcggttgctgcggtgattcctggttcaagtaaacctggtcgtatggcagaagatttagctgcgttagatgcggtaattccagccgaattctgggaagagatgcgccgccaaggtcttgtatctgaatttgcaccattacctatccgttaa

SEQ ID NO: 46259 - DNA, 903 bp, Acinetobacter baumannii
atgatcgatttacgccaattgaagtattttgttgtagtggctgaagaagaacacgttggccgtgcagctgaacgcttatttatctcccagtctccacttagccgtcagatttctcagttagaagaaaagcttggtctcatgttgtttgaacggaaccaacaacgtattcgtttaactgccgatggtcagacatttttagctgaagctcgtgctttactcacccatgccaaccgtttggaatctttaggcaaacgccttggacgtggtgaagaaggcggtttatgtattggttatattgaaaatgcaatgcattcaggtgtgttgtctaatgctttacgctcgttacgtcagtccagaccagatgtacatatcgcactttataaccagactagtcccatccaacttgaaggtttgaaacagcgtagtcttgatattgccatggtcaactgtccactagagcttgaagaccctgacttaggctatacacaagttttagatgatcgcatgttgcttgctttacctgaacagcatccattagtaagtaaagctgagcttgaagcaagtgaccttgaaggtgtcgaatggatttctgtcattcatgaggaagatgtccattctcgtgatgattttattagcgcttgtgccaaagctggttttacaccagacattaaactggaagctggagcacctttaacggctttaggtctggttgcagcaggtttaggactcacctttattcaacatagtttgcgacatcacgttcctgatggggtagtacttcgcgaactcccatggatgtcttacaacactcaactttgggctgtatggcataaggcaaacttacgtccgctggtggtccattttaggcaaatgttgaccaatgaatttacggtagaagaataa

SEQ ID NO: 46260 - DNA, 984 bp, Acinetobacter baumannii
atgaatagagtcataatcttgattacttcaaacttacgtcgtacctctttattactatcaatgtttctctcattttcggcatttgcggccgagcctcaacctgaagcgactgctaattggtacccttctgtgtatggtgaaaatgatgaaattggtgcagcaaacctattaactcaagatgtcgttttacaagcgatgaaactggtaaaacaaggtaaaaccttatctttagcggttccaatcgacaaaaactttccagcatttcgccaccgtagcttccgcttatataacatccaaccgggtcagcaagatggtcaatctttaggtccaaataaatttacttttaatgatgaactggttactgcatggacaggcattggtactcaactcaatggtattgggcatatcggaattaataatgtttactacaatggcaacaaagctgctgattttgtcactgtagacggcgttaaaaaactcggtgttgaaaaagttccaccaatggtaacccgaggtgtaattctagatatgacctcatactataaaaaagatattgtgccgggcggaacagagttttcagttgcagatataaaagcggtactaaaaaaacaaggaattagtttgcgtaaaggcgatgtcgttttattcaatacaggttggcttgaactggttgggaaagacaataaaaagtttttagaagttgagccaggtatcggtatggaagctgctaaatggttagcagatcaaggtattgttgcttttggtggagacacttgggcttctgaagtttacccaaacccgcataacaatgaagagttcccagttaatcaatatttattggctaaacgtggcgtttataatttagaacttattgatagccgtccattagtgcgtaataaaacttgggagtttttatttgttttaggccaaccactatatgtcggttctacacaagtgaatattaatcctgttgctatatattaa

SEQ ID NO: 46261 - DNA, 606 bp, Acinetobacter baumannii
atggaaaacctcactgcattttcattatttgcaattgttgcctcaattactccaggcccgaccaactttataattttaagtttaagtagtcattataaaatttctaaaacacttcccgttattttaggttcttgtattggagcagccttacttgtattagtggttggtattggccttggctccactattctggcttaccctgttattcaaaaaattatgacatggagtggtttaatctggctcacctttctagcttggaaattatataactacaatcctgttatctctttagaaaaaaatgaacaataccctcctattggttttaaagctgcttttttaatgcaagcgattaatcctaaaacatggatgatggcttttgcagttattagcgtctatacaaaacagggacaagatatcttgataaatgtctcaattttatcctgcatttttttacttatagcatttccttgtctctacctatgggccttagtaggcagactaagtactcggcttctttcaaaaccaaaacatataaatatttttaacaaaataatggctattatattactagcctcagtctggtggcccatgttccctagattttga

SEQ ID NO: 46262 - DNA, 957 bp, Acinetobacter baumannii
atgcttcattttacctttttaggcacatcatcaggtgtacccacgctttcacgcaatgtttcaggattagctgttcgtaacagtaaaaataaggactggattttagttgatgctggtgaaggtacacagcatcgtattcagcaagctagactctcactacaaaacttaattgccatttgtattacacacgttcacggcgatcattgttatggtctagttggtttactggcaagtgcaggcatgaatgcacgcagcaaaccattaatcgtgattgcacccaaagaaattcaacaatggtttgaaatcactgctcaacttacagacttacatttgccttattcaataaaatttattgatgttaatgaagcaactcggccacagcagctcaccgatgaactctttattcaagcacatccactaagtcatcgtgttccgagttttgcatttagtatttatataaaatccacccagaagaagatagatattcaagttttaactcagcttggcgtacctaaaggcgatatttgggggcatttaaaacgaggctacgatgttgagtttgaggggcgaattttaaaatctcaagactttatcaaaattcaaaatcagcagattcatgcaattataggtggtgataatgatcggccagaattattagccgatgcttgtaaggatgctcaattacttattcatgaagcaacttatttgcaaacagtcttagataaagtaggtaaaggaccaatgcacagctcagcaaaaatggtggctgaatttgctgagcagcaatctctagacaatttaattctgacacactttagccctagacatcaggataaaactgggcagcaagctattaccgaagaagttcgccagttttataaaggtcatttttatttagcgaatgattttgatgaatttactttaaatgaaacaggacaacttttaaaaatcgagtaa

SEQ ID NO: 46263 - DNA, 228 bp, Acinetobacter baumannii
atgaaattgaatactctgtttggtaaatttatgattttctttgtggtattatttggtcttttgttttctgtgagtttgttcatttttctaaagaacttcattgttcatgattatagtttctctgaaaatttaaaatcatttaataatgttgtaatatttggtgttgtattattattagggataaattatgaaaaaatagtttcgtatttagaattgaaatggaattaa

SEQ ID NO: 46264 - DNA, 276 bp, Acinetobacter baumannii
atgcgtgagttaagtataattgaattagatatggtttcaggttctgcaaatactgctgctggagcagctttggatggtgcaagcagcggtacaacagttggaggtgccttaggtgcatttgcaggaggggctattgttggcggcgctagaggaattgctggtggtggcgcgattggtgcagcggctggtgctcttattggaggcgcaattggcgtatatgactattatcaaggaaaagatggtaatgactactgtgaagatggtggtaattactaa

SEQ ID NO: 46265 - DNA, 1149 bp, Acinetobacter baumannii
atgctactaaatttttctcttgataaagacacttttaaaaacgattatttataccaaaaaccttttttatttaagagtgcaattgattccaccaaattttcttggaaagaagttaatgagctttatagtcgtggtgatatttcacatcgtgactttaaattaatgaatggctatgaagtgcctaaaaaagaatatgtagagtcatatgataatctgggtgtcatagaataccgctgtattacttcagtcttctatgagtatcttagaaatggagcaactttagtccgtaatcgaattagcaatgaaccatttgttgatcaaattagtaagcagattgctacttttgcagaagctcgtactctagttggagggtatgcggcatttagttcaaaatcatcctataaaagtcattgggatactagagatgtttatgctgttcaattattgggacggaaacgttggatattaagaaagcctaattttgaatttcctttgtacatgcaacaaacaaagaattttccagatataaaagaaccagaagaaatctacatggacgtgattttagaagctggagatattttatatatacctcgtggttggtggcatgatccattacctttagatgaagaaacctttcatttagccgttgcaacatttgctccaacaggatttgagtatatgcgctggttgcagaataccatgccaaatattttagactgccgcaagaactttactaattttcaaagtgatgcagagatgatcaacagtattagtcagcaagttgctgaaattatcagggataaaggctgttatcaaagttttatgatgcatcatctggcagagcaatcagtaccctccatgttatcactagacgttttgggtaatggtaaagtaagtcaattgaatcgcaaccaaaagctatatttgaatgccaacttattacattactttgatgagggttttgtgatcattaatggcaataaaattaatgtcgatggtacgagtttaagcttaattcaatatttatttaatcacccctattcgcgcgtagaagatattttgagtaattttatagaacatcctccagaaaaaataaacaaattactttttcaattatccgtagaaaatgtaattgagctggtaatgtaa

SEQ ID NO: 46266 - DNA, 1266 bp, Acinetobacter baumannii
atgagctctaatttatttcgaaaagaagccctagatgccaaacaggctaaatggacgggaactatcattctatcccgtccatttagttttacctatttaacaatctgtgccttatgcattgctttagtgattatcgcttttgcaatatgggggagctataccaaacgtagtacagtccaaggacaattgattccgcaatcagggctgatacaggtttatacaacacaatcaggtacgattcttaaaaagaatgtgcacgaaggacaaacagttaaaaaaggcgatattctttttacaatttcaaccgccagttatggtgaacaaggtagtatagccgatgctttagcgaaacaaacgcaattaaaagagcaatccatacgaaatgaaatcactcgaatgcgctttattcaccaagatgagaagcgaacaatcaataatcagattggtttgctgaatgggactttggttaaggttgaaaatttaattgctaatcagcgggaacgtgtcaatctagctaaaaaaaatcaacagcggtatggcaatatacttcatgaaaatgcaatttctcatgaagagtttgaagcaagaaaaatagattatctggatcagttggctcaatatgagtcattacaacgtgaaaaggtatcattagaaaaacagctaacggagcagcaaattagcttgtcaggattagaaaatagacaaaataatcaaattgagcagttggagcggttgttatcgagtaatacgcaagaattaatcgaaatgcaatctaggcagcatattgccatacaggcgaattcatctggcgttataggtaccattaatgctgaagttggacagtttgttgatttatctaagcctttattgacggttcttcctgaaaatacagcattgattgcacagctttatgtgcctagtcgggccattgggtttgtcaaagagggcgatcaggttttactacgttatcaagcatacccctatcaaaaatttggtcatgcaaaagcacaggttttatctgtagcaaaaacggcattggcaagtcaggatctacaaacaatcggaattatctcaccacaagaacagcttaataatgaacctgtgtatttggtaagagcaaagctcgataaacagatggtgaaagcttatggcaacgatatgcctttacaggtgggtatgacccttgaaggcgatatcatgcatgaacagcgtaaattgtatgagtgggttttagaaccattatttagtattacaggaaaactatag

SEQ ID NO: 46267 - DNA, 2118 bp, Acinetobacter baumannii
atgcgttatcttgatcgtttatctttaggtcttggtcgaaaagttcctgtaatattacaaacagagtcatcagaatgcggactagcttgcctcgcaatgattgcaggctattatggttatgaatcagatcttttaaccttaaggcagaagtatcctatatcccaaaaaggagcaacgcttacaactttggttaagattgccaataagttgcacctcacgacccgacctctaaaacttgaattggatgaattaaatcaattaagactaccatgtattttacattgggatttgaaccactttgtagttctcaagagtgtatcggcaacaaaaataacaattgttgatcccgcttttggggaaaaagtattcacctatgatcaggcttcctcacattttacagggattgctttagaattatggcctgattctaattttgaagaaaaaaaagataaaacaagtattcgtatttttaaattatttggtgaaattagaggcttatggaaatctttagggcaaattcttattcttgctttagtcctagaagtcttttccctagtaagcccattctttatgcagtgggtaattgaccatgcaattgtttcagctgatctaaatttgctcacgaccttagcaatcggttttggcctgttaatgatattgagtagcctaattagcttgttgcaagcatgggtggtcatgcatatggcaactacattgaatgtacaatggaaagccaatatttttcatcatctggttaacttaccgaccaatttttttcagaaacgacatctaggcgatattatctctagatttggctcgattgatgcaattcaaagaacgctgacaacatcatttattacagccattctagatggtctaatgacgattttcacattaattttaatgttcttatatagtacaaaattggcatggatcgctgtgatcactatgctgttgtacgcggttattcgttggatctggtattaccctttaagacgagcgacagaagatcaaattgtccatgctgcaaaacaaaatactcattttatggaaaccatgcgtggcataaaaactatcaaacagtttgaaaaacaggactatcgacaagcaacgtggttaagcttatttgtagaccaaattaatgcaggattgacgacacaaaaacttaacctcatgtttgggtttgtcaatacattactgtttggattgcagaatattatcattgtatggttgggcgcaactctagtcattgaaggtgagtttaccgttggtatattaatggcctttcttgcctataaaaatcagtttggtggacgagtgagttctttgattgataagtatgttgaagtcaaaatgcttagtctacatggtgaacgtttagcggacatcgttcttactgatcaagaaaaaaccgatagctattcattcgttccagaattatcagaacaacaaaaaacaggaattgatgttaaatctctcagattcaggtattcagaagatgaatcttggatcattcatggcattaactttaatattccagaaggacaatctgtagcaattgtaggtcctactggttgtggtaaaactacactaatgaatttgcttttaggtaatttaacaccagagcatggtgaaatcaaaattggcgggcaaagtataaaaaatattggttctaataaactcagaaattttatcgcctatgttgcccaagatgatgtgttgtttgcaggttccattttagaaaatattagtttctttgatgatggtgctcagcaagattgggtcgaacaatgtgcaaaaatggcatctgtacacgatgaaataatggcgatgccgatgggttatcaaacactagtaggcgatatgggcaatattctgtctggaggacagaagcaaagaatattattggcaagagcattgtatagaaaacctaagatcttatttttggatgaggcaacgagtcatttggatattataaaagaaaaagagatcaacaatatgattaagtcactcaatatcacccgaatcattattgctcatcgtccagagacgatttcatcggttgatcgtattattgctttaaataatggtcaaattgtgagtgatcaaatgctttag

SEQ ID NO: 46268 - DNA, 1356 bp, Acinetobacter baumannii
atgaatatgctcaaagatattagcttgccgatattaaagctggcgttgcccttaattttaattcagatttgtcaggcatccttgggtgtgatcaataccatagtagcggggcgttaccattatattgatttagctggtattggactgggcagcaatatgtggacgcctgtttttatattatttacaggtgttctgtatgtattggttccaaaaatttcagccgtgcaacaagctcacaaagctgagatcgcgacgctcatacaacaaggtaaaaaaatggcatttttattgtcaatttttggctttatattgattcaactgttggcacttttatgtccttggcttattgaaaacccacaagtggcgagtattgccaaacagtatttgcattttgtggcttttggtgtgcctggactggtgtatatgactttattcagatttatcagtgaaggtcatagtttgctgaaaccgattatactgacatatctcatcttgttattttgtgatgctttgctttgtgtggtattggtcaagggcattggttttatttctgaaataggtggtgcaggaacaggacttgccactgcgatcagtgcctatattgcctgcttttgtatgtatcaattggtggcaaaagctgttccagaacttaaaacaaacaaagcaaaggtcaatattcaacaaagcttgcaattattaaagcaaggtctaccgattggtatcactttagttctacaaattctagctttggcaacattagcattttttgcgtcacaacttggagcaaaggccattgcggcacatcagattgtgattaatattgcgatgttaattatcatgattccgattgccatcagtagtgcaaccactattcgcgtggcgtatttttctgcaacgcatgatcatcaatctaagcttgccaccagcgctgctgtagcagtgattaccctgatttatggtgttgtgattgcaggactattggttgcatttgcagagccactgacaggcttatttagtaatgatgctgaagtattaaacattgccgctggcttaatgtcttttatagcagttttcctgatttttgatgcgatccaaacagtggcatctggtgtgcttcgcggtttgcagcaatttatgcaaccactctttgtgattctgttttgttattggctggtgattattccattgagttatttaatgggggttcgtggatggcttcaggaacgtgccaatgtagacgtaatctggctggtgctgacctgtggaatcagtttggcagcaatattattggtgattcaaagttatcgctatttaaagaagggtgaattaccagttggtgagaccatttcaacctga

SEQ ID NO: 46269 - DNA, 1125 bp, Acinetobacter baumannii
atggcacatttcaccacaattaaagatcaagatcgtaaacttgatattatggatcatgtgaatcaggatcatcgtaaagaactgctgattattgcgcagacctatggcaaaaataatgacatacatgatgctgttattgctgacatttatgaagaaggtattttgctcaatacacaagttccatcttcatcgattaaacaagatttgtttattcactttgagttaaaaggtgatttagaagagcaaattctctatttagcgtataactcatttgccaaacaaaaaattgaatttagcaacaatgccaaacagttttttgaagtggtggcgaagtcgcaagtcactccaaatatcactcgtctcaccattaaaagccaaatacctttaccaaattattatgctggttatgcctatggctttattttaaaagtcgtagaaaaagtacctgtggtacagcagagtacttccaataaaagtgacaccttaaagaatctgttcgatcgtggtttcttatggctgatgaagcatttatctgcgcctaaacgccaaaaattgatggaaagcatgaataaagatgtgcgtctttataccttaagaaaagcgtttgcgcatggctcaaatggggaagatttacatttcggctatgtcgatgtgtttacccatggggctagtccaggaagccagtgggtacaacaactcaatacaggatccttaatttccagccgtaccgaaaccgatgataagcacgagcatttgcatgaggggcaagcagtactgattgcggatgaaaccgcttttccagcattggcaggtatcttagatttttggaaaaacccaattccaccgattgtgattttactcagtgctgatgctgtggatttcgcttattttgatgattttagctttcctgaaaataccaaccttcaaaaaattactggagctgtgcatgagcagggcagtcaaactgttgagctgttaaaaacattcgatcaactcgatcaggtatggggtgctttagaaaataacgcagcaaaacagattcgacattatttccgtaatgaacgcaaactgtctggaaaaaataaccatattaaaggctattggcgtttaagcaaggcacattaa

SEQ ID NO: 46270 - DNA, 1224 bp, Acinetobacter baumannii
atgaagaatatatcgaagccatgggttttattgatcagcacttacactacgcaatacattggtgtggcatttattatgtcagctgcttttgccattttaagacaaagtggtattgcattagatcaattggctatgctgaatttaattgcgattccgatgctcggtaaaattttgtatgcaccatttgttgatagctttagattattttttcaagggcaatatcgaagctggcttatttttgctcaattctgcatgatgattttactcgtgatttgtggctggctcgatattcaacgtcaattttccatcgtgttgattttgttcattgtctatactttgtttatgagcatacaagatgtcgcaattgatggtttggccagtaagatttttcaggcgtctgaacgtcagtttgccaatagcattcaatatgccagcaatttattgggcaatattattggcggtggtttgctgttaatcctttatccgtggttgcaatggaaaggggctttgacagtgcttgccgtattgaccgccattacgtgtattcagttgctgttttaccgtgagccagatgatatctatgctaatccacatcgtacgatcactgctcaatttaaaagtttaggccaacagctcaaagtttttatttataaataccgacgctggtttttattgttgtttatttatcctatcggctttacggctgtttttggcattttaaatccgatgctggtagatgcgaaatggtcattggtggacattggttttgccatcaaaatctttggctcaatcgtgggtgttttttctgcttttttagcaacgctattgatcaatcgattacagcgtaataaggcattgattactctcacgattatacaaggtttaaccttgttgctatttattcctctgacgcttggctatacctcaaaacctttagtttatttggcgatatttggttatttcattgctaaccccggagtgatggctacgttatctactatgattatggatcgtgcttccagtatgccagcaaaggcgacattctttagtttacaactcagcttagtagtctttatgggtttcgcctattcagcattgggtctcgcattggcacaacgtatcggttatacggctgtggtgatgttgacctttttctgtgctttagctgttgcaatattggcatggaaaatattgcctgctgatgcagaacatttagcacattaa

SEQ ID NO: 46271 - DNA, 2208 bp, Acinetobacter baumannii
atgagttccacatatcaactaaaaagatccgctttatttttaagtttggttttattgtcttcacaatatgtgttggctggggataatttgactgatttaaatatccaaacattggatgcaactgaaaattcaaaacaaaaccattcagttgagcaaagtccctcagaacaacaactccccacaattgttgtctcagcagaccaagatcaaactttatcggcagggcaaattagtaaaaccagtcaagtcggtatgttgggggataagcaggatctagatatcccatttagtattactagctatacctcaaaatatattgctgaccagcaagcaacctcagtggcagatgctttaagaagtgaaccttcagttcgaagtgttttctctaaaggggggattggtgaatatttcaatattcgtggtctatacacgcaaagtcatgaattggcttggaatggtctatttgggcttttaccacataaccgtgtgccaaccgaatttttagaacgtgtcgatgtctttaaagggaccagtgcattactcaatggtatgtccattggtggggcagtgggtggcgtgattaatgtcgtacccaagcgagcaacttctgaagacattacacgattaaccacgacctataaatcggattcgacttttggcgcacatatcgatgttggacgccgtttcggacaagaggatcagtttggtgtccgtgtcaatgccttaaagtccttaggtgataaagcattagacggtcaagaagaaaaccgttatttgggttctgcggcatttgattataaaggcgaaaaattccgtgccagtttagatttatatgacatcaacgaaaaactcgatggtggacaaccactgatggtgtcgtttgcaacatcagttgtacctaaagcgccagattcaaaattgaatcatcaacctgggtcgtattcgcataccaaaacacgtggggcaattgcccatgttgaatatgactttgcaccagagtggactgcatttgcatctgcggggacgaaacgtcaaaacggtgtaggtgtaattgccaataatgctttaggcaatgcagtacagcccaatggcgattatatggctgtatcgcgtatgaatgccaacaacactaatgttgatgcaggggaattaggggtccgaggtaagtttaatacaggggcaatcaaacataatgtcgtgattagtgccaattcacttgatcaagatacgcatatgggcttggtgatggggacaccttgggcatcaaatatctaccgaccaacacgaccagcactgattgcttcacctccaacgtatacgcctaaaacactagacactacgctaaccagctttgcctttgccgatacgctgtctacattagatgacaagtatcagttgattttaggggtgcggcatcaaaatgtaaaatcgcaaagttatagtattttaacaggcctgccaagtagcccatactatgatgaaagtgctgtaacgccaatggtcggcttcgtggttaaaccttgggacaacacattatcactgtatgcaaactacattgaaggtttatcgcaagggggcaccattactgatccaagcaatccattagtcgctgaaaaaacctttaaaccgtataagtcgaaacaatatgaagtcggcacaaaatgggatatgggtaaatttaaaaataccctcagtatctaccaaattactaaaaatgatttagcgcaagatgccaatcgcaattatagcgaaagtgaacaacgtaaccgcggtattgaatggaccactgcaggtgaaattgttaaagacatacgtctattgggtggtgtgtcctatctcgaagctgaatggaaaaaaacagctggtggtttaatggatggcaatgatgtcaaaggtattccacattggcaatccaatcttgggctggaatgggatgttcaacctgttgaaggtttaactttaactgccaataccacctatacaggtagcttatatgccaatgataccaatacgcaaaaaattccagattggtttgtgctcgatttaggcggacgttatgccaccaatatcgccaagcataacgtggtgttccgtggtggtgtcgacaatgtatttgataaaaaacattgggcaggggtttggaatggctatgtgggtgtaggtggtgatccacgtagttataaattatcaatgcaaattgatttttaa

SEQ ID NO: 46272 - DNA, 762 bp, Acinetobacter baumannii
atgacttctataaatatctctacgccgattcatctattttgtgttccctctgcaggtagcagtgcgtcaatctacagtacgtggaatcaagctttcgatgaaaatattcgtgtgattgcacttgaataccctggtcatggacgaaagattcagcagccactcagtaacaatcctgatgagttagcaaaacaatttacacaagagattttgagctatggagatgtccctttcgtactttttgggcatagtgtcggtgcatcactcatttggaaaattgaggaaaaattacaacaagcaaacgcagatcaaaacttaattttaaaaatagtcagtgcacgaccgtcgccacgttttcaaagcatcattcatcgctatagtgagatttcagatgagcagattgttcaggaactcaaactgtataacaactttccagatgaaattttaaatcatcctagtgccttagaattcttcctcaaaattattaaaaatgattttattttaagtgacaatttactcaaaaaatcaattcaaaaatccataattccactcatggcgatttttggtgaagaagacccatacattaataatcatgacattatgcagagttggcaagacctaactgaagaatggtttggtgcatattcagttcgtggggatcatttttattttctaaaccctgaaattttgcaagaggtcgctgaactgattcaaaataaaattgaatatatcgcaaaaaaatctcttgcaaagcctgtggcttaa

SEQ ID NO: 46273 - DNA, 870 bp, Acinetobacter baumannii
atgtgcaatacaaacactttaagacatgccgatgtaaacatcgcgaaacaatatgctcagcataaaaaactgatgtttaaagatgaatgtttagaatacagcattttggacattgaaccacaaagtattcatcaaattcgaatacttaatatgaatgaacaacgtcttcattgcttgtattcacaatataaaatattcatgccctttcacgtgactagagcaagtttaaaacgtaaaagtgaattttttattggccgcttagctgctcaatttgccttagcaacactcggagattacacaaactttattataaaaaaaggtgaacgtggtgaacctttatggccacgatatattcgtggaagcattagccacagtatgtcaaattgtacacatggtattgccattgcaactgctgcaaaacatcctacccagtttactgacggtattactcaatcaaattcacaatatgaaactcaaattttaggtgtggatgttgagatcaaacaaaatattgaaatatttaaagaaaatccaaacattctaaatagtttgatgagcgctcaagaacacaaacaattaatcccttttcttcctcaattcaattgccttcatttaattgtattttcagctaaagaaagccttataaaagcagtctacaacaaatatcagacgcttattttctttgaagccattcattgcattggcattcagccatcaacaaatactttaagtttttatattccccaaatctcatctgaactcagcactgggcaaataattgaagtgaattacctcgagtccgagcatgaaatcatcacctattgctgcttacccatttcctcaaaccaaagagtacacaacgatgcataa

SEQ ID NO: 46274 - DNA, 366 bp, Acinetobacter baumannii
atggattaccgattgattttaaaatcactggggggtgacgtccacgacagtcaagttgcaaaacaactgattgatattgtaggcgaggcaacttatctcattgctgacaaggggtatgatgctgagcacattagaatatgtgccaagaacaagaatatgatttccattattccattgagatcaaacagtaagagatcgaataaggaatttgataaatatctatataaattaagacatttagttgaaaatgcttttgcgagattaaaacatttccgtgctattgcaactcgatttgataaactagcacgcaattataaatctatgatccgtatagcttgcatatttatttggtgcaaagccaaatga

SEQ ID NO: 46275 - DNA, 360 bp, Acinetobacter baumannii
atggcacgtactctcctcaccgatgatatttggcagcaaattcaagatacgatgcgattacacggttgttactgttcaaaaaacagtagaaatatcatggaagccatcttatggaaactacgtacgggtgcgacatggcgtgatattcctcaagaactttgcccttggcaaactgcttacaatctctttaatcgctgggcaagtaagggattatgggataaattttttttagattacgaggcattatggatcaggaatgggtattcattgatggaagctacatacgcgtgcatcaatatgcaagtggagctcggcatggtttcgaaagagcaattggacaatcacgcggtggacgaataa

SEQ ID NO: 46276 - DNA, 627 bp, Acinetobacter baumannii
atgatgacaatatcaaaagcattaccgaatttttttgaatatgcagaacatcagacatcttatgccttgcgtgatgttattttacctaaagatttatctttattggtcaaatggatgcatcaaccgcatattataccgcagtggcaactcaataaacctgagttagaacttgccgtgtattttgaacgtatgctttgtgatgatcatcagcatttatatatcgtgcaaatagatggaaaagatgtcggttatttagaaatttatgaagccaaacgcgaccgtttagcgctttattatgatgctaaaaaagatgatttgggctggcatgtattactcagtgaagatgcagtgggtcaaggacattttcgggctgtgatgcgtatgctgagttttctcatttttgaacattccaatgccgaaaaagtggtgggtgaaccagatcaaaccatgtctgtttatgaaaagattcgagctgacattgcactagaaccccaaggcacaattcagcttcaggaaaaaacagcgatgttgtatcactgttatcgagaaaaattttatcagcagtgcggtcattattataaaacgtttaagcgaaaaaaagctgataaatgtctcgttgaaaattga

SEQ ID NO: 46277 - DNA, 1161 bp, Acinetobacter baumannii
atgaatttcccacactattttcaaagcaatattcaagagtatttggatgatttattgaaaaccaaagccacaccatttttggttttagatttaagcgttattgaaaaacattatttggaactgaaacagggctttcccaatgccgatatttattatgcgctgaaagccaatccagccaatgaagtgattgagcgtctatgtcgtataggttccagtttcgatttggcttcggtcaacgagctgaaaaaagttcaggcttttggtgtagatgcatcacgcttggcctttggcaataccattaaaaagcgtgcggatatccaatatttttatgaacaagggattcgtctatatgtgaccgattctgatgccgacttaaataatattgcgcaatatgcaccgggttcgaaagtgttttttagactgtcgattgatggttctgaaacagccgattggccactttctggcaagtttggttgtaatgcagaatgtgtaatccgactggcagtaaaagcgaaggaattgggtttaattccttatggaatttcatttcacgtaggttcgcaacaacgaaaaattgatttgtgggacagcgctttagcagaaacaaaagcgatttttgatgtgttggtgaatgaccatcagattcatttaaaaatgctcaatttaggcggtggtttacctgcgcaatatgtacaacaaaccgaagcttttgcgagctattcgaagcaaattaatgcagcacttgaaatgtttaaaccatatcaattggagcaaattattttagaacctggacgctctttggtaggtaatgctggcattttagtctcagaaattgtgctgatttcacagcgtccacaatcagggactaagcgttgggtctatactgatgtcggcgtttttaacggcttgattgaaacgttgggtgaggcgattcaataccccatcgtgtgtaaaaaaacaggacagagtgatgacattattttggcaggtccaacgtgcgacagtatggacattatgtatcagaacaaaaaatatgaattgccactgtctttagaaattggcgaccatttgtactggttatcgacaggagcatatactaccagttatagctctatcgaatttaatggttttccgccactgcaatattatgcattgaactga

SEQ ID NO: 46278 - DNA, 1341 bp, Acinetobacter baumannii
atgaattcacaacatatttacgacatcgttggcattggcgttggtccgtttaatttaggactggcatgtttgactcaacccttgaatgaactcagtacaattttttttgatagtaaagatgaatttgattggcattcgggcattatgcctgaaggcagtactttgcaaattccatttattgccgatttggtcagttttgccgatccgaaaaataactattcgtttttaaattatttaaagttacacaatcgattgtatcagttctttattcgagaaagtttctttattttgcgtgccgaatacaacttgtattgcaaatgggcggctgagcaactggaaaatgtgcatttcaaaagctttgtcgagcggattgattatgatgaatctcgacagctctacaccgtacgtgtaaaacagcctcaaggtgaaatgaaggtggtgactaaaaatctagtcttgggcacaggaaccaccccaattacacctaaattctgtcagggttatcctgaacagattcagtccagtgcagattatttacgtcataaaaaagattatttaactaaaaagtcgatcaccattgtgggtggcggacaaagcggtgccgaaatttattatgacttgttgtcggaaattgatcagcatggctatcaactcaattggctgactaaagcaccgcatttcttttcgatggatttgggtaaattgacactggaatacacgtcacccgattacacctcgcatttttattcattggatgaagataaacgtgatcaagtgattggttctcagaatgccttatacaaaggtattgagctgagttttgtgaatcgtatttacgatctgctctatcaaaagtcgttacaccaacccattccaactcgcatgatgccaaattgtgctttagatgctgttgaacaacagagcaatcatttaaatctgacctttaaaaattcagacattaataagcgctttaaattggaaagtgaagtgctgatcctggcacttggttatgaatacaaaatccctgaatgtctgacaccaattcgcacgctaatcaattgggacagcaaaggtcgtattgcgctgaactggaactacagcattaacgatgacaacacgatttttgcgcagaacattggtatttattcgcatggttttaccgtcccagacttgggcatggggtgttatcgcaatgccatcatcattaacaccattttaggtcgtgaagtttatcctgtggaaaaacgtattgcctatcaggagtttgcacctacaactgaagaaatcgtgacacctgtaaaaacaacagcaaagtcacacagtactgaactctctttttag

SEQ ID NO: 46279 - DNA, 1620 bp, Acinetobacter baumannii
atgtttatagaacaagatattcaactgggctatgtgccatttcccaaatcgagagctcagcagtatcgagatgaaggttgctggaaatctcaaacccattttcaattgttggcaagtttaaaagaccgctttgcacagcgtgtagccgtcatacaagatgataagcaactgacctatcagcagttatatgactatgcgattcattatggcacttacttaaaacaacagggtattcgtgaaaccgactttgttttattgcagtcgccgaatgtgattgaagtttttattgtgatttttggtttatatgccattggtgcaagacctgtattttgcttgcatggtcatggctcatatgaaattgaaaatattgcaagacaaagccgtgcagtaggttttattaaactgtgtggttccgccaatgaaagtactgcaaccgacgtttgtgaagaattttctaaacccaattttaagttgtggtttagagaaagtattgtgagtcgatcgagcattgaagcgtcattgccacagttacaaggtgttgcgcctgccttcaatttacgcgcacagagtgaatctgaagatatcgcatttttacaactttcaggtggaaccacaggtttaccaaaactgattcctcgcactcatgcggactacatttactcgattgaaaaaagcgtcgacgttgctgggctaactcaggacaccaaacagttggtcgtactacctgtgatgcataatttctgcatgagctcacctgggtttctgggggtgttttatgtaggtggcacagtggtactcagtcagttgacacatcctcgtgtttgttttgaattgattgaaaaataccaaattcagcaagtctctttagttcctgctattgccacgctttggctcaatgctgaaagtctcaaagattatgatttatccagcttgcaagtggtgcaagtcggtggtgccaaattgttaccttcgcttgccgagcagattattgacaccctgcaagtcaaattgcagcaagtctatggcatggctgaaggtttggtgaatttcacacacttggatgattcagaccaaattaccattcaaacccaaggtaaaaagctgtcgcatttagatgaaatccgtattgctgatcaggatggcaatgctttgccaatcaatgcgatcgggcatattcaaacccgtggtccttataccatcaatgggtattacaacttgcctgaaattaaccagcgtgcctttacgcaagatggcttctataaaacgggtgatattggttatttagatgaaaatctgaatattgtggttacggggcgtgaaaaggaacagatcaaccgttctggtgaaaaaatcacaccaagtgaaattgaagaatttattttgcaatatccatcggtgaaagatgtttgtgtgattggcgtcagtgacgattatttaggtgaacgtattaaagccatcatcattccaaagttagatgacagtgaaatcaacttaaaaaatattcgtaaatttttgattagtaaaaatattgcgcatttcaaaatccctgatgaaatcgaagtcgtggcagattttaaatatacccacgtgggcaaagtcaatcgacaaaaactgggataa

SEQ ID NO: 46280 - DNA, 3216 bp, Acinetobacter baumannii
atgagtcatcagcaaagtatcatgagcgatgagttgtttaacttatttgccagtaaattacaggatattggtctttctgatcagaaagctgcatctacaccaacaacatcgaatcttcaggattcattacagtctgccattgtagaaactcaagcacagccgcaggtttcatttgcagaagaacgtgcatggatgatgcatcagcaagatccattggcatcttcaggtccatttattttagcgcttcgtctgacaggtaaaatcgacattgcacgtttatctcgggcaattgaaaaattgtatgtcgggcagtcgaatttaaatttacgttatgacttggacgacgaaggcgttttaactaaattccatgcagaagaagcatccacagcgcttcagattcatgtggtgcagtcggaaacagacgcaattcaatacttactgtcatggttacagcaaccgattgatttggcaaagcaacctgcaattcagtttagtctgttgccacaaagtaatgatgaggtgattctcggtattttaggtcatcacattttattagatgatgcggcatggcaaccgatttttactcagctcagtcaatattatgaacagattgattcaactggtgttgtcgtaaatcaatcccatcaaatgccgttgcaacccaaaatgaaagacagcaccagtgcattgcagtactggaaaaatactttcccgacgggtttaaccactatgacttggccaaaattctgtttggcaactcaagtgcaagccccagtgaccgaatatgggaagcatcgtgattttgattatgtacaaaaagcggtacgttgttatagtcatgtccatgttggcaaaattcaacagttgagccagcaggcacaagcatccattttccacacggtggtggcattgtttggcagctatttaaatcagttactcggtcaaaattcgctggatctatttgtgccgattgttgagcagtacgatgcatcgagtttggataaaattcaatccagttcgaatattttacccattcgtatcgcgcgtgcagatcaatcaaaacacccccaaacagcgcaggataagatcaataacgtcattgcaaatgtccgtaatcaaattctgcaagggatgtcgaataatgtttccattgagcagattttgtcggcaaccaaaaccaagcgcaatacgattccgaatgtactgattacccagtttgtcgaaccgagtcagtatcttcaattggaaggtgtgacggttgaaaccatcgctataccaccgattcattccgattatgatctgactttggcgttccaagtcaaaggtgatgaaattcactttgagctgaccacaggcgaaaaactatcgaaaagtataagtccattattactggaacaatggcttgatttcttagacgcagatattgcgacatggacagaagctgatctgatttttgcagtaacgacacagcaagaacttcagccacaaaccaattctcaagctcaaagttcatcacaacatattgaaaattcagtatcaagtaagaaaattgatatatcagcaatgcaattgattttgcaagagttccaagctgtattgatgaacagcaatttacaagttgacgacaacttctttgattttggtggacattctattttagccactcgggtgattggtaaattacaaagccaacatggtttagtgatcaaaatcgccgatttctttaatgcgccgactgcacgtgaattagcgcaatatgtgcaacagtcgaatgcgctcagcgaagataatcaagtggtggctgacgaccgtgacattgttgcaccgctgactttgttgcaaaaagcctttatgggcttttcggatcaggggcgtgatgcgatgtataacattccatttgcttttcgctttagtgaagacgttgatgaacaggctttttatgcagcattcttggatattttaaaacgtcaccatgccttgcgcagtatttttgtacgtgcagatcagggcgatatattccaaacagttattcccatgcagcagctggagcagcatccctggttctggggttctgaacatcagatagcgcaaagtgcacagcagattttacgtgctgaagccaatcattcttttgatttgatgcatgagtttcccattcgtgttcgttttatgaaagatgaacaaggacagcatattttatcaatgttgctatatcacattgctgtggatgaatggtcgtcgggtattttgatgcgagagttaattcaagcctataccagccgagtcgcaggacaagcacccgtttgggaacaaacaccacgtcaattccatgaatatgcgatggcacaagatgattctaccttgcaaacgcatatccagtattgggtcgataccattggaaaaataaagaaacagccgccgttattgccagcgtatgcaacagcacatgatgagcaagatcaaacattagacacagatgtggcaggggctgccgttgaatttgggtttacggcttttcaagttgagcaattgtacgcattggcacgtgagtatagatcatcactgttctatgtggtctatgccgcaatggtgttggcaagtcattatttaggtgcaggacgtaaaattttaacagggacttcggtcgcatgtcgtcaagatccgctgtatcaggacaccatgggctattttaccaatgtagtgatgcataacacccatttagatgaaaacttaactatcaaagacttggtacaacaggttcaaaataacatttttaaagcacaagaatatgccgatattccatttgccattgttgaagagaatattcgcgctgaaggggaagaatggacggagagtccatacgaagtctatgtgcaactacatgctcaaaatgctttaacaggttcattccaactcaattcaggtcatgaaattggttttgaactgattgaacctgaacgagatacggccaaattcggtctgcattatgaaatctacgaagaaccaagttctgagcacgagcgcttaagagttgtaattaactaccgtgttaatcgttataacgacacgcagattcagttgattcgacaggttgcacatcaggtcttaagccgatttatcgatattgatacccaatctgatgagtcgctgaatattgatgttcgagacattcgtcgtcaattgagtagcattcaacttccagaaatggccgtttaa

SEQ ID NO: 46281 - DNA, 3237 bp, Acinetobacter baumannii
atgaattcaacacccttaactgcaatgcaaagagcttacctactcggtaaaagtaaaatgtttccactgagccaatcttccatgcatgactttcaagaatttcatgggcgaatggatgttgaaacactgactcagcgtttgactcaattgattgcattatatcctgcattacgtaccaccatcgatgaaatgcaattgatgcaagtgattgagcctgaaataaatctcaatcaacagttgaaagtctatgatctttcgcatctcaacagcatggaagcgaccattcaactggaaatcttacgcgatgaatatcgccatttttcgcatgatttaagtactccgccttggcaaatcgcatggattcaattacctgaaacttttgaagagcaaacggtggtattgaccagttttgatgggttaatcatcgatggttattcaatttcagtcattttaaattcgctttttgatgtgaaccaagatttaaatcttttagataaagatcaaaatctcgatgctcaacaaaatcattctagtttttttgatgcgactgaaaaggatcgtgatttttggcataacgcactgtctcaagttgaagaattacatcctttgccttgggcaaatgccttggaaagtattgatacacctgtctatgctcggcaaacagtcgtgattgaaaaagccaagtttgatgctgtatctaaactggctgggcaatataaagtttttcccaatgcactcttaaccacgctcgttttagatgtgatttcacgctggacggaggaacaaaaattactcgtttcaatgcctgtatcccattctgctttgcataaacgtgtaggtaatagttcctcatttattgtggtcgactatgcatactgtccagatctaggttttgtcgatcaagtgaaagacacgcaaaaacaaattttgcaggctatggcacatagctcgtattcggggatagagctttcaaagtatttgattaaacacctgcaagaatccattgtattgcctgtggctgtaaccaatggtctgtcttgggtgaagctgagcgaatctagtgctatgcgctatgtgagtggtcaaacacaaaccccgcaattggctttagatattcgactctcattttcggcaggttcagatttggtcattgaccttgattatattgaacaagctttaagtcctgccatggttcaagatatggcagaggctttatcaaaacgactccatgatttaaaccagctcgagacagaattaaaacaaccaaaacgtttttctcatgtcgcaacattagacgatgatgccgttattgctgatgattatgcccatgttgaagtgggggattatttagccaatattcagcgcaatctgtttgaacaaattcccgataaaactgcactcatttatgcagatcaaaccatctcttatgctgaattgggtgctaatgtcgccaaagtccgtcgtgctttagatttggcacaaatccgacaacatcaagtcgttgcgatttgcttacgtaaaagccctgagcatatttatgccgttttggcttgtgcgttatctggaattatttggttgcctgttgatatggattcgccgtcactcagacaacaatatattttatctaacagccatgcagatttagccatttcaactgcgcccgttgaaggtttgctgacattaaatattgatgaaattttaaaagattcagcacacggtcaattacattcgggcagtgcggagtctgcgtttgaatcggaaattatctggcaacatcgtcatgatgcgtcgcccgcgtactatttatatacatcaggcagtacgggtacaccaaaatgtgtggtactgaataaccgcgccacagctcatgtgttgcaagaaaccattgatttttggtgtattaaccagaatgatattcatctagctgcgacgccgttccatcatgacatgtcaatttttgatctgatggcaccactttcagtgggaggtagtttagttgtgccaacattggaagaagccaagagcgcagtggcgtgggctgatctgatcgaacgttatcaggtgtcgatttggtgtacagtccctgcgatggcagatatgttgttgacttcagccgacccgaaacaattacaaagtattcgcttaattaaccaaggcggtgattatgtcaaaccgtctgtggtgcaaaaattacgtgaaattttaccaaatacgcgtctgatttcgattggtggtccaaccgaaaccaccatttggagcatctggcatgaaattacccctgaagatgtcgatgtaattccttatggcaaggagatggtgcataaccgatattacattttaaatccatggggtgagttttgtccgccaggtgttgttgggcagctctatatgtcggggattaaccttgctaatggctacctgctggatggcaaaatcacacagaaagattttgtacttttaacacttccaaatggtgaagtacaccgtgtctttcgtatgagtgataaaggttatttgcgtgaagatggcaacattatttttgcaggtcgtgatgaaggttatttaaaggttcgtggggtgcgtattgccgcatctgaagtagaaaatgctttattaaaacatcctcaaattactgattgtgtagtcaccacatgcaccaatcctgtctatgaaggcaatgaactcgtcgcaatttacaccactcaagaagctgctttaaacagtattcgtccatctgaactgcgtcagttcttacaggattatgtgccaaattcacatattccatctcgatgggtgtcattagcgcaattcccgattacacgaaatggcaaaattgaccgcaaagcattaaagcaaactgcgcaagattttctgtaccagacctatgcacaaacagcatcctcaaaaaatacacaagtttttgattcaaaaatgaatctacaaaaagattcaccaaaatatcatcgtcattctaaacaatctgatttggcgagaccttccattgctcaagaggtaattgagcatttacagcgttcattgccgagtcaacaagaatcatctgacgtattgctggacactgaaattttggcactcggtatgacctcggggcatttaagtcgtttggccaagcatctttcacaacaactcaatactgcaattcaattgtctgatttagccaaatgcaaaactgtaggtgagatcgtgcataacattgaatcgcaacttgatcagaaataa

SEQ ID NO: 46282 - DNA, 2505 bp, Acinetobacter baumannii
atgcaattacaacaagaaattaccgcagacattcaccatgttctgcaaattgatagcattcaaattcaacctgaagataatttgattgaacatgggttgcattcattggcgatcatgcagttagtcgatcattttgagaaaaaatataacacggcgctgtcttatgcagattttgccatgtcaccgactgtacacgattggcagagccttattcaggagaatacaaaatcggttgatgctgtgcagagcgaacagcctaagcaaaattcaattttacctgcatggttagacacactaccgactcaaaccgttgcattgtccgatatgcaatatgcctattgggcagggcgagaaaccgaaggcgtgtcggcacatttgtatatggaatttgagggaacagatttaaatctcgaacaattgcaatgtgcatttgaacagttaattcagcgccatccgatgttaagtgcatccattcgtgacggtcagcaaattatccaatcagttgaccatcaagaaattcagatagaggatttaactcaactggattcaactgcaatagaggagcatttaaaagccaaacggaaacgattaagtcatcagcaattagacattgctaaagggcaagtgttggatgtgcagttaacgcttttacctgagcatcgtcatattctgcatattgactctgatatgtcggcaattgatccgcaaagttttttagtggtggttgaagacttaagtgctttgtaccagggtgaagaacgtgcagatttaaacttggatggtatcggatattttaattatctagcgcaacgccgtcatgatgttaatttacaagaaaaaattcagcaagatcaacaatggtggcaatctcagctcgatgccattgcacctgcaccgctattaccggttattgctgaagggttacgacaagacccacatcagtttgaacgtctcatccatatttttaatgcagatgaacgtgctcgtttacaaagtttggcacagactcaaggtgtatctgtaggaagtttatgtttaagtctctttgcgcaaacaattgcaaattgggcatctcaacctgaatttcgcctgaatttacctgcgtttattcgcgagccatatgggcaaaatatcgagcatgtggtgggagattttactcagattagcttactcagtttaaagctgaaccccgctgaaactttgctagaaacgacgaaacgaattgagcatgatgtcaatcaaattcatgaacattaccgctatggtgggattcatgtactgcgcgatttatccaagcatcgtcaacaactggaaatttctccaattgtgtttacctccgctttggatgaaggcgagatattctctgagcaattacagcgtacattggggcaacctgtatggtgtatttcccaaggtccaaaagtcgatttagatgtacagattgcctattttaatcaaggtttggctgtaaattgggatattcggagccatgcgtttaaaccgaatgtcattcaaggcatgtttgatcattatattcagtcgatccagcatgtcctgacggtgggtagctctgtacttactcaatccttaaatgcattgtctcaacagcttgcaccgcacaaccagcaaccgaaacaggtgaaagtacaattacctgcaccgctctttgctaagtttcctcaaacaaatgcaaatacaccttatcgtgtcgtaaatggtctagatacggattgcccagcttgggttttaggtcgcttggtgctgagttttgatcattcaaatgcccatacaacagatccatccaatcaatctgaatggatcgagacaggtattcaagcgtatagcgatgatcaaggtcggttgcatctgtttgagcagtcacatcagttgatcttgaaaaatggtcaatgcattgaagttaaaaatattgaagaccaaattgctcagctctccttcatcaaacaggtgaaagtttatacgcatcaggatcaatcaaaaaccacgattgtggctgtattaaaccttcatcaaaagcagtcatccgcagatttgctcaaagcctatgccgaagttttgccagcgtatttaattcctgatcacaactatgtggtcgatgaaattcaaagttttactgcaacgttatcgtctgaacagctgaatggtttactcacaaaatatgagccattagagcaatcggacgcatcacagcttgaagaaaccacagtacttgaaaaagtcgtgacgttgatgatggcgaaaattatcggaatcccgcaatcgcaagccaacagtcatttggatttttttgatgaaggtggagattctttgctagcgacgcacttggtcgcagctttaaaccaatattttcagaatgccgatatcagcgtggtggatatttttacacagcgtaatgcaaaaaatatcgccgcacttttagaacaaaaactgcctgacactgcacagcgtattgctgaagtctttatgcaagtgatcgaggggaaataa

SEQ ID NO: 46283 - DNA, 792 bp, Acinetobacter baumannii
atgaaagaagcagaaacacaagagaaatcaccaaccctcactcattcagctgataccaaaattgcatgggtgactggcgtgaatcagggcatgggtgcagaaattatgcaacggctgattgcacaacatatatatgtagtcggttttgatttatcaacgaataacattgtcgaaagtgatcgttacgaagttcatcaatgtgatgttcgtgatgctgtgcagatttcatcgctctgccaaaagcttctgaaaacttctccaccagattatttcatcaatacagctggagtactgcatttggatgaacacgacacattgccagaagatgcatggttgcaaacctttgaagtcaatacctttgctccattttatttcttaaagcatttaagtccatattttcgtgaaaagagaaacggcaatattgtcatggtgtcgtcaaattctgcacatgtgcctcgcatgaagatggcagcctatggtgcatctaaagccgcgctgaccagttttagtaaaactgtggggttggaactcgctgaatatggcatccgcgtcaatattgtttcacctggttcaaccgcaacgcctatgcttcgccaactttggaaagatgcttccggcgaaaaacagaccattcacggcaatttagcgcagtacaaagttgggattcctctacagaaaattgccttaaccgaagacattgcccatgcagtgatgttcctcatcagtgatcaagcctcgcatatcaccatgcacgatttggtgattgatggtggcgcaactttaggtcaataa

SEQ ID NO: 46284 - DNA, 630 bp, Acinetobacter baumannii
atggcaattccaaaaattcaaagctatccgcttccgtttaaacaagattatccagcggcaaaagtgaaatggaaaattgaaaagaatcgtgcggctttattgatccacgatatgcaggattatttcattaatttttatggtgaagattctccattgattcaggaggtgattaacaatatcgcccaaatgaaagcatggtgtgtggaaaatcatattcctgtgttttacacggcacaacccgtaaaacaaaacgatgaagatcgtgccttattgaatgatatgtggggacctggtttaaccgcatatcctgagcaagctgaaattgttcagaaattagcgccaacacaacacgatgttgtactgaccaaatggcgctatagcgctttttatcattcaaatttgcaaaaccaattaaaagaaatgggaaaagatcagctgattatttgtggtgtctacgcccatattggtgtgcttcaaactgctgcagaggcgtttatgaatggtatccagccttttgtggtcggggattctgtagctgattttagtcttcaggatcatctatttgcattgcagtatgtccatcgtaacttgggggtcgttgaagatgctcaaagtgtgattgcttcataa

SEQ ID NO: 46285 - DNA, 1176 bp, Acinetobacter baumannii
atgaattatatgagtttagggtttgatggtacatctcatcgggcacaagaggatattgaagcatcctgtttcttgacccaaaattatcatctttatacatctgaaagagttgaaacaattagattagcagctgaaaatcagcaacaacttttggatacgattggtgctgcatttaagcatgttactcaagatcaggactcaaatccagttgtcattggcgcaataccatttgatacaactcagccgtcgatgttgcacttttatcgacaacatcaaaagcaaaatacagcatcattcactcagtttgaacatcaacaacagtttggttcattcaaactaaacagtcagaaaagactggtgtctaaacagcagtttgcaaatgcaattgatcaagcattaatacagtttgatcacaacaatttagagaaaattgtgctttctcaagctgttgacttcgaactctcgcatcaacaaagtccttatgatttagttcatacactggctgctcaaaatcaacatgcgtttagttttgttatacctgtagaagacaatgctcatctattaggggcgagtccagaattactcatttctaaacaaggtcatattgtcaaaagtaaccctttagcagggtctcggcctttaagtgaagatgatcggatcaaccaaaaaaacattgaagatttatatgcatcaacgaaggatttgcatgaacatcaaattgtcgtcgacagtgtatttaaaaacttaaaacctttttgtcaaaagttaagcgtttcagaacaacctgaaattttaaaaaccaccaccatgctgcatctgtctagcgtttttgaagggcagttgaaaaacgaacaaaccaacgcattagccttggcattgtctctccatcctacgcctgccatatgtggttcgccaacccagttatctaaacatttcatattggagtacgaaggttacgaccgaaactactttgcaggtttggtcgggtggatggatgcagatggtaatggtgaatgggctgtcaccattcgctgtggcttattgtctgaacgcaacctcagattatatgcaggcgcaggcatcgtaaagggttcggaagctgaactcgaatggaatgaaacagaagcaaaaatgcaaaccttactgaaaaccttgaatgcgacttgtgaaacttga

SEQ ID NO: 46286 - DNA, 927 bp, Acinetobacter baumannii
atgtctatttatattgattcacataaagctgtactcaaacaagttggtgatatatttttagatatgtattcacctctccccaaccatcatctcaatcaattcaatccgtctgacggagatggttatagtgaaatttatgatttcggtaagctctgcgtgggaaagggcaaatattgggtcgatcggccattaaagatgagtgctgagtcgccaagcaatgcttttggaatcaccatgttattgtcagggacacatcatattaagaatcaccgtagtaatcatgaataccagattcgctcacctatgattatcctaagaaaaggaagcctaggtttacagactatctatcttcaagaacacaaaaaaatggctttaattacattagattttaatgaaacttttctagaaattatgcaaactagttttcagcatcatgatttggcaaaatttttcttagcggatcccaatcctgcacttaaaaccatcaatattccgaataaaaatgtacttcatcaggcacattatttattaaatcttcctcctgcacagtcatctattgatttattgcatttagaaggggcagctttagagctgatgagtctgttattggatcaacatagcaagtcaaatcaaattcctgcccctattcataagagtattatgattttagagtcagaatttgaacaaaaaatcacaattcgaactttagctaagcgtgtcggtataaacgaatgtggtttaaaacgcctatttaaagaatatacaggaaaaacaattggtcattatttactggaaactcgcatgaaacatgctcaaatattattgaaagatggtgtttcagttgaaaatgtagctaatcaggttggttacagtagcgtacaatattttaagcaaatttttgaacagcattttggttatagttgctaa

SEQ ID NO: 46287 - DNA, 1818 bp, Acinetobacter baumannii
atgcttttggtaaaacttatgtggtcggatattgagtcaaatatagactttttaaactattctgaagcatcagaaattattatcaatgtacttcagaatcctcagatgctgcctatctcaataggcgtatttgggtcttggggaactggtaaatccactatcttaaatctaattaaaaacaatctagaacatattgaaaaccatgatgattatgtcattattagatttgatgcttggttatatcaggggtttgatgatgctagggcttcactattagaggtcatcaatactgaaatttctaaattagttaaacaagatgaaaaattatacgaaaaagcattaagtattggaaaaagaattaataaattgcgagctctaggttgggctgctgagggcacagctttagcttttggcgttcctacatttggtctactctcaaaagccattgattctattggcaatggaatcaatggcagtgctggggataaagatgcacagcacgtcactgaagctattaataaaggaaaagaaagcttaaaagatattcttaacgaggaaaaaagttcagcaccaaaagagattactgctttaaaaaatgaatttgaagatttattggaatctttaaacaaaaaagttattgtttttgttgacaatttagatcgatgccttccaaagcagacaattgagactcttgaatcattaagactatttctattcatgaagaatacagcttttgttatagctgctgatgaagaaatggtgagatttgctgtcaaagatcattttaatgggattgatgaaagacatataaccgactatctagataaacttattcagtttcctgtaaaagtacctcgtattagtacaagagaagtgcgagcttatttattcttattgtatgcatctatccatgaaaactatgcaacagaaacggctaaactagaaaatcttcgaaatggattggaatcgaatctgaggctttcttggaaagatgatccaattaaggttaaagatgcccttgccttattagatgaacaggcagttgatacacttaatctctctaacaacttttatgtctctgatcgtatagcacatcttctagctgagaataaatacattgagggtaatccacgaattgtaaaaagaatgcttaatgtcattagtatgcgtcaaatgattgctagcgctagaaaaatgcctaacgatattgggttaatcacaaaaatggctttattcgaaagatgttgtaattcaaaaagtgtctctcttttatacaatacaattaacagttcatcagatggtaaacctaaaatattagaagaattagaagaattaacaaatgatatagatacatttaaaagtaaattaccgaaggaatgggaagaacatcatgatttcttatttagttggtttagcctagaaccaaagctaaaaggtgtaaaccttagacctttagtatatttgagcaaagagactgtacctttaagaactataacaaaaggcttatctagtgatggtgaagctgcattaaaaactttattgaaagttacgaattcttcttctaaagcagcaattcaagctattgggaatattcctgtaggtgaagagtcattagttatgaacctaatattagatgaattaaataaacatactcattggggttcaaaaccaaatggcttcataggcgcatttttattagctagagaactagaagatactagacctcagtttatacatttcatgaacacggtcatggtggaaaaaactccatggtttagcttattgataagtaaagaaaaatggtttccaaaaaattaa

SEQ ID NO: 46288 - DNA, 762 bp, Acinetobacter baumannii
atgggaacatctacctcaagtaaagggccaggtagtaaatcaccattagtgccttcatgggctaataatgatggtcaaggcccaggtaacaatcaattagagcaacgtttcagaggatttcgagctaccttaggacaagccgctttagctaacgggggaaatacaaatactctaaagaaagctcttggtcattatgcaaagagcgctactggtggtaaatctaatggagctagacgatttagctctatggtgggagccggcggtagtttatttgataccttaaagtctttgcaatcaggttcagatactaagtttctaaatctttctaatttacaagggcaacctgtagatgtcgtaattgatcaaatcattgactctattatcgacattaacggagactcagagcgtattagagctgcaatgaatgaagctctagcagaggctttagatggattctcgactttcgatttttcaaaaattaccgatgatattattgtagatatgatgattaattatctcacccaatgtatttttgaacaaattattctagattcgaaaacagcattagataaagctgatacaccagaaaaagtagaaatgattgaatcaagcctattggaattaattaaaacgtcagttgatttgaattttggaatacatttagaaaacatcaatacacttaacaaacaagacattgaaacaatacaaaaaaatgcgatccaagatatttggagtgaatgggaggataacttaaatgattga

SEQ ID NO: 46289 - DNA, 1323 bp, Acinetobacter baumannii
atgattgagctctattttgatacagataacactcagttacctcctttatcagatagtttgattcctgttcatctatatggttccccagcacaaaatggtcaatatgcaagtattggtcgccctttattgaatgaaataaaaaggatcaaagaggatttagatgaaacagcattagattttttgactatagctatggccattaccgcagctgatacatttgttgagagaaacaaacaagctgaagatggatggtgtcgagaatttaagctttcaattccacttatcaatccaaatttatggcttccgcaaattgaattattgaaagaaattatgcactttttgagtggagacttgtggcattttcaatttaggacaggaagttttgtttggccagataagatcaaacgtggtcgtaaaatacctctagctgggcatgactctgcatgtcttttttcaggtggattagatagtgctattggcattattgatttaacctcgaaaaatattaaccctgtgttgatcagtcatgcttatgctagagataaatctaaacaagataatctatataatttattgggtttgaaaaattcgaaatttcaagttattgcatatccaagaaaggctggtgatattccaactgacgtacaaatgaggacaagaagttttaattttatagctttcggtgcattaatcagtaccgcaatcagccaacatcatcaagcaggtaaagtaacgaccttatatgtgccagaaaatggtttgatctctattaatccacctcttactcctcgccgaattggttctttaagcactagaacaactcatcctcattatatgaacctcttaaacgaattgtttaagcgagttcatttaccagtgtttttagaaaatccttaccagtttatgactaaaggtgagatgatgcaaaactgttcaaataagataattttgaagcagattgccaaagatacggtgtcttgtggtaagtggaaaagaacaggaattcagtgcggcaagtgtgttccatgtataataagaagagcctcgttcaattcagcagctatacctgatcaaacagtagattacgtttataaacacttggatttagtaataaaggatccagataatcgtgatgatcttatgtcaatgattctagctattagaaaattgaaaaaggtaagaaatcctaatatttggatctctaagtcaggagcattgcctactgatttacatatcagaaatcaaattttagatacagtggttcgaggatttaaagaagtcgaagactatttaaagtcacaatctttaggtgttaatatttga

SEQ ID NO: 46290 - DNA, 744 bp, Acinetobacter baumannii
ttgatttacccttacattgatttccattgccatttagatttatatgatgacccacatgctgtagctaaagcatgtggagattcaaaaagctatatattatctgtaacgacaacgcctaaagcgtggtttggcacggataaactaactagccatagtaaaagaatcaaaacagcattgggtttgcacccgcaactagctcatgaacgctatgaagaacttgagctatttgattcattagttaatcaaactagatacattggtgaaattggactagatggttcacccagctttcgaaatcatgcggaaatacaaaaaaagattttctcacatatattaaaaaaaactaatagtggatcagctaaaattttaacgatacacagtcttagagcaataaatcctgttatagaactcttaaatgaaaactttgataacggtataccagtgctccattggtttacaggtaatctttccgagttaagagaggctttgaaagctggatgttggttttcaataaatgagcgaatgttaaaaacagaaaaagggcgacaattagttaagcacattcctaaaaatatgatactaactgaaactgatggaccgtttattgtgaaatctggtactcctttattaccaggtcaggttcaagcagttattaatgaacttgcagatatatggggcgtcaatccaaatgaagctaccgctcagatttacgaaaattttaagtatcttctaacgaataaataa

SEQ ID NO: 46291 - DNA, 714 bp, Acinetobacter baumannii
atgcaaaacttagtttttccatcaggattatctatccaaagagcaaaaaaacgcgctaaagaacttgttaaaagtaagcaagcaaaaaaccaaactgatgcacttgatgcaatttctttaaaagaagtgaataagccatgggctctagcaatggctcagcttcaacaaaatctagactcatcaaattatttaatcacacgtattgatattgcaagagtcttagagcaagaacctttattaacagctaatggctttggtcatgctgatacttaccatgaatctttttataaaagacgcacttttcatgattcaaaagcagaatatattcagcattttcacgcaagccaagaaatattaagaaactcaattgatgaatgccaaaggtgctgtatgtacttacaacatttaaaaaagttaaagtccgtccgttataatttggggagttacgggttaaaacatagtgtcgaaagatatcatcgtaagttaaatcaattcaatgatgcgtatgtatctaatggtgcattaatttgtgctgcgattcatatgggtttttcgatcatgcgaaaagatcatttaagccctaatgcttggattttcgctagtgtacaatcagacataatagtatgggaaaggctacttgaagaacaaaaatctttccgtaacttcacacagcagagactttttgagaaagtgaaaaagaatattggactctga

SEQ ID NO: 46292 - DNA, 801 bp, Acinetobacter baumannii
atgaataacaataacagcccgattggaatgattgactctggtttaggcgggttgtctctctttaagcatattcgggaggcgctaccgaatgaagatattatctatttcgccgactcgaaatatgtcccttatggagacagagaaagcgactggattgtttcacgaaccacgcatttaatttcaaacctagttgctcaaggtaaatgcaaagcgatcgtgattgcttgtaacaccatgacggctgttgcggttgaaacgattagagcgcaaattaatgtgccacttattgcgatagaaccagcggtaaaacccgctgtggcaatgactgtgagcaagcatattgcggttttggcaactgccaccacggtgaagggcaaaaatttaaaaagtttaattgaaacgtatgcgcaagatattaaagtgtctttagtgccgtgtattggcttagccgaaaaaattgaaacgggcaaagcacataccgccgaagttaaagattatttaaaaaatattttggcgccgttggtcgagcaaaaagtcgatacgattattttaggatgcacacactatccatttgtttcagatacgattcaggaaattgtaggccgtgatattcaaattattgagccttcggaagctgtgacagcgcaattaatacggcagctcaatcaatatcatttaagttctgaaagtccaaatgaggggaatcatattatttggaccagttcagacccgttggaagttgcggatgttactttttctttgttatctgagaaattgtctgtaaaagctgtagagctataa

SEQ ID NO: 46293 - DNA, 1980 bp, Acinetobacter baumannii
atgagtcttgcaaagttaattaatgaattaaatgctcagcaaaaaaaagcagcgacgactacggctcaaaactgtctggttttggctggagcgggttgcggcaagacgaaaactattgttgctcgcgcagcttatttaattgatcaaggtttgcctgcaaatcaaattcagattttaacgttcacccgccgagctgcgagtgaaattgttgcaagggttgaacagcatgttggggcacaagccaaaggtcttcgtgcatccacttttcacaccttttgcatgtatttattgcgtcgtaatccgcaagcgtttggtttaacccaatttagtattattgatcgtgatgatcagttactcatgtttcgcttattgagaggcaaagacaaagataatgttttgcctaaagcggcagagctgtgtgatttatattcttatgcccgaaatacgcaatctaagctttctgaagcgttactcaagcaattacctgaagcatatgaatataaatcacaaattgctgagttaatgaaaacttatgaacaacgtaaaagagagcgtaattttttagactatgatgacattttgtcgatcgtcgctgttcatttacaaaactcggaagcactgacgaactgggttgctggtttctgccaagctttgttggttgatgagatgcaagataccaaccctttacagtgggcacttttgcagccactgattggtaaggtgaaattattttgtgtgggagatgacgcccagtcgatttacggtttccgtggggccgattttgaaaacattcattcttttaaagaacgtattccagatgcagtgattcataccttggatctgaattatcgctcgactcaagaaatattagatttatcaaattggttactctcccacagtccaatcgattatcaaaaacatttacaggctcatcgtggcaaaggacaaaagccacaactccatttgtttggtaatgaatttgaagaagccaactggattgcacaagacttaatagagcgacaccaacagggcgcaaattggtacgaccatatggtgttagtccgctcaggctatagcgcacgctatttggaaggagcatttattgccgctgaaattccgtatcgttttattggtggcgtaaagttacttgaatcagcgcatgtaaaggatgtgctcagtttattgcgtattgtgagtaacccgcaggatgacttggcttggatgcgctttttaaccttatgggatggaattggagatgtgggtgccagcaagttagcgcaagagttaatgagcattagtgaggtcgaagagcgttgtcagcgtttggagcgtcatggaaaagttcctttacaggccattttgattttgaaacagcttgatgtgctacagcagcatgttgaggcaagcattggtctagcacttgatgcattaagtgaacagttagagcaaaactataaaactaaagactggtcacgtcgagttagggattttgacttggttaaacaacttgcgcgtaaacatgcatctcttggagaatttcttgaagaatatgtgcttgaaccaatttcaatttctgaaattgaaaaagcgggtgatgatgatttagtgaccctaattacaattcactccgctaaaggtgcagaacagaaagtgtgttatgtaccacatgcctcaccaaaccaatatccctatgcgcgtgcacagggcgattttgatgaagtcgaagaagagcgcagagtattgtatgttgcattaacacgtgcggaaaatgaattgattttgacgaagcaaaatctcaatacatggtcacaagacacgtatgacgaacaaggccgcaaaatcgaaagctattttctaaatgatttacctgcccatttggttcaggcaaaaattcatcgtcaggtgccacagccattcgccaagaaacaatggaatacttcacgaacagtaaacttaggttttggtatcgatcttgactaa

SEQ ID NO: 46294 - DNA, 588 bp, Acinetobacter baumannii
atgacggggcaaccaatgtcaaaaagagaaacgattataacaacagcaatgaccctttttaatcagaaaagttatacctctattggggtagacaaaattattgctgaatctaaagttgcaaaaatgactttttataagtacttctcttctaaagaagttttaattgaagagtgtcttcgccgaagaattttagaagtccaaacttctttattagataaagttaatagtgcagatgacccattaaataaactaaaaagtatttttaattggtatatcgactggattaacactgaagattttagtggttgtttatttaaaaaagcaacgatagaagtcctgcagctctatccttctattaaaaaacaagtaaataaataccgtgaatggatttacagtttagttttatctatatttttagagttagaaattgaagatccaaaagtattaagcagtctttttcttaacattatagatgggcttattattgacgggactattaacaaaccagaaattaactctgaagaaacatggtcttatataaataaactcattgagcttgaaacaaaacaaaaatatgaagctgcttaa

SEQ ID NO: 46295 - DNA, 474 bp, Acinetobacter baumannii
ttgggcttgattatttcagtttcatcgtcttatttaagctggacgttatttgccactgaaattccatatttagctgcaaaaaatggtgctttcccgaaactatttttaaagaataaccaaaataatgtgccgatttcatcactatggctaactactattgtggtgcaaggttctttgattgccgtgtatttttttaataaaaactacactcagcttttattgatttcatcggtaatgattttgctaccttattttctggtatcggctttttatcttaaagaatctattcgccacaaacgcatgccacatattgccattgcaagtgtcgcttcaatctatgcactttggttgctctatgcagcaggtttagacttacttctgttgtctggtgtgttgtatttggtgggcttagttattttttcaatcagctactttgagcataaaaaatcgctcaaacaaaaccagcttaattaa

SEQ ID NO: 46296 - DNA, 1641 bp, Acinetobacter baumannii
atgaaaaagtttttgaaataccttctggtattaatcattcttattttaattgcgggtattgttttcttgtttagaccgattgcgtcaaaacaagtacaaactgcaaaagatgagccagttgttgatgctgttcttgttggcggcggtatcatgagtgccactctcggtacttatttcactgagcttgaaccgaattggcaaattcgtatgtttgagcgtcttgaccaagttgctcaagaaagttcaaacggctttaacaatgccggaacaggccactctggctttatggaaatgaactataccgaagagaaaaacggtaagatggaaattgccaaagctgaaaaagttgcttctcagtttgaagttgctaaacagttctggtcatatcaggtaaaacaaggcgttttagctgaaccaaaaacattcattaacccagttccacacattgctttcgtttggggcgataacgttaaattcttagaaaaacgttatgctgccatgattcaaagcccgcttttcaaaggcatgaaatttactgaagacccagctgtgattaaacaatgggcacctttagtcatgaccgatcgtgatccaactcaaaaagttgcagcgactcgtatggaagttggttctgacgtgaactatggttcaatcactaaacaattagtgaatcacctaaaccaaaaccctaacttcaaattacagacttcaactgaagtgactggcatcagccaaaatgatgacaaaacttggacggtgtctttcaaaaatttgaaaactggtaaaacagaccacgttaaaacgcgttttgtatttatcggtgcaggtggtgccgcggttaaattattgcaacttactggtttaccagaagcgaaacaatatgctggcttccctgtaggtggtgagttcttaattactgacaacccagcaattactgctcagcacacagcgaaagtatatggtcgtgcggaacttggtgcgcctccaatgtctgtaccacatattgatacacgttatatcgacggtaaaaaatatgtattgtttggaccatttgcaacgtattcaaacaagtttctaaaaaatggttctcaacttgacttacttgcatctaccaacaaaagcaatgttttaccaatgaccactgttggcttggaaaaccttgatcttgttaaatacttggtgagccaagtcatgatgtcagatgaagaccgtctcaatgaacttcgtaaatactacccagatgcgaaagctgaagactggcgtttaagccaaggtggtcaacgtgttcagatcatcaaaaaagaaccaggtaaacctgcaacgcttcaattcggtacagaaatctttgcgtctaaagacggtgctgtaactgcattgttaggtgcgtctccgggtgcttcgacttctccatacatcatgcttaacttgcttgaaaaagctttccctcagcaaactgaaggtaagtggaaccagaagcttcatgaaattgtggtttcttataaacaagacttaagcaaagaccctgtgttactcgacaaagttcgtcagtacacaagctctacgcttggcttgaactatacatctccgttcaaagctgcaaacgatgaaactgctgctgcccctgttgcaaaagcaaactaa

SEQ ID NO: 46297 - DNA, 1260 bp, Acinetobacter baumannii
atgacaatctttgctgctatatggtcgcatgtcttaaaattcgttttctattatccattattcatgtcgtatttatggatgattggcgcgatcattttctattggaaggaacgtaaagctccgccttatgatcagccagctccattagaaagctatcctaaagttgctgtgcttattccttgttttaatgaaggggataatgcagaggaaacgattactcatgctttaaaattggattatcctcattttgaagtgattgcgattaatgatggcagttcggataatacaggtgaagtgctggatcggttagctgaacaacatgaaaaactccgtgttgttcatcttgcacaaaaccaaggtaaagccatggggttgcaagctggaagcttaatgaccgatgccgagtttttaattggtattgatggtgatgctttacttgacccgcatgcagcaaagtggatggttcgtcattttcttcaaaatccgactgttgcagccgtgacgggtaacccgcgtatccgtacccgttcaactttattaggtcgtattcaggttggtgagttttcttcaattgtcggcatgattaaacgtgctcagcgtacttttgggcgcttatttaccgtatcgggtgtgattaccgcttttcgtaagagcgctgttcatcaagtggactattggtcacctaatatgttgactgaagacatcgatattacttggaaattgcaacgtgctggctgggacattcgttttgaaccgaatgccttggtttggattttaatgcctgaaactttaaacggattgtggaaacagcgtttacgttgggcaatgggtggagcacaggtattaattaaaaatattgatgtgttcaccaaaccaaaattgaactttttatggcctttaatgtttgagctttgcttaactttagtctggtcatatttaatgctggcgatggctttattgtgggtggtacattttattttaccggtccctgcattagccgttgtgagctctccatttttaccgtatggtagcggtattttattgggggcaacctgtctcattcagtttgctttaagcaaatggatggatagtcgttatgaaccgcatctaggaaaaaactatttctggatgatctggtatccattggtcttttggctaatcaccatctcggcaactattgtggcatttccaaaagtcttacgacgtggagatgagaaacgtgcgcgttgggtgagcccggatcggggcattcgtggatga

SEQ ID NO: 46298 - DNA, 948 bp, Acinetobacter baumannii
atgaagcctttatttgaacaacagagtagtatctccaccccgcagattcagccggctgtagcattatcttcatctccgactcgccttgctacagccggccaatttattgctgtcgtcattatttggtcgcttactcctctcgcagccgtctggacagtacaagaaattcactgggcatggggattatttattcgattcagtttggcaattccaattgccttgctgtgtctaaggttttttcgcttaaaactcatctttagtaaaaaagctgttttaagttattgtgcaggagctattggcttatttggttccatggctttttgctatatgggtgctgataaagttccctctgccattatttcaattatttacggtacttctccgttagtatctggactcatcagctcctttttattaggacgcgaacgtttttcaatgtggcaatggcttggactcgctattgctctggtcggaatgagttttactctaggcctgtcttcatcgggttttcagctcaaccgtatcgggattatgctagaactgattgcgatgctgttttatgtattgtcaacgtttgccgtaaaatctgtcggtgcccatattcacccaattatacaaatgacgggctctacccttgtctcatgggtaggttatgtatgcttgttgcctttcttttggtcacatcttccaattgaatttccaagcctgaaaatttttctagcagtcatctatagtgctgtattttcttctgtacttgccatgattttttattatcaactgatcaggaccctacaaccaacaactgtcctactcatcactattattaccccagttttagcaacattttggggaacatggtttaatcatgaacaccttagctcacatctcattttaggtttgacgatgttgtgtctaggactatttatgtattcacggcgccctatataa

SEQ ID NO: 46299 - DNA, 1293 bp, Acinetobacter baumannii
atgccaaatcagacatttactggaagtgaaccaacttgggctaatgcatgtgttggtgaaaatggctcacccaattacatccaatactcaaaaggttattccaaagctgcaaattttctcttgaacaatgttttgaatactcgtggcaaggaagttgacctatacatttaccctatatgcttcaatatgcgtcactctattgaactgagaattaaaggagctattcaggaaattaatgaattagcaaaaattaaaaacaaaaaactaccatcttttgatttagttgcctcgcatgatatcggcaatatatggaggtatttcaaagaaaattcaaagattttagatattcgttttaaaatagtgaacgacaaactagatccgactattttggacattgcagaaatagattctactggccaaacttttagatacccctttaataataagaacaaaaagcatttagttgatcaaaaagtcataaattgtggaattttaaaaattaaatttaatgagttagagaaaaatttagatgacttaatacaattaatcgaatcattaattgatgaatataaattagggacatttactacaaagttttctagaacacaaatttttcaatttgttaaagagctccctcctattaatcaatgggataaaagtgcttttatagaactaaaaaacaaattaaaagctaattacaatctttctaataatgactttagcaaaattattgatcaaataaagaataactatgaactaagccataaaatcggtttaaagaaaaatttaatttttctaagtgattgtgatgtcttagaaatatgtgatatttggattacctactttgagccaaaatttcgaaatctttataatcagacagatttaactttaggagataattcatcagacccaattgaagaatggattaaaaatgctgaattacataaaaaaggtatggctttattagagaaaaaattattagttgattatgtcgctgatcttcaagctttgtactatttatctatagaccagcaccaatacagtgaaaattatatattccgctttaaatacttccagaaggaagctaaatataatgagttatcagaatccttagatcatctattatcaaaatgtactttcttagaagaattattaaagggtttattttttcttaatcaaagagatttagctgaacaaattattcaaatttacggtttagaacctatttttgattttattcctcaagctagacttggaatcttttttaaacattttgaattattagattattaa

SEQ ID NO: 46300 - DNA, 1185 bp, Acinetobacter baumannii
atgaatcgatctctatttattatctttgcaactattgctttagatgctattggtatcggtcttatttttccgattcttcctttattattacaagatatgacgcatagcactcatatttctatatatatgggtatattggccagtctctatgcggccatgcaatttatcttctctcctttattaggtgcgttaagtgacagatgggggcgtagaccggtcttgcttatttcactggctgggtcagcagttaattatctctttctaactttttcacatagcctaattttattgctagtaggtcgcattattgctggaatcaccagtgccaacatggctgttgcaagtgcttatattgtcgatgttttgcacgaaaataaccgcgcaaaatattttggtttaatcaatgctatgtttggtgcaggcttcattattggccctgtattgggcggattcttgagtgaatatggattaagacttcctttctttgcggcagctatattgacagggcttaatcttttatctgcctattttgttttgcctgaatcccgaaaagtgactttggagaacaaacaattatctacattaaacccttttaaaatatttgctggtattagctctattcgtggtgtacttccacttattacgaccttttttatctttagtgccataggggaggtatatggagtctgctgggcattatggggacatgacacatttcagtggagcggtttctgggtaggtctttctctaggcgcatttggtctatgtcaaatgctggtacaggctcttattccgagtcatgcttcaagattgctgggtaatcgtaatgctgtgctggctggtattgcttgttcttgttttgctttagcagtaatggctttcgcccaaagtggttggatgatttttgctattatgcctatttttgcgctagggagtatggggacaccttcattacaagccttagcttctcaaatggtttctgctgaccagcaaggacagtttcagggagtgatagcatctacggtaagtatggcctctatgattgcccctatgtttttctccactctttattttcagtttcaggaaaaatggccgggagcaatttggttgagcgtgattttgatttacctgctcaccttaccgatcattttgtatagtacccgaccagtcgtacaacaaagatag

SEQ ID NO: 46301 - DNA, 903 bp, Acinetobacter baumannii
atggcaatttctcttgctgccgaaacccagcctccagcatttaagctctacttatgtattgctgtaaccgttttttgttggggctattcgcctattggtgtacatagtgctttgcattcatatacaccgcagcatatagccttgcttcgctttttaattgcttcattttttttattacttctggtcataaaaaaaggaattcagcctttaaagtggaaagatgttcctgcgcttgctgtattagggtttttctctgtaacgctgcatcatttgctgataaatacggggcagcaatatgtaactgctgtcgcatctagtattttgagccaatctattccgctatttacctttattatttcggttttgctttttaaagaacaaatcagttttaaaaagtggttgtgtattttgctagggctttgtggcgccgtgttagtgctcagcggagatcatggttttggtatgccgagcccttatagtttgttgattgttttagctgcaattgcatgggggctttattttaatttatataaaaaatttgccttaaattatgatgccttgagcatgatgtgctacatcatttggttcgggacccttcctttactattttatagtgctcatttacctagtgaaattttacatgccacttggcaagccaatatgtcggttatcttattgggtattttcccaagtgcgatggcttatgtactttggggatatgtacttaaaaatatgccgttaacgattgcatcgaattttttgtattgctcgcctattgtcgccatgagtttggcggtgattttcttaaatgaaaaaccatcaatgatggtgctgctgggtggagtgattattgtggggagtttggtatggatgaattgggggaataggcgtactatcgaataa

SEQ ID NO: 46302 - DNA, 705 bp, Acinetobacter baumannii; identical to SEQ ID NO: 8686

SEQ ID NO: 46303 - DNA, 705 bp, Acinetobacter baumannii; identical to SEQ ID NO: 8686

SEQ ID NO: 46304 - DNA, 654 bp, Acinetobacter baumannii
atgagtaataaaccaacaattatattagtacatggcttttggggaggcgctgctcactggagtaaagttattattgaactttcccatagaggttttacctcattacaagcagttgaattgcctttaacttcactagctgatgatgttgaacggacaaagaaaatgatagctcaggttgatggtgacgtaatattagttgggcactcttatggaggtgcggttattactgaagcgggtaatcttccaaatgtagttggcctcgtctatattgcagcgtttgctcctgatacaaatgagagtccaggggagattacgcaaaagcatctacctgtagctgcccctaatttatcaccagatagtgatggttacctttggcttaaagcagataaatttcatgaaagtttctgtcaagatttaacagaagatgaaggtctagttatgggagtaacacaaaaagctccgttagcaagcacctttggcgacaccattacctcaccagcttggaaaactaaaccttcgtggtatcaaatttctactcaggatcgaatgattagtcctgaaaatcaagaatttatgtcatctagattaaatgctaaaaatgtggcactgttgcaaatagtcggtggtgataaacttatcatccccttttgctga

SEQ ID NO: 46305 - DNA, 891 bp, Acinetobacter baumannii
atggatagtgaacaagatttaaataaattaactgatatattttttgatatttataaaaaagcaaaaatatcaggaaaaatttatcaagttgaaaattatcaaaataaaaatattgtttttctggataataatttttcttatatccatatatttcaaggaagtagttttaaaattaaaagtgatgaacaacaaataaatgaaactgtaaacggtggggatattatcgttattccttcgagatttaagcattctattgaaattatagaagataaagctataaaaccatctgtcattacatgtgtttttcaattaaacggtgtatatggacaaacaatcgctgaagggttgcctaaatatatattagttccctctgaccgaaatgggaaagttgctgaatggataccaatgacagtagcggcaataaaattagaacttgatcaaccttccttaggtagtcaggttatgctttcaagtgttatcgatttgcttttggtatggtcaataagattttggctaaataaagaaacattaaaccataaaagttggatttcagctttgcagaatcctgctattagcaaagctttattcttaatgcattctgatcctactaaagagtggaccgtagacattcttgccaaagaaactaatcaatctaaatcaaagttttcaaaaaatttcatagaattggtaggtactacaccaattaattatctcaaacattggcgaatgaagttagcgaatcaatatttaattgaaacgaataatagtatttcacaaatagctgatttagttggttattcttcaccagctgcctttaccagatcttttattcaaacttatggttatagcccaaaaaaatatagagaaatgtcggaaactaaagctaagtaa

SEQ ID NO: 46306 - DNA, 219 bp, Acinetobacter baumannii
atggaacttagagccgtaaaattacataaaatgtttagagattttcatgaagaaaaggaacatggctatgtaggggaatatgatgaaaaacagaaccttgtagcaatatataatacgtttaaagaaaaaatgcagaaaatagaaggaacttatcaatgggttttaccttcatcgggtgaggtattttttgttgaggaagatccgctctatgttcgttaa

SEQ ID NO: 46307 - DNA, 210 bp, Acinetobacter baumannii
atgtctaatacagcaatcggtacagtgaaatggtttaatgaaactaaaggttttggttttattcaacaagatacaggcccagacgtttttgcacattttaaagaaatcagtagctctggttttaaaaccttatatgaaggtcaacgtgttagttttaatatagctcaaggccaaaaaggtcctacagctactaatattattgcccaataa

SEQ ID NO: 46308 - DNA, 321 bp, Acinetobacter baumannii
atggatgctgaaatgaaaaaatattttgatgtggctgaaagtgtttacaataatattcactttaaaaatcagtcatctaaggatttaattgactgtctaaatagactgttaattgaaattaaaaaagaagcagctataaacaatttacaattaaaatatcctgttattgattttgaaagttgtttaaatcggccaatgaaagagcgtattgttaaaattgatttaagtcttctccctcattttgataatgaacatgaatttattctttggttggcgggttttgtgaaaagtatttctgtatctaggagttattatttttaa

SEQ ID NO: 46309 - DNA, 153 bp, Acinetobacter baumannii
atgtctgatttcaaagaattttcaaaaaaaaccacacaaaaccaaaatgattctaatgcgcaacctgatgaggataaaactgaaaaacctgtacaatcgcctgaagaagaaaataatcctacagaaaataataatgaagaaaaaaaggaataa

SEQ ID NO: 46310 - DNA, 264 bp, Acinetobacter baumannii
atgtgttatagtcaatttcgattaattattggcattaaaatggatatctgtattggcggtatacttgatgggaaaaaaagaaaagacgatcaaaatcatttcagagtagatagtcattattctgatcatggctctgaatataataaagagcattttcatctacatgggcaacttcatacattttggataagtgaagagattgatttttgcgatgcacaaagaagagttgaattaatattaaataaaagattagaacttgtttaa

SEQ ID NO: 46311 - DNA, 3189 bp, Acinetobacter baumannii
atgtcttcaaatagctttgaacaacatcaacttttccaagaagaaataatatttgatcaatttctctatacttattgggataaacatagtcgtcttggtcaaatccaagaattagcattacctgaaagaaaaaatactttcgccatctgttatcaagataaaagtacatatactttaaaaagtttaagtacaaatcttttatttaaggccaccttgaaaagaaatcaaggaatactaaaagttgaaaaaaatctacttattccattatttgaatttattactacatcctctgcaattaatatcaatgcaattaatgaaaatggagaaagattaagagcagctcaaattggtgctctatactcattaatagcacattggactctatctaaagagcctgcaacggtagtcttacctacaggcactggaaaaacggagactatgctattaacaacattagtcgaccaatctaaaagaacattagtaattgttcctactattgaattaaaagaacaactctttcaaaaatttagtagttggggaatccttaaagatctaggtgtgatacctcaaaattttcgaaatcctaaaattattgctttaaaagagactattaaatctgaagaagaagttgaatatttattaaatgcagaagttattatttctactccagctcttttagcaagaagcccatctgctataaaacataaattaaaaaacttttttagtcatgtatattttgatgaagcccatcatgtaacagcaaaagaatgggatatgttaaaacaattattctcagcttcaaaaattgtccaatttactgctacgccttatcgattagatagacacccgattcaaggaaaagttgtttacaattatcctttatcacaagctcttaatgataaatgtttttctaaaatttcattaatctcagtagatgaacgtcatccaagtaaaaaagattatgaaatagctcatactgctattaatcaattatataaagatcgccaaagaggtttttataaccataaagtcatggttagagcagagactagagaaaaagcagaagacttactaagcaaatatcgtatgtggtttcctgaagaaaaaataactcttgttcattctaaagtttcaggaaaaaaacaaataattgaatctattaaaaatcatgagtttgatattgttatatgcgtcgatatgttaaaggaaggttttgactatccgaatttcaaaatagcagcagttcatggtatgcataaatctatttcggtcttgctacaatttattggacgttttacacgcacgaaagacaatcttggtgatgcatcatttattgtgaattttgcagaagaaaaactcacaatggaattagagagtcttttccaagaaggaactgggtgggaaaacgtaattagccaaattgcagataccagaaaagaacaagctgcctccttactcgcctttttacaggaatgtaagcctttatccggttttgattctcctgatatagatttaaatcctaaaatcgtttttccggccctaagctttgtatgtttccacgcccaaaaagtagattggtataaatttagagaggcttttaatacaaaatactattctctttctcagccatttattaatgaagtggaaaatgttttttactttacgactcaatgtagagataaagtgaaatgggctaaatcagatcatattaaagatcaaatttggggtttagtcgttcttcatttcgataaatcaaaaaaattattgtatttaggttattcagataaattacttgatatagataatttagtacaaatcatttcactgggaactgcaaagaaaatagataaagatgatgttttcaaatcttttaatgatatcaaacgcctaagtatagttcatgcaggtgtgttcaaacctgctaatcacttgcatcgatattcaagattcagtggtgctgatgtcacaattgaattgagtaagattagagaaggtagtaaatgtaagaaatctgattttgtaggtataggttatcgtaatggaaaacctataagtattggagcttcagccaaaggaaaaatttggagtcctgcgaaaattgcagatttaaaagaatggaaagaatggtgtattcaaattggagctttaataactgatccgaatattaattcagatcaaattcttgaagactctgctaaaaagcaagatatcgttgaatttcctgaaaacatcaaaattttagccgctgattgggccgaagaattgtatgaaaaaattcatcgaattacgctcaagactgaccaacatgaatactgtctttatgaaactaaacttatcataaaaaatgtgagttctaaaaagattgatctcgctataaaaacagaaatagaaactttagacttttcaatagagctgacaggtggtgaaaatggttttaatattcaaaatctagataatgaaaaaatttgtatttcaaatttaaaaagagaagatatttctttaaagaaattctttgaaaactatccgccaacattatttctatcaaatagtgacacaattagtggctgtattcataccatttacaatactcaacctacttatagaattccttccgatcaaatccatattctagattgggaaaatgtacattttcctcatgaatcaatgtataagaatggggttataagagaaaattctgtccaagaatacataatgaaaaaatttgttaatgaaaatgcagatatagtgttcaatgatgataattcaggtgaagttgcagatgttgtagccatctattcaactgaagaagaaattatctttaaagtcacccactgtaaatactctaagcaagaatctggttcacgcctatcagatctttatgaagtgtgtggacaagtaatcgtatctcttagatataaatggaaaccagaagatctaattagccacttaaaaagaagaaataaaacgggtgtattagcaggtaaacgtttttataaaggtaatgaagctatactgaatactattcgtgatgaactaaaatataaaaacgttcgcttccttttctcaattgctcaaccaggtgttagttatagtgccttaaataatgaaatgacagatttgttaagttctacctactccgcagtggttgatatgacagaaacaaagcttctctgctatttcaatagttga

SEQ ID NO: 46312 - DNA, 249 bp, Acinetobacter baumannii
atgtcaaaaaattcaaaacaaacttctaataaagtcgctaaattagcttcagaagtattgcgagatccatcttcctcagcaattcagaaaaagttagctggatcagctttagcccaaacgcattcctctaaacaaacggggaatgaaatggaatcagaagcatctagagtattaaagagcgacaaatataatgacatgacaaagactttagctgcttcattagtatcgcagtctaataaagaaagataa

SEQ ID NO: 46313 - DNA, 435 bp, Acinetobacter baumannii; identical to SEQ ID NO: 26756

SEQ ID NO: 46314 - DNA, 291 bp, Acinetobacter baumannii
atgctattttacgtacgaaaagatgtgattttacctagccatttaactgagcaggaaattgaagatattaaagcaagagaacgtgcttactctcaagaaattcaaagacaaggtaaatgtcgccatttatggagaataacagggcagtacgcaaacattagtatttttgatgtcgaaagcaatgaagagctgcataacttattacaaggcttaccactttatccttacatgaaaattgaagtgatcgctttaaaccgacatccatcttctgtgagagaaggtgatttttaa

SEQ ID NO: 46315 - DNA, 1209 bp, Acinetobacter baumannii
atgaaaaacgcttatatcatcgatgctatccgtactccattcggccgttatgccggtggtcttgcacctgtccgtgccgatgaccttggcgctgtgccgattaaagccctcatgcagcgtaacccaagtgtagattgggaacaggtcgatgatgtgatctatggctgtgctaaccaggctggtgaagacaaccgtaatgtcggccgtatgtcagcacttcttgcaggtttaccgtatcaggtaccagcaaccaccattaaccgtttgtgtggttcatcactcgatgcgattgccattgctgcccgcgccattaaagccggcgaagcgaacttggtgattgcaggtggtgtggaaagcatgagccgtgcaccctatgtgatgggtaagtctgacagtgcttttggccgtagccagaagattgaagacaccactatgggctggcgtttcatcaacccaaaacttaaagaattttatggtgtagacaccatgccccagactgccgaaaacgtcgctgaacagttcaacgtcaatcgtgcagatcaggaccagtttgccttggtgagccaacaacgcaccgcaagcgcgcaagccaaaggctttttttctaaagaaatcgtggcagttgaaatccctcagcgtaagggtgatgctgttgtgattgataccgatgaacatccacgtgcatcaaccacacttgaagctttaagcaaacttaaacctgttgtaaaagcagatggcacagtcactgcgggtaatgcttcaggtattaatgatggtgcagccgctctactgattgcttctgatgaagcagttcaggcatacaacctaaaaccacgtgccaagatcattgcttcaacggctgtaggtgtagaaccacgcattatgggttttgctccggcaccagcgattaaaaaattacttaaacaagccaacctgactttagatcagatggatgtaattgaactgaatgaagcctttgctgcacaggctttggcagtgacccgtgatttaggtttgccagacaactctgacaaggtgaatccaaacggtggtgccattgctttaggtcatccacttggtgcatcaggtgcacgcttagtgactacagccctaaaccagcttgagcagacaggtggtcgttatgctttgtgttcaatgtgtattggtgtaggccaaggcatcgctttgattattgaacgtgttatttaa

SEQ ID NO: 46316 - DNA, 933 bp, Acinetobacter baumannii
atgaacaaaaccttagctattttatctacagcaatattattagccacagcaacagttacggaagcaaaacaaacaaatatttcgccagcaacacatacgactgctgcttctaaattaagcacagtgccttatgagatggtgaagtatggtgatgtctctattcaagcctacgtacaaggcaaggggccaaccatcgtgattatgtcgtcactaggacgttctgtacgtgactatgatgtagttgcgcaagatttagttaaacaaggctttagagtgattcgacctgaagttcgtggaattggtttaagccgtggtccaatggaaaaactgcatattcaagactatggaaatgacgtagcagcagtgatcgaacattttaaagctggtcctgcaattgtagttggtcatgcatggggcaatttcccaacccgtatggtcgcaacacaacgtccagatttggttaaaggtgtggtgttagcaggtgcttccgcaggtaaagtgcctgaagggtataaaggtaaaccaattggtcctgaaattcgtgaggcgattgataatgctggaaatgaagagcttccagaagctaagcgtattgaatatttaaaacgtgcattctttgcgccaatgaatgatccgcgcgtatggctaacaggttggcaccacgaagcacacgatgcacaaggttatgcgcgtaataacactcctgtagatgactattttgctgctggtaaagcacctattttagatattcaaccagaatacgacacagttgcgcctaaacctttaagaggtgttttaaaaggagccttaggtgatcgagtgaccatagtcgaaattaaaaatgcaggtcacgccttggttccagagcaaccgaaagctttagccgatgccattggtaaatttgctaaacaacaattcgcgaaaaaatcatag

SEQ ID NO: 46317 - DNA, 912 bp, Acinetobacter baumannii
atgaagaaatacttaactgcaattttatcgacatcgttgagcctgatgggttgctcaagtcttgatagagttgaatctaatatggatcaagcaaatttaatttcaaatttctctgttcataaaaagcagatccagcaaggtgatgtttcgatcgagttctatgtacaaggaatgggacctgtcattgtgttacttccttcgttaagtcgtggtgctagggactttgatgttgttgcagattatctcgcaaaatcgggctttaaagttatacgtcctgaacctagaggtattaatggcagtacaggacctttagagaatttaactctgcacgattttgctgctgacgttgctttagttttagatgcggaaaaaacaggttcagtggtcatcgttggtcatgcttgggggagtcagcctgcgcgtatgcttgctgctgacagaccagatctagttcgcggtattgtcatggctgctgcttcggcaggtaagttacctaaagattcaactgaaaagccttatgggcgtttacgagatgtgattgataacgcggggaattataagcttcctcaagaacaacggatcacatatctaaaacaagctttcttcgcacctatgaatgatccacatgtgtggttaaacggttggtatgaaaaaaaccatgctgctgaagcgcatgcacgaattgtgacgccaattgatgaatatttttcaggcggaaaaacggttccaatccttgatttacaaggagagtacgacgccgttgtcgtcaaaaatgtaatgaaagagtatttaccagaacgagttgttgagcaggtcatcaaaaatgcaggtcatgcgatggtgcctgaacaaccagaagcgatggcaaatgcgatagctcaattttccaaacaagtttattcagccaattag

SEQ ID NO: 46318 - DNA, 774 bp, Acinetobacter baumannii
atgagtttaaaaaaactagtctcaggaatgggcttatcaattgctatggtcgtgccaacgcatgcagcgcaattaaatgttattgcctctggatcttttcatggtgcgatggacacccttattcccatgtatgaaaaattaacggggaatacggttcatattgaatgggggccatctgccggaaaatctcctgaatcattgccaatgcggattaaaaataatgaaaaaatggacttggcgattattttggacgatgcacttaaatcgaatgaattgagtcaaaattttgacttgactagtcgcactgaattggcaaattcaaaaattggtttggctgtgagtaaaggtactaaagtaccgcagttaaaaaatgaagcagacctaaaggcggctttattgtctgctcaaaaagttgcctactctcaaggttcaagtggtgtttatattcgttcaaccttattcaaaaaattgaatattgaacaggaaatgcaagcaaaggggcttgaggttccgggtaaaaaattggtcggagaagtgttagctgatcatcaggctgatgtaggcatgcaacagattagtgagcttaaacatactaaagggattacctttgtcgcacctttacctgaaagtttgcaatacgttagtaaattctcatcagtgatttccaaaaaagctgaacatcctgaaatcgcagctcaatttgtacaatttttaaagtctaaacaagcagcaagtattttgaccaagagcggtttggaaccactgagtcagtga

SEQ ID NO: 46319 - DNA, 840 bp, Acinetobacter baumannii
atgtcatttaatttgccaaaaggttcatgggattgccattttcatatatatgggccttttgatcgctttccgttgcctgaagatgctgcatatcgccctgaaccagcaacttttaagcagatgcttgatttgcacaaaagtttaggaattgaacacggtgtttttgttcaagccgtcgcctatggttcggataacgccatcatcttggatgcgattgaacaaagtaactttaattatcggggtgttgctttagtagatcacgatattacagatgagcaacttgttgaattaaagcaaggcggtatttgtggtattcgctttaacatgatggggcatttgccgggaagccgtgatccgcaagcattacgtagcttggttgagcgagttgcaaagcttggattgcatattcagatacacggcaaaattgaagatatcttacctgcgattgaagcttggcaagacatagatgtcgatattgtgattgatcacatggcgcgacctaatttgcttgactcgcaagatgcagaaaacactttcaataagttgcaacacgtcatgttgaatccgaagcattggctaaaaatttccggaattgatcgtgcaatgaatggacaacctgccaacacttgggatgcttccctgaattgggttcagaagttaatcaagcttgctccaaaccgagtggtgtggggaaccgattggcctcatccaaatgtaaaaggtgaggttcctcatgatgatgagcttttaaagtttgcattaaaagcactcggtacgcccgaattaatacaagccgtatttgttgataaccctcgaaatttatatttcaaagaaaattaa

SEQ ID NO: 46320 - DNA, 819 bp, Acinetobacter baumannii
atgtttgatgaaattaatcctcaaggacgtttgcaagacaaagttgcaatcattacgggtgcaggttgtgttggtccggggtggggaaatggtcgcgcagcggcagtactttttgctaaagcaggagcaaaaatttttgctgtagatcgttcgattgatgccatgcaagaaactttaaatcgtattcaaaactttgagggtgaagtgacaccttttgcgtgtgatgtgactgacagcgaatcagttcaaaccatggttgaagcctgtgtagagaaatatggtcgtgtcgatattttagtaaataacgtagggggttctgccgctggtggagctgttgctttatctgaagaagcttggaacaaacagctcgacctaaatttaaaaagtgtgtttttaacttgtaagcacaccattccatatatggagcaacaaggcggtgggtcaattgtaaatacggcttcaacttctggaatccgttttacaggttccccgcaggttgcttatgcggcaagtaaagctgcgattattcaactatcaaaagtcacggccgtcgaatatgcccctaaaggaatacgcgtaaataccgtgctacctggtcaattgcataccccgatggttgaggtccgtttagcaggacaacgcacaggcggtgatgtggatcaattgctcgaaagccgtttaaagcgaattcccgcaggttttatgggagatggccgtgatacagcttttgctgctctgtttcttgcaagtgatgaagcacgttttattaccggaacagaaattgtggtcgatggcggaatgactgcacgttgtgattaa

SEQ ID NO: 46321 - DNA, 564 bp, Acinetobacter baumannii
atgcgtttaaaagcgatagacccagaacatttaactgctgaacaacaagttgtatttgatgcaattgcaagcggtccacgtaaaggtgtgcgaggtcctttagcgatctggttgcatcatccgaagttagccaatttggcacaaagtcttggtcaatattgtcgctatgacagttgcttggaaccacgtttgagtgagttagccatcttactgatgggtagacactggctcgctgaatatgaatgggctgctcataaaccatatgcaattgaggctggcctaagtacagacatcattgaagccattcgtttaggtgagcaacctgcatttattcataaggacgaacaattaatttatcagtttatttgtgagcttcacaaaaccaaaagggtttctgatcagacttatcaagaaatagagcaattacttgggacagatacattaatcgatttagtcgcgattgcaggctattacaccctgatttctatgacgattaatgttttcgaagttccaccaccagcaggtgtagctcctgaattaccaactccaaaagcaggaatttaa

SEQ ID NO: 46322 - DNA, 1323 bp, Acinetobacter baumannii
atgttaaaaaaactacatgtacaggtaattattgcaattattgctgccattattttgggtttggtctcccccgaatgggcaaaggcaatgaagccattaggtcaagcatttattgctttactcaaaatgcttttggctcctttgatctttcttaccttggttcatggtttaactcatattaaagatatgaaaaagctgggccgtttggggatcaaatcacttatttattttgaagtattaacaaccgtagcaatgctgattggctttgtatttgtcaatgtgttgcagcctggtttgggtttacatgcaaccgacttagccgaacctgatgcggcaaaaggttcagcaacactttcggcggttgatttcttcttaaatatgattccgcatacgatcgtagatgcttttgcgaccggaaacgtattgcaagtattggttgtttcgattttagcgggtatggctatcaatttatgttgtggcccagactctgtcattgttaaaggaattgatgaagcgcaaaccatcttgttcaagatgctgggctttattatgaaacttgctccgctcggtgcatttggcgcgatgtcggctgcaattggtagttatggcggtgaaacactcatttatttaatgaaattaattggtgttttctatgcagcgtgcttcttctttatggtgtttgcccttggtgcagtgacatggattattggtctaccttttctcaccattttaaaagtaattcgtgacgagatacttttggtattcggtacagcatctggtgaagttgcctttccaaaattaattgaaaaactcaaaaaaacgggttgtgacgaggcagttgtcgggttcgtattgcctacaggttatagctttaatttagatggcacagctttatatatggcaattgcggtgggctttattgcacaagcaactgacacacctttgagcttaatcgaccaactggttttattagcaatcttaagctttacctcgaaaggtggaactactgtcgctggtggtgcctttattaagttggcggcgaccttacagtctgtaaaaactttaccactcggtggtttgggactgttgtttggtgttgaccggattatggcaaccatcatggcaattaccaacattattggcaacacacttgcggtctatgcagtcgctcgttgggaaaatgctttcgatgctgatgcctttgaaaaacaaacaggtaagagacctaagcgtagtttgctacgggctaaagattctttggtagagacgccgttagcctctgattcaaatcactcaagtcaagttttagataaatctcattaa

SEQ ID NO: 46323 - DNA, 912 bp, Acinetobacter baumannii
atgaatgatattaatatcgcacaaatcgacttaaaccttttaaagtgctttgaagtcttatatgaagagcaaaatgcttcacgtgcagcggaacgtttaggaattactcagtctgcggtcagtgcatctttacgacgtcttagggatatttatcaagatccactttttcagcggactggtcgaggccttgctcccaccactaaagcgcatgctttaaaaccattagtcagcaatgctttaagtatttttagggaaacattgttgtcactacccaataatgacaataacttacagcaaagaattatcacgattggtatgtcagatgattttgaaattgcatttgcacaagaaattatcgaacaggttaaattaaaatttccccactacagaatcgtaattaaacagacctatacacatatcattgctgaaatgctggtaaagcataatgttgatattggagtaacctctggcggaatctattaccattctttgtaccgagaattaatggttttaggtgattattcttgtttggtgactcatcccgaagatgcggttgaactaaccttagataagtttttaagttttgaacatttactaatttcaaatacgggtcaaatcgggattgttgacgaacatttaacgaaattaaataaaaccagacggatttttgcctctacttctcactttgctgctattccatggttattaaaaagaaaaggaacggtttgcacccttcccacccacgctgcaagaaagatctctgaaattgtacctgccctgatttatacaaaatgtccaatttcgataccgacctatccaatggtactttcatgtcgaaaaacatcgctaaaagacaaagcgattttggatgtacaagaagtcattaggtcaattattaatagttataaatag

SEQ ID NO: 46324 - DNA, 555 bp, Acinetobacter baumannii
atgcgaaatgtagttctcccaacacgtgctttatacgttgtaaataaagcaattgatctgtttcaccaccgtgggttccaccttattggggtcgatagaatagtgagagaatcagagattacaaaagccactttttataattattttcactctaaagaaaggcttattgaaatctgcctgatggtgcaaaaagaaaagctccaagaacaagtggtcgcaatggtcgagtatgacttaagcactcccgaaatagataaactcaaaaagctttactttctacataccgatatagaagggccgtattacttattatttaaagccgtttttgagattaaaaatagttatcccaacgcttatcaaaccgcagtgcgctatagaacatggctaaaaaatgagatttatagccagcttagaacactaaaacccgatgtctcttttaccgatgccaaactatttttatatatggtggaaggcacaatcattcagcttttaagctcaggtggggtaagcgagcgagaaaaagtactggattgttttttggtaggctttatttaa

SEQ ID NO: 46325 - DNA, 4506 bp, Acinetobacter baumannii
atggcggaagtagaacagcagcccacttcggcacctagctctcctaagaagcgacgtattttgcgtagcttcttgctgacaatcttgatcatacttttattacttgttgcttccatcattattatgatgtcgactgaccgtggaagtcgttttttattagatcgtgttttacaagctcagcaagtcattaaatacgagtatgaggggggaaatttactcagggggattattcttaaaaatattattgttcagttaaaagaagttgacgttactttagatagagctgatgtccgtttagggtggcgttctttaatattagaaaaagaagtgcatttgagcaatgcagatgtccgtaacttagttattattaacaaagctccgccatcggataagccatttgagtttaaacccattaaattaccatttgtgcttcgtgtagatgttggagatgttgatcatttagaaattaaaaattcaggttctgtcgtaaatttccatgatgttcatctaaatgatgctttgtggtcagagacaaaactgaaatttgaaaattcaagtatggatatgggatatctttctgttcataacgcaacaggaaatatggactttagcggtaaatatccattgaatgcgactgcagatttaagaattccttctttaaaaagtttaaacatccaaaatattaaggtggcagcgcgaggtagtttagataccttgcaagccggtgtagcaacgacaacaccagatttattaacaggttgggttgttttacatcctgttcgtcatgaagtgcctatgcaaggtgcattgttactcaaaaattatcacttgcctttattggttgagcaaaaattatttgctaaaaacggtgtaattaaatttcagggtgatattaagcaactcaacttagcacttgagacagatttaaaaggggagaatttacctgaaggccagtacaacgccttaatgaatactgatctggttcatcagttgaatattactgattttaacggtcaggtcatgaagggtgcagttaatcttaaaggattagtgaactggaaagatcatgtcacttgggacatcaaaggtcgtctagatcatgttaatcctaaagacaaagctattcctcaggtcgttcaggatttcttgccgccaagtctagatgcagctgtttcttcaactggctctttggaaaaaggtacggaagtatttgccaatgtagactttgaccgctatgaatcttggaaacttaaactaaaccaagcacctgaaaagaataagaagccacaacctatgtttatgaatgtggcttgggcaaatatagatcgtgctatgccatatataggttggttaagtagtgatagtggtcaagttgatttgactttgcgagatggtcagcaagatattaaagtttcgacaaaagtatatcagcatgaacagaccttattaccggctggacaatatttagcaactttgaatgttaaagataatattcttaatgttcctagttttagttttgcggctcaaaagggtagcctcacaggtcaggccaaagtcttattaccaagtgaaaaacgtcagctggcatggaatgcattattaaatgcaaaagactttaatccacaaagtatacatacagcggcgcctgttaacttgctcaacggatcaattaaagccagcggttttgcaaagccaaatcaacaaattattcagcttgaaaaaattgatttaaaaggtcgcttggctcaagcaggtcaagaaatggttgcgctagctggaaaaagtacagcagctttattatttaatgatgttaaagctggtggcggttttaaaggctttgcggtcaattatgatggatctttaaaagcgcttaatcaagccaatggactattaaagttttctattgcaggtaccccagaatttatccgaattagtcagttacaacatgatggtgttgctgggaaaatctatgcgactggggcattaaatttaaaagaccgtattgcttgggatattaatagctcgttagtacgctttaaacctcaatattttgcctctagtgtaaaaggtgaaatttcaggaaatgtaaaaacacaaggcatttggtctgacaagttaaagcgtattgatattcaacaattgaaccttgcgggttatttgaataataagccagtcagaggtaaaggtaatttatccatacttatggattcgaaccaaaaaggctttttacctcagcaatttgaagcaaataatctatttttagtttatgcgcaaaaccagttgcaggcgactggtaatgcacagaatttaaaaattaagctgaatgcacctgcgctttatgagttgtatccgggtttaagtgggcgtgcatatggagacttgagtgtccaatctcaaccgcgtttgaaagctacggcgaatattgcggttgataattttgcatttaatacattagtcagtattaaaaaacttcgtattcagggtgaattgcctacttccgaaacaacaccaactcagttaacagcaaaattagacaatttacgtagtggtagccgtcaaattcagtctgctgaggtgaatttaacaggaacaagaaaagcacatttattaaaagtgcaaggaaataataatgtttctaaattctatgttcagttagcaggtggatttaatgcgaagaatgattggttagggcaaattcaaaaaggaagttttgattcacgccgaattcgtttagcacaaaatcaaaatgcaccagttgttttctcatcggcacgttctgaattatatgttgggcaacattgctggcaaagtacaaatagtcagttgtgtcttgaccagcctgtgcgtgtgagtaaagcacaaggtaatatttcatttgttactcagaatctagatttaggtgattttgctgcgttcatgccggaaggtctggctatgactggtcaacttaatggttatgctaaagcttcttgggtaaatggtgggcatcctaagcttgatgcacgcttagtgacaagaaaaggtgaactgggcttagcagcggaagacccgcaagatccaccgactactttggcttatgatgaactgagtgtaattgcgaaaagtatttcagaaggcttattgttccgtgtcgatgtaaaaacacctgatattggtacaggatatgcgaatgttattattaatccataccaatcatctatgccgatgcatggagaggtagcttttaacgatgtacagttaaaagtgttaaaaccattcattcaagatgtacgttcaatgagtggtaccttagccttagctggcaaagtgaatggtactttgacccagccacagtttacgggcgaaatgcgtttgaaaaacggggcgatcagtatgatttccctgccggttaatttaaccaatgtacaggtgtattcatctattcgtcaggacatggcaacaattgatggtgcattcaatagtggacaaggtgtagggttacttaaaggtagttttgactggaaaaatgcaccgcgtctacagttaaacttaaaaggtgataacttacttgtacgtcaagctccattaattacggccattgcaaatccgaatttgacacttgatatgtatccttttgataagcgtttaagcttgaaaggatcagtagatgttcctcgtgcacgtatttcaatgcctgaaacaactgcaccagtggttaacacctcttcagatgttcgtattgttcgccaaggtcaggacccacttgcaattttacgtgcggccaaaccgtgggatatccgtgcagatatctcagtaaatattggcaatcaagtcatcttccaaggctttaacagtaatattcctttagtggggcgtttgaatttaacccaacgcggttatgaaacggcaatgcgagcaatgggtgctattggtgtaagtcaaaaagtgaaaattgaggcctatggtcaaagcctggatttaaatcgtgcaattgcccgttttaatggcccattggcaaacccgacgttagatattgatgcgaataaaaatgttcagggtagtatggttggggttcgtgtcactggtactgcttcctcaccaaacattcaagtttataatgatgcaggcctttctgagcaagaggcattaaatgcactcgtgacagggcgtattaatgaaggtgcaagtggtttaagtaatgcagaaggctttaaatctgatgtgaacaatacaattgctgctgccggtattagtatgggcttgggtggtactcgtgctttaacgaatcaaattggacgtacttttggtttgagtggtcttgcattagatgctcaaggtacaggagatgatactcaagtaagtttaactgggtacattacacctgatttatttattcgttatggtgtgggtgtgtttactccagtcaataaactgacgttgcgttatcaaatgaaccgccgtttgtatttagaagcaagtcaatctttagaacgagcaatagatttattctacaattggcgcttctaa

SEQ ID NO: 46326 - DNA, 2640 bp, Acinetobacter baumannii
gtgctagaagcttaccgccaacacgttgctgaacgtgccgcactcggagtcccaccgaagccacttgatgatgctcaaactgctcaacttgttgagttattaaaaaacccaccggcaggtgaagaagcattcttggttgatttgcttgaaaaccgtgttcctgcaggtgttgaccaagcagcttacgtaaaagcagctttcttggcagcgattgcaaaaggcgaagcgacatctccgctagtttctaaagaacgtgcagtttatttactaggtacgatgcttggtggctataacgtagcgcctttagttgagcttctggatgatgctgaattaggtagcttagctgctgaagctttgaaaaaaacattacttgtatttgatgcgttccatgatgtagctgataaagctaaagctggcaatgcaaatgcaaaagctgttttacaatcttgggctgatgctgaatggttcactagtcgtaaagatgtaccagaagaaatcaaaatcactgtgttcaaagtaacaggtgaaacaaacactgatgacttgtctccagctcaagacgcatggagccgtccagacatcccattgcatgcaaatgcaatgttgaaaaatgagcgtgatggtatcaaccctgaaaaaccaggtgaagttggtccattaagccaaattaaagaactcattgctaaaggcaatcaagttgcttatgttggtgacgttgttggtacaggttcatctcgtaaatctgcaacaaactctgttctttggttctttggtgatgaaatcgctcacattccaaacaaaaaagacggtggtgtgtgcttaggcggtaaaatcgctccgatcttctttaacacaatggaagatgctggtgcattaccagtagagatcgatgtttctaacatgaacatgggtgacgaagttactcttaaaatcgatcatgctgctgcaaaagtaactgcgttcaaaaatggcgaacaaatcgctgagtctgaacttaaaactccagtacttttagatgaagtacgtgctggtggtcgtattaacttgatcattggtcgtggcttaactgctaaagcacgtgaagctttaggtttagctccatctacattattccgtactccagtacaaccagctgacactggcaaaggtttcactttagctcagaagatggttggtcgtgcatgtggtcttccagaaggccaaggtatccgtccaggtacttactgtgaacctaaaatgactacagttggttctcaagatacaactggtcctatgactcgtgatgagttaaaagacctagcttgcttgggcttctctgctgacttagtaatgcagtctttctgtcacactgctgcttatccaaagccagttgacgtacaaatgcaacatacacttccagacttcatcatgaaccgtggtggtgtatctttacgtccaggtgacggtattatccactcttggttaaaccgtatgcttcttccagatacagtaggtactggtggtgactcgcatactcgtttcccaattggtatttcattcccagcaggttctggtcttgtagctttcgctgctgcaactggtgtaatgccacttgatatgcctgaatcagttcttgttaagtttaaaggtaaaatgcagcctggtatcactttacgtgaccttgtacatgcgattccttactatgcaatcaaagaaggcgatcttactgttgagaaaaaaggtaagaaaaacatcttctctggtcgtatcttagaaatcgacttaacagaaatggaaactgacttaacagttgagcaagcattcgaactttctgatgcttctgctgaacgttcagctgctggttgtgcaatcacactttcagaagagaaagttgctgagtacttacgttctaacatcacaatgcttaagtggatgatttcacaaggctatggtgatgcacgtacgatggctcgccgtgttgaaaacatggaaaaatggttagcaaacccaagcttacttaaagctgatgctgatgctgaatacactaaagtgtatgaaattgacttgtcagaaatcaaagaacctatcctttgctgcccgaacgatccagatgatgcgaaacttctttctgacgttcaaggcgacaaaattgatgaagtattcatcggttcttgtatgactaacattggtcacttccgtgctgctggtcagttacttgagaaagtaccaagcggttcattaacaactcgtttatggttggctccaccaacacgtatggacgaacatcagttaatggaagaaggcttctataacacttatggccgtgctggtgcgcgtactgaaatgcctggttgttcattatgtatgggtaaccaagcacgtgttgcgccgaacacaactgttgtttcgacttctacacgtaacttccctaaccgtttaggccaaggttctaacgtttacttagcgtctgctgagcttgcatctgttgctgctgtacttggtaaattaccaactccagaagaataccaacaatatgcagctcaaattgacagtatgtctgctgacatctacaaatatttgaatttcgaccaaatgggcgaatatacaaatgctgctgataaagtagatactaagaaaattgctgctgctcagttgacttaa

SEQ ID NO: 46327 - DNA, 435 bp, Acinetobacter baumannii; identical to SEQ ID NO: 26756

SEQ ID NO: 46328 - DNA, 1011 bp, Acinetobacter baumannii
atgaaagctgtggcatatcaaaaagcggggcctattacattgccagaggcactcgtagatattgaactcgacactccagtagctaaaggacatgatttacttgttcgtgttcaagctgtatcagtaaatccagtcgataccaaaatacgtaaaaatgtaagtgctgaacaatctggctggaaagttcttggatgggatgctgtaggcacggtagaagcgattggcgataaagttactcaatttaaaattggtgatgtggtttggtatgcaggtgctttaaatcgccaaggcagtaatagtgaattgcaattagttgatgaacgtattgtcggtcataaaccaaaaactttagaagcgactgaagctgcagccctccctttaacagcaatcacagcttgggaaatgttatttgatcgtctacaagttccaaagactgcgcctgctaatacgactattttagtgattggtggagctggtggggtaggttcaattaccattcagcttcttaagcaattaactaacctcacgattattgctacagcttcacgccccgaaacaaaagaatgggtagaacaactaggtgctgattatgtattagaccaccgtcagcctttagctgcacaaattaaacaattaggattaagtgcacctttatatgtattctcaaccactgaaacagatcaacatttatcagatattgtagagttaattgctccacaaggtcattttggacttattgatgaccctgatcagttagatattaaaccgtttaaatctaagtctgtctcagttcactgggaatttatgtttacgcgctcaatgttccaaacggaagatatggaaaaacaaagtgcgctactaaatgaagtcagtaaactggtggatgaaggtaaaatcaaaacaactgtgactcaggttttaagcccaattaatgctgaaaacttaacacgggttcatgagcaaattgaaagtggttcaaccaaagggaaaatcgttttacacggattttaa

SEQ ID NO: 46329 - DNA, 627 bp, Acinetobacter baumannii
atgactatagaatatgatgaatttgattatgaacttagccgctactttagagaaacgtacaagtcagatagtagaatagcaaatgatattcttaatcttgttgatttgataggtattcaagatatacaactattacatgaatgtatgactaatatttatgaaaataaaataacccctcaagtggtaagtatttttgaaaagaatgaaaatgaaattatagaaaaaattagagatgcatctaagataaaaatggaagattacgcctatatttccttatccgatgcttatacgacgtatcaagtatgttcttatatttttaataaagaaacaccgccaacgaatgaagatgtaggctttgcaatggattcgtttgatagaatttataaagatatagggatagtttattctcatatagtaagtgaccttaatgtttttaacaaaatacaatcgttaggcggaagaactagagccaaaaaatatgatacttataaaagtgaaatttttagagaatgggagaaaggtgcatttcacagttattctaggtgtgcgagagatttttctagcaaatttgatttaaacccaaaaacaatagagctatggctatcaaaaaaatatagcaaatcttaa

SEQ ID NO: 46330 - DNA, 228 bp, Acinetobacter baumannii
atgggcttttttatgactattaaaccaatccgcgttcaattcaaaactgcttgtgaactactggatataagtcgtgaatcattgcgccacattcagcgcacagatgaaactttcccaaaagcaataaaaataggtactaccaaacaggctccagtctatttcgactatgccgagcttgtagagtggcataacaaccaaaaacaaagccttgcagctatggaggcataa

SEQ ID NO: 46331 - DNA, 210 bp, Acinetobacter baumannii
atgaaccatcaaactgtcatcctagattatctcaaacaaggcaagaccctaagccaagctgaagccatagagttatgcgattgttaccgcctaagtgctgttattcagcgtttacgcctattaggtcataacattgtgacccaccaagagccaaacctaaacagcaaaggcactcatgcccgatacgaattaaaagaggtgacagcatga

SEQ ID NO: 46332 - DNA, 555 bp, Acinetobacter baumannii
atgaacgccgtaacccatttcgattttaaatccagatccgttcgtattgtcctagatgataatcaagaaccgtggttttgtttaaccgatgtatgtaaggctttggacatttcaagatcatctgatttattacagattcaaaggggggacgttaaaaacgaaacccctaagcgaaatggtgcattagattcaaagggtgtggcggattaccacacccctacaaatggcggtattcaaaaactcaaatttattaatgagccgaatttatatcgcatcatctttcgatctaataaaaccgaagcgttgaatttccaaaattgggtatttgctgaggtattgccgtcaattagaaaaaccggttcatattctgctagacagtcagcttatgaagaattgaaccgtttatgtatgcaagagaaagtatctaaggataaaggtacatttcatagtttaggtatgcaccgccgtaaatatgaaaagcatttaaacgccaagcgtatccaaacatgcaaagcaaatttacagattgcttttgatgggttacaccatgaataa

SEQ ID NO: 46333 - DNA, 378 bp, Acinetobacter baumannii
atgggttacaccatgaataagtatgtaaaccctgaatttttcaaagcctttgaccattacaaagcaatgctggcccagtatggggaacatcaccccatcactgagcaggccctcattttgacaatgcactacacgcctgagcatatcaaagcggaaatgcaccaaaaggcaaaggaattaaatctattgccacccccaagcggttatacggatgacggcgaacccatgtaccagttagaggacattgcaaagcatttcggcattagctttgaagaagcagaacagtgtttattgcagatgatggataaccgccagcaagtcggattatcaaatgacggcgttttgattgattcgaatatccatatcaaccgtgtgtag

SEQ ID NO: 46334 - DNA, 303 bp, Acinetobacter baumannii
atgaaaaatgaatcattcaatattgccaccatgccaaagtatagttatattaatcgggctttgagcaaaatctcaaagttagctttggtcggctatattctacgaggcgcacagtccgcaaggactttttttgtgcgtaatatctctatgcgttcgcatattatggtgaagctggagagggacactttcgagtgtgcagggaaccttgtagacctgtcgaccaacccttttcagctttgccaccctcacttggtcgtgaatggtaaagctctaaaactacaaggagcgcattctcatgcctaa

SEQ ID NO: 46335 - DNA, 279 bp, Acinetobacter baumannii
atgaataaccaaaacgctaaaaacacgcctaaaacttatgatgcaggcgatttatgggacattcaatcattagctgaatttgatatgaactggatggaagtagcaatttcagatattaaaaaccgtttaaaagaaataaaagccgaacttggtggtaaggatgttttgggcttttatgctttggaaaatgtcattgatatgtaccagtatattgccgaaaaacgtcacagctatcatgcagagcaggcagagaaatataaaaaagaatggcatgggtaa

SEQ ID NO: 46336 - DNA, 2466 bp, Acinetobacter baumannii
atgaacattaaacccgcttggaataccaagcctgatatgtttgagggcagcatttcaaatattaccccgcaaacacaacaaagcccactggaggaagtgggcaatggtgcaagtcattcaataattgaagcacttgaagaacatacagtcccattatttaacaataatccactacacggtgcaatggctgaaatggtgggtggttgtcctgtagaaatccgccgttcagtgattgagaaagccacccaatatggagaagctgatgataatgccctatatggtttagccgtatttgatctatacaacgagcatttacagcctacaggtgcagtattcactaacccaactattaaaggttttaaggatattgttttcggccatggcggtttgtatttcaaccggtcaaagttgaatgaattacctttgattgtgacggatgacattcatcttgcatttaaaacagcgtatccaatctatgcaccgtatcaatcagataagattaatgcttataccctcaagacattgatgcaagcacatgctgatctatgtgtgatagccccagtccatcagcaagatgctatacaacggcgttacagtggtatggatgtcaaaatggcatttattcctgaacctccaaacattgctatgcttcaagatgagctagacagcatgattaaggtggcgatagatcaagccaagagcctggcaaaaggacacttagctaaaccatttaagatcaaggaaggcgaatatttaaatatccttatggatggcttatatctagtgaaggaacatgatgatggagaaggcggtattaaacgtactagaaccagaatatctgattcagcaattatattaggtgaagccagaagcttgaataataataactggaagcgtgtaattcagtttaatgataaagacaatgttcagcatacgttactcattccctatgagcatttcatgggtgaagcacaagaagcattaaagatcattgccaatcatggattaatgccaccacgacaaccaaataagaagaatgtatttattaactacattcaggactatccaatagaaaagcgttttcgatgtgttgaccgtaccggatggcatggtcattcatacgttacgccaagcaaaacatatggcgattctagcggagaagaacttttatttaatagtgaaatgaaaaacccctacgccgtgcatggcagccttgcaggatggcaagaactaagccgcttgatagagcctcatgcactgggtgtactggcgttttcttgtgcattttcgggacaattggttgcgccattaaacttagagagtggtggctttcatatctatggctcatctaccgatggaaaaagtaccattacaaaagcagcgtgtagcgtgtggggcaatcctagagaagtatcgaaacaatggcgcaccacagacaatgccctggagaacgaagccgaattaagaaacgatagctttctaaatcttgatgaattgcgacaggcgccccctaaggccgtgtcggatattgtttatatgcttactggtgggcaaggtaaatcacgaagcagcaagacaggcaaaaatagggattctaagcaattcaacttgatgtatacgtccactggggaagtcaccctcgaggaacatttacggcgtggcggtatcgagctagatgcaggtttattgcttaggttcgcccatatccctagtgatgcaggcaaaggatacggcgtatttgaatgtgtcaactatggcagcaattcaagcgacttgggcaaccgcattaatgagcttgctgcgaagcattacggacatgctggcatcaaatggcttgagtatctgaccagtgataaagatgtagtaatgcagcaggcccagaaattactagacagctttattgagcagcacacccaagcaaagaacggacaagctaaccgcgttttacgccgttttgcattggtggcggtggctggagagctggcaacgctggcaggcattacagagtggcagcaaggacgcgcatttgaagccgtagcgcaatgctttaatacttggctaaatagtctaggcggtggcgaaaatatggaagaaacaaagattcttgaacatatcaaagccttttttgaatccaacggaacgagccgttttgaagacttaactgtaatcagacaggcagacggcgaagtaattcgtccgcgcactcataaccgcgttgggtattacgatcctgatgataaagtctatcttgtatcgctgaccatgtttaaaaaggaaatgtgcataggcatgaacgaggcgaatgttaaaaaagtcttaatcaaacatggctggattaaagagtttatcgagggaggcaagaaactatatgtgaaaaagtctagcgtcaatctacccgacggcacacggccgagaatgatgcactttagcactgaggccatgcagaactcagatagtgaaatctga

SEQ ID NO: 46337 - DNA, 186 bp, Acinetobacter baumannii
atgccaaacgtaaacaaagtaactgtgatgggtgtattaggccgtgaccctgaaactaagaattttccctatggtggcagtattacgacattcagcgtggttacatcagagttttggaaggacaagaccactggagaacataagaacaaactgaatggcgcagaatcagcaacagcaaccgactaa

SEQ ID NO: 46338 - DNA, 873 bp, Acinetobacter baumannii
atgattaaaaattacactaagctatataaaatgtgtaatttagtgtgtaaaattgaatgctcaacttataataatcttggtcctattatgcacgattttcaaaagctctcgaatcatcctctggttcttgctttagcagagtttcgtttttcggctgtattggatattgaaaagcacattcctagttttcaagataaaatcagaaccattttccctttgactaatgagctgtctagccaagaagttcaagttaaccctaatggaattgaagtacgacaaaataaagaatgggcttttatttctaagaataaaaactctgctgttatgctcaataataaccgcctagtatttttaactagtgcttatgatcgattcgagggattcaatcaaaattgtaaacatgctcttgatgcattagcttcaactatttcaccagcattgcttatgaggattggattgcgttactcagatactattctcccaacagatgaaggacaggttatttccgagtttgtggattcatctatttgtacagcatcttatttgagtaactttggcactccagtaaggcatacaactgaaaatattgttaagacagagcaaggttttatggtaattcgctcaatgtctggagttgtaaacttaagactatggccagatttaaataatttacctattcctattaagcatgattctgaaccaactgatagaattttattggatttcgaccatttttgggagccagcggatgaagcagaagccccgacatttaatgtaaatgaaattttatctcaattagatagtatgcatgaaactagtagacgtgctttttggaatataaccacagaaaaaggaagaaaaatatggaaatga

SEQ ID NO: 46339 - DNA, 570 bp, Acinetobacter baumannii
atggaaatgaatatttctgttaaaacttgcttattcagtttgatagcaagtacagctgtcccatctttcgcatcatctaatgtagattatattcatgctgataaaatgggcattcaacaatcgagtggaagtacttcaatcaatagctattggttagagaataattttcggagtggttctattgaaataagcattgatagagctgtgcaggataatgctgtcttaaatacatatcccgatcatattgaaaaaattaaaaatatttttaacctcacagatgaagaattagctaaagtgctgaaagtttctcgtaaaacactatacaactggaaacaaaaaggctctgaatcaagttcggcaaaaagcagaaaacggatttttgatttttatattcttgctaaagactggaaggatttaaattatccctcaagtaagagtgcattggaaatctcaattttacaaggcagctcaattaaagacttactaattgcagaagactttgatagaaaaagagttttatatgctggcagtaaattaaatctgcaattaaatgatgatgttttaatttaa

SEQ ID NO: 46340 - DNA, 822 bp, Acinetobacter baumannii
atgcgctcttggatggaagaaaaaggatggttacaggggtgcataatttatggagaagatttagctattatcaataagctattaatggatccactgcctgaagatgctgtattagttgcagcatcccaatcatgtgatattgctaatctttcagagccatacattgagttttctataggtacagtaattcccaaaattgatggtaattttactttcaacaaaaacccgagaaaactgcatctaagttttgaacatgaattaaatggtaacatttcagaacttaaggttgagttaattgcatcaaaaaaaattcagattgaaaaagaatgtttaccaaagacatttgaacctaatcaaagctttgcactgacagcccataatattgggatttatgttgattggttagcatcaagatataaaagaccagctttaccaacacaatttgatagacgattcgatgatgcttggcgtaagaaaaaaagactaaaacagtccgaatctgtaagtgagtttttaataggtatttatattaaaatttatcctgaaatagagttaaaaacagaaccatatgatgtgcagttactagccttagttgttcctgatttggctagagagcaattttctcatatagaaaacttacttaaacaatatgtggagagtatgagagaggcaggctttattttagacactgagcaacctttcaggattacaactgaagcaaaaatttcagtagcgacactcaaacaatttaaacgttttaatttagatgagctctctcataaacatgagcacccattaccaagtgagtttcatcaaccataa

SEQ ID NO: 46341 - DNA, 2277 bp, Acinetobacter baumannii
atgacaaatacgaacttttctcaggttgctgcttttatttggtctgttgctgacctattacgaggagattttaagcagtcccaatatgggagagtaattttaccttttacattactacgtcgtttagaatgtgtgtttgagagtagtaaaaccagtgtcttagagacaaatgagaaagtgaaggcgatgcctttaccagaagaagcaaaagaaaaaatcttattaaaggcaacaaagggcctgtcattttttaatacctcagagcttgatttgagtagtttagggcaaaagaatattcgggcaaatctcggtaattacatccaacacttttcaaaagatgcgcgtgaaatctttgaacattttaagtttgatgaatttacgggtttattggatgatgcaaacttactttataaagtcattcagaaatttgcttcaaccgatttaagtccagaaaatatttctaatcatgatatgggcttagtatttgaagagcttattcgacgttttgctgaaagttcgaatgaaaccgcaggggagcactttactccacgtgatattgtacgactcaccactggcctcatttttagtcaagatgatgatgccttaaataaagagggtgtgattcgaacaatttatgacccaactgctgggacaggtggtttcttatcttcgggtacggaatatgtttatgagcataatcctgaagcagtgatgcgtgtttttggtcaggaacttaatccagagtcctatgctatttgtaaagcagatatgctaattaaaggacaagatgtccgtaatattaagctaggaaatacattatctaacgatcagctcacttatgaaaagtttgactatatgctgtcaaatccgccatttggtgtggactggaaaaagatcgaagatgaaattaaagatgagcacgaacaaaaaggctttaatggtcgttttggagctggtttaccccgtgtgtctgatggttcactgttattcttgatgcatttgattagcaagatgcgagatgtggatagcactggtcaaggcagccgaattggtatcatcttaaatggttcacctttgtttacagggagtgcaggcagtggtgaaagtgaaatccgccgttatattttagaagcggatttgcttgaagcgattatcgccttacctacagacatgttctataacacaggtattgcgacctatgtttgggtactcagtaataaaaaagatgctgaacgtaaaggcaaagtgcatttaattaatgcatcgaacctcagctcgaaaatgcgtaagtcacttggttcaaagcgtaactatctaacagaatcagaaattaggacaattacccaaaactacggagcgtttgaagcagtagatacactgactttagatggtgaaagtgaacagcaaaaaccattctcaagcaaaatttttaacagctatgagtttggctatcgccgtgtgaccattgaacgtccgttacgtttatcagcgcaattgtctgatgaccgaattgcaactttacgttttgcacctaagccatttaatgccgtgatgcaaaaagtctatgaaaactatggtaaagattggactgaaacaagctatgggcagttgagtgacgatactcaagttgaaattcgtgctctgattaaagctgaatttagcgaactgaaagaaaaagatattaaaactgtacttgagccaaaactctggcttgaacaacgggctttaatgcgtaaagcacaaagcttacaaaccaagatcggtacagcacagtttgatgattttaatatctttgatgagctacttaaacaggctttaaaagatggcaatattaaactcgaagcgaaagagaaaaagcagttcttggatgcggtaacttggaagaatgttgaagctgaacctgtaattaataaagtcattaaagcacaagaaaacccgctatacggtcagtttaattacaagggtaaagtggttgagtttgttcaggatggcgatttgcgtgatgcagaaaatattgcgcttgatccaagccaaagcaccaccgatttaattgagtcttattttaagcgtgaagtacaaccacatgtagctgacgcatggatcaatgctgataaacgtgatgcacaggatggcgagattggcatagtcggttatgagattccatttaaccgtcatttttatgtgtatgagccgccgcgtgatttggcggagattgatgcagacttggatgcggtgagccgtgaaattatggcacttcttcaagaggtgcattcataa

SEQ ID NO: 46342 - DNA, 1395 bp, Acinetobacter baumannii
atggtaaagtatcagaaatatactgaatataaagtttcgggtgttgaatggttgggggagattccgagtcattggagattatttgcattaaaaagatctgttgataaatgtactaatggattttggggtgctgagcctgatggaattaatgatctatgtgttttaagagttgcggactttaatcgagataactttgaaataaacctcgataaattaacttatagatcagtacttgctaaagaagcagagagtagacttcttaaaaagggtgacttgcttattgagaagtcaggagggggtgaaaaaactttagttggttgtgtagtccagttcgataaagattttcccgctattacatcaaactttgttgctaaaatgacgcctaatcgtaatatggatagtcgctttctgacctattcttttgctcacttgtatgcaggtcgggtgaattatcctgccattaaacaaacaacaggtattcaaaatttggattccgaggcatatttaatggagaatttttgctttccaccgagagtagaacaaactcaaattgctttgttcctcgaccatgaaaccgcaaaaattgacactctgattgccaaacaagaaaagctaattgaattgctgaaagaaaaacgccaagcggtgattagtcatgctgtaactaaaggtttaaacccgaatgtaccgatgaaagattcaggtgtggaatggttaggagaagtgcctgagcattggaaaataaaagagaataaatatcttttagattttataacaagtggttctcgtggatgggcgcaatattatgccgatacaggggcattattcttccgtatagctaatttaacaagagatactattgagcctaaattagactccttacagtttgttgaacaacctcaaggcagtgagggtgagcgatccaaaattaaaattggcgatttacttatttccattacggctgatttaggctctgtttgtgtagcaaattcatctattcaaaatggttatgttagtcaacatgttgcattatgcagaccacaaaaattatgtgaacctagatggttagcatattacatattatctgacactgctaaggagcaacttttaggttccggatatggtggaacaaaaattcagttgagtttagaagatatcagagaacttgttatagctgttcctcctaaaaaagagcaaatgcaaattgcaaattatattgatgaaaaattaagtcaatttgagtatcttataaaaaaagccgataagttagtaggtattttaaaagaacgccgtacagctcttatctccgcagccgttacaggtaaaatcgacgttcgcaactggcaaaatcctaataaaaataataatcaagataaaatggagttaagtgcatga

SEQ ID NO: 46343 - DNA, 3261 bp, Acinetobacter baumannii
atgagatcagatgcaactttagaaacgatttttcagaaagatattcttgaacaaatgcaaagccacggttggcaggtcggttcgccacaaggttacaaccgtgaaaaagccttatatgaacaagatgttttagactttgtgcaaaagactcaagccaaagaatggcaaaaatttaaaagtatatttccaaatgatactgaacgtcatttcttagacaccgtagtggcacagcttaaaaaagcggacattaacgccaccgatattgaatcccgcagttacgggactttgggcgtattgcgccatggactgaaaactcgtggtacacgtttttcattttgccagtttaaacctgaacatggtctaaacccacacttaaatgaaatttacaaacagaatatttgtcgtgttgtacctgaattagtatatagcccatatgccaacaaagccgaactcgaagcgacaggtaaacaagccaaaaaatggcgtatcgatttagtcctgtttattaatggctttccagtcgcaacgctagaactcaagtctgagtttaaacaagccgtgcaaaatgccatggcacaatataaaaaaacacgcctgcctaaagaccctgaaaccaacaagccagaaccattattaacctttaaacgtggtgcattggtgcattttgcggtgagccagtatgaagtctatatggcaacccatctgaatggtgacaatacttatttcttgccatttaacaaaggcaccaaagaacaaggtgcaggcaatgatgcacctgaagatgtgaatgaatatgccacaggttatttatggaatgaggttttaaccccagatagcttactgaatattattggtaactttattcacttacagattgaagaaaaagaagattgggaagggcgtaaatataaaaaagaaagcctgattttcccacgttatcaccaatggaaagtcgtgaccaaattagtcgaagactccttggcagaaggcacaggacaaaaatatctgatccagcacagtgcaggttccggtaaatctaattcaattgcatggaccgcacatcaactatctagcctatacgatgctaacaataaaaagatgttcgattcagtgattgtagtaactgaccgaacgattctcgatgcgcagttacaagatacgatttatcagtttgaacatgctgacggtgtggtcggacgaatcaacaataaagagggcgatggttccaaatctgagaaattggcaaaagcattggaaatggcgcagccaattattattgtgactattcaaactttccctttcgtacttgatgcaattgaaaatagtactagtttaaaagaacgcaaatatgctgtaattgctgatgaggcacattcttctcaaagtggtaagacatcagttgaactaaaaaaagtattaatgtctgatgaatttgatgaagataaatctacaaatgaaaaaatttcagaaacaatggcagctcgaattggtaattataatttaagttattatgcctttactgcaacgccaaaagataaaacgctacagctatttggacgtttgcccaatccaagtttaccaccatctaaaaccaataaacctgaagcttatcatgtctattcaatgcgccaagcaattgaggaaggctttattttggatgtcttaaaaaactatacaaactataaagtcatatataagttaaagcagaaaattgaagaaaaagacgatcaggtcgatgtaaaaaaagccaagattaaactaaatcaatgggtacgtttacatgaccataatatttctcaaaaagtacgtgtgatcattgagcattttaaaaagaatgtaatgggcctattgggtggccaagcaaaggcgatggtggtaacgagttcacgtaaagaagctgtacgctataagcaagcctttgataaatatgtggctgaacaaaattatgccaatattcaagcgatggtggcattttcaggtgaagtagaatttgctgaaaatgatgcggacagtcgtcatttacttgggcaaaaatttactgaaagcaatatgaatttgaacttgaaaggccgtgaaatgcgtaaggcatttgatagtgatgactttcaagtaatgattgtggcaaataagttccaaacaggttttgatcaaccaaaactttgtgcgatgtacgtcgataaaaaattaggtggcgtggaatgcgtacaaaccttatcacgcttaaatcgtatctatcctggtaaggcagagtccggcacatttgtactggatttctttaacgaaccgcaagatattttggatgcgttccaaccttattaccaaacagcagaactagcagacgtttctaatcctgatattgtctatgacttagctgaaaaacttaaagcagcacgtattttcttaatgaccgaagttgaacaatttgttgatgctttctatagcaaaaataaatccaatgctgcactcgccaatatctgtaaacctgcgatgcaacgttggcagcaaagctatacgaaagcaattaatgattatgatgtgacaaaaaatcgtttggaaattactaagcgaacaggcgaacccgttttaattgccaatgctgaaaatgaatttgccgaagcgaaaaaagcgcgtgatgcactcgaaatctttaaaaaggatttaggtagttttacgcgcttttatgagtttatgtcacagattgtagaatataatgataaagaacttgaaaaaatcagtttgtttgctcgtaacttacgaccgttattgcgtgagcaagcggctgatgaagatgtgattgatttaagtaatgttgctatgagtcattatcgactctctaagattcggcagcaggatatccaacttaaagccaatagtactgaacataaattagaaccagctaatgatttgggtacggcaaagccaaaaaataaaaatgaagaatttttatcagtcatcttgcagcgtgtaaatgaagtatttattactgataagctgacagatcaggacatgattaattatgtatatacggtagcagacaagatgtctgaaaacactaaaatgatgaagcaaattcaaaataatactcgtgaacaagcaatgttgggggagtttgatagtgctttagatgatgctgttttagatagtaatactgcacataatgaacaaactatgcagttgatgagcgatccctctaagatgcgccagtttgcgaatattatttatgatgtattagcaagcaaagagaataaatcggtaaattag

SEQ ID NO: 46344 - DNA, 2538 bp, Acinetobacter baumannii
atgaatagtaatgaactttatcaattatgggatgagtttttagagtcatggcctgtacagcgagtagaagcaatgacattagaagaatataccaaagctggtgatcctgattcatttatgaattgggttgagtttagaaccaaaccgcttgcaactatttcgggtacatcttcttttatatttggaatttatagtagaaaagatcaaacagctaaatcaaatacaaaaaataatatctatgaagatcaatatgcttggcgagttgcttatggtcgcaccaaggagagtgcttttcagcatgtaaagactcaaattttagctgtaattaaagcgattcagaataatgatcttcataaaatagaagaaatagatctaattaaaacagtgaagtggaaaatcgcgtttttgtatcaagatcgaaataacttaaaaattattccaacttttgctgagcaaagattacgttatttaactggtgtaggccttaaagataaagatttcaccatagagaaggcgtaccagcaattaataagcgagaaaggagatcaggacttatttgattttaatagtgctttgactcaaaaatatttggaagcaaatccaaaagataagtttaatacgcaaattgcatatgattatatgcatgaacgttatcctgaatttgaaaaaaatactgagtatttatttgttatagaaaataaatataactatgaattagctttagaaacaacaaattttgataaatctagtccacggctatttcttaaatgtataccacctaaatatataaaaggattacaagtaaattcaattcttaaaggaaaaagtcctaatagtaatttagagagtacaaaaacactcacaagagatgatgagttcgtacaagtgatagttacaaacatgcagcaacttgaggcactttgtaattggtgggatgaattaaatgaaagtaatcaagatagctcggaagcatcaaagctggaagtaagtcaaatggaagaaatagcacaacctttaaaccgtattttatttggtgccgctgggacagggaaaacttttaatacaatcaatcatgccctttctattattgaagataaatctttggaagaattggaaaaagaagagcgtaaagatctaaaaaacagatttgatgagtataagaataaaggacagattaagtttgtaactttccatcaaagctttagttatgaagatttcgtagaggggattcgagctgaaacggtagagtatagtgatggtaaaaaaaatattgaatatcctgtagtttcaggtgtatttaaattgttgtgtgacactgctcaatcaaaagtaattttagaaagtcaaaagatcaattttgattctaatacgaatgaaatatggaaaatgtctttaggtagggcaggtgaagatgaagatattttcgattactgtattaaaaaccattgtgtattacttggatggggagatgagctagacttttctaatgctgttaaccgtaaacaaattgaagaaatcatggataaaaatggttatgaagcttatcgaaaagaatatccctcagcttcaaggtttgttaatgacttcaagaataaaactaaagttggtgacttaattatcatttctgatggaaatcataaatttagagctatcggtgaaataaatgggaattacgaattattaactgatagtgaagatgcaccgagatatgttcaaaagaaatcagttaaatggcttaaattatttaaaccgagcctaaatgtagaacaactatttgacaaagttctatcgcagcaaacaatttataacttagcgaattcaataaatatttccaaacttaaaaaccttttagatagtcatcaaaaggaagataatgataaaaaattcgtgctgattattgacgaaattaacagaggtaatatttctcgtatatttggtgagctcattacattaattgaagagtcaaagcgtcagggggctaaagaacagctatcagttacattaccatattctaaatatgagcttacagttccaaataatctgtaccttattggtacgatgaattcttctgaccgctcattaacaggtttagatatcgcattacgtcgtcgttttaccttcattgaaatgccgccgaaaccagaattattggcaaaagtaacggttgatgaggttaatatccaaaaattattgactgttatcaatcaacgtattgaaatattgcttgatcgggatcattgcctaggtcacgctaatttcatgagcctagagcaacagccaactttagaaaatctctcaaacatttttaagcagaaagttattccacagcttcaagaatatttctttgatgattgggcaaagattaatttagttttaaatggtaatggaatgcttaagccaaagcctgtggatacatcagcaatattcccaaatgtagattctgaggaattagggtactttgaagataaaaaaatttgggaattggtgccgaattcatttaactctattgaaagtttcaaaaagattattcagtactaa

SEQ ID NO: 46345 - DNA, 1350 bp, Acinetobacter baumannii
atgcgacagtttacgtctcttcaggttgcgatattagcactcggaagtttatgcttttctacagcctatgctgattctactttagttccaatgtcagatgctgagctatcagctactcgtggtcaggcattaatgagtatgtcttatatcgcgcctaatgattcggcaaatctggaaaaattgcgtgatagtagtagtaatgtaggattttataaattaggtttagaggccgagttagaaattaatgccaatattcgtaagctccaactaggttgtgggggggtaaatggtgcaggcggctgtgatatagattttgataatgttagtttaagtggtgtagcagatacacgcgagggccgcgtagcaagcgatgcgaagctgacaaatccttttcttgaatttgccataaagaatccaaatagtgcttcgactcgtgaagtagctggtattcgcttgagtgctgaagcggttgaggggcttttaactattggtacagaaaactcagccacaccaaatggtattaatagtttaagtggttatatggtagtagcgccgcaagtaggtgaggcgactgttgatgctgcacgcatcacgcaaacgggtagccctgcttgtggtgtatatccatctcctgcgggttgtggtgttaatcaagcaattacaggtaaagctagaggcgagattgcattaggagctggattcaatcttgatttccagaccaagtcctatgatataacattgactcctacacaaaaagcacagttatcattaccacaatcagttgtatccggacaacggatgagcagtgtaaatttattagcctctgctatagttaatggtattgatttgtcgggtacactggcagcagatgtcgatatccttgggggaattacgttaaatggtaatcttcgtgggaccattaataatttgccggtaacagtaccattgttagaaaatttaggttatatccataaaattaatttgagtggtagcccattatcattatcgatgcagggacaggatatacgttggcctggaacagtatcaacagcaatgcgtggttggtggctagagttatcaaatccaatcgatattggtcgaattgacccgactaatagtgtagttattaaaacagatactattagagatgcacttactgaggtgagtaaagaattaacccagaatccattaaattgtggtttcttggctgtcaattgtattggtggtgattttaatgttgggacaagggatttatcaaatgcaagaccagcattattagaattacagaatttacaattagctaatcagtcttttgctccaaactgctatggaagtttaaagttttgctaa

SEQ ID NO: 46346 - DNA, 186 bp, Acinetobacter baumannii
atgagtgaattaattaaggttttggatggtggtgatttccgtgatcgttggaatgagctttgtatcaagctagaagattatgaaaacatcaattgtgataattacgaacaagagctccatgatttatttgaataccacagctttaaatttgatgaatcaaagcacgaatattgggaaatcgaataa

SEQ ID NO: 46347 - DNA, 303 bp, Acinetobacter baumannii
atgaaaatgaacgcaccaattaaacttgaaatgaaagtttatgcagttaataaagatgggcaacaagcaattgttactatgtcactctctcttggtcagtaccctacgcgttcaacgcttgaaaagatatttaaggatgctgaaggccacttgccagatgattttcgcgtgatgaataaatctgagttttttaacgcataccttcaagaagagtacgggacaactgaaaaattcgctacacctagttctcgtgaatttactgatgatgttattgaaatggatgaatcgggagctgagggatga

SEQ ID NO: 46348 - DNA, 381 bp, Acinetobacter baumannii
atgacagatttgaataaggaaagagagctagagcttttcaatgcttttgttgagaaaaatctaccagaactttttgaaaagcatagcaatggtaatttctttgcaaaagttacttatgactctatgtttggtgcttggttgggagccaaagctcaggcggtgccagagggctgggtaattgctccccaagaattgcctttggatatggctttaaaaattgcaaaagagcgaattttagaacagccaccagtaaaggaccctgttctgaatgagatcttggaaaaagcccacaaggaaaatattcaatctgaacaatgtcgcttaatgcgcgattacaaggaaatggttaaacggttaagcgaatcgggagctgaaaaatga

SEQ ID NO: 46349 - DNA, 264 bp, Acinetobacter baumannii
atgaaacaaatcgaattaaacacaattagcggtacttctgaccagatcgcagaagagatttttaagaaaattattgggcctatggttgatgaaatgaatagccaagataaagactcagcaaaggttttcacattctcagtaatgtggcttggtatggctttatatgctgctcaatttgaaccgcacaatgccaagaaaacaattcaattcagtgttgatcagttcatggcaacgtttgacaaattcagcaaaagaccgagctaa

SEQ ID NO: 46350 - DNA, 660 bp, Acinetobacter baumannii
atgaagctattccgatgctcaagccttcataagcttgtaggcgaccctaaaactaaaggctcagttcttagcgatacagctaagactgagattagaacaatcgttaaggaggacttgaccacgttcaagtctttcaaaggcaaccagtacacggctaaaggtaatgcgcttgaagaaatcgcaattagcctgtctggtaaggttcgttttcgtcaatacttaaaacatcaaggccgtttggaaaatgaactaatcactggtgaatgtgacattcttgacctaaataacaagttgatcatcgacactaaatgtacttgggatattggtactcatcccttctttcaagatgaagcagaagaaaaggcaaagaaagccggttatgactggcagatgcaaggctacatgtggctttacgactgtgaacaagcaatggttgatttctggctactcccttgccctgtcgagcttacaaatgattgggatgaccgagaacagctaattgatttagttgagcgtatcgatcttagagaacgtttaacaactgtcacctacaaacgtgacgaagcaatgatccagaagatcaaagacaaaattccacatgctcaagagtactacgcaaagttatatcaagagcgcattaaggcaaaggtggcagcatga

SEQ ID NO: 46351 - DNA, 939 bp, Acinetobacter baumannii
atgaatgcgccagtgcaacactcaggacagaacccttttgcagtagctgctcctactactcaagcaatgtctacagttcaatctgatagtcaacgtgcaattgcagaggttcaagcagctttagttattgctaaacagtttccacgcaatccaattgaagcttatgaccggattatgaacgcttgccagcgtccaggtttagctcaatcggctgtttattcttatgctcgtggtggtagttcggtaactggtccatcaattcgacttgcggaaatgcttgctcagaattgggggaatattcagtacggtatccgtgaattatcttctgaaaatggcgaatctacagttgaagcatttgcttgggatgttgaaacaaatacccgtcaaacaaaggtttttcaggttccacatattcgttatacacgcaatggatctaaaaaattaacagatccacgcgatatttatgaattggttgcaaacaatggtgcccgtcgtctacgtgcatgcatcttaggtgtaatacccggtgatgttattgatgatgcagttaatcagtgtgaaaagacaatccatgcaagtgctgatacttcaccagaagctgtacaaaaacttgttgttgcctttgagcaatttaacgtcaccaagaaagacattgaagattacattcagcgtcgtcttgatgctattacagcagccaatatcgttgcgcttcgcaagattttcactagcttacgtgatggcatgagttcacctaaagactggtttaaaaatgtcactgtgaaggaagttggagaagttcaggaagttaaaccaactgtaccagacaacgagttcccggttctcttagagcaaatcaaagccgatgcagttactaaagaatatgtattagaaggctatgcacttactaatgcacaaagagctgaggtaaatgcactatga

SEQ ID NO: 46352 - DNA, 228 bp, Acinetobacter baumannii
atgtctaaacgcgccctactccataagtcaaaactagaagatttcaagtcttggcttattgaaaaccaaattcagtatcgagatggcaaaggtgattttcaggttttacaggttgaagtaaaagacaggttttacccgatatacgacaggcttcaaggcgcccacttcacaacccaaagagaactcatccctttagttaaaagatacatcgcaagcgtaaagaattag

SEQ ID NO: 46353 - DNA, 387 bp, Acinetobacter baumannii
atgaatatgttagccaatatctcgtttgatgctgctgtattcacaagccttgaagtgatgaatgtaggtgttgaggatggcgttgttcagttctctttatcagtttttaacgcagagcacatctacatcgtggcaagtgtcaaaggaattgagaaaaacgacactttcgaatatggcgaaggcttggattaccaagactggaaagatgtggattacaccagaatgacagtcgattcatctagccgaccacatgtcgatgactttgattatgtggatgcagtcgaaggtatgccatttgcccttacttctactcaaatccttaagttgaatgagtatttagaagaactggcaagagaagaaaagattacagagttgagaggtgggtga

SEQ ID NO: 46354 - DNA, 756 bp, Acinetobacter baumannii
atggataactacaaaatcaaagttaaagatgaagctgagagcaaagaggctcaggagttgtttgaacaattaggttttaaatgggctggcgattatccagtagacggagattggtactcacacctatatgcagaaaactcaaattgctgttatttgtctccttatgtttggggaggattgggagatagatttaaagaactcaccctccctcagcttcaagaccttgttgtgttgaagcgtaatgatgtgaaggatgcgacacacaagaacttcagaacaaataccccatacctaaaacaaggtgagaatgaatactacatgtttaatggcgagtgggttttgtctaactgcccaaatgacctagagccaatcaccaaaccccaagacccagccttgattagcggtgcggaggcgaagcttgcatgggcaaatggtgaagctttgcagatcaataaaaaagatacccattttggctttattgatataagtaatgattactcattgggcgttttcgacaatgaggattatgaattccgtctcaaaccccaaaccatcaaggttgaacttgagctgccgaagccttttgagccgaaggacaatgattgggtttggactattagtggtgtgcaagacggtggaattactcaaatgttgcatagagatggcaatgattaccctcttggagcatggcgcaccgaagaagaagtaaagcaagtcgtagagcaactcagaaagatacgaggtactaactcatga

SEQ ID NO: 46355 - DNA, 201 bp, Acinetobacter baumannii
atgagtgagataagtatgaatcaaaaatcacaaactagtcaaattctatatcgtcatccaactaaggctgagcaggttccatctgtatttgcacagcatgttgctgacattaaagactgggcaaagttagttgctttgttctctccattcctgatgggtgcaattgtacttgcccttatcgttgcaaagaatgtggggtaa

SEQ ID NO: 46356 - DNA, 321 bp, Acinetobacter baumannii
atgagcagcgctaacagacatgaaacagttacagaagtaatcaatacacaattaaatcctagtttacaacctatttacgcagatcaagtttttcagattgcaatagaaaataatattgtgaaattaatgcttggtcataaagtaaatcaaaatactgctgtgcattctgccacagtagccttaccaatgtctggtttattatcacttattgacacattaaataatatttttgataatcccgacttccgaaataattatattcaagatgttgaaaaattaactcaagatcttaagcaaagatttaattcttcttcagaataa

SEQ ID NO: 46357 - DNA, 555 bp, Acinetobacter baumannii
atgacaaataaattatttttgttctcatgtgagcatgaagatatatccattgtaaaaatggagcaagttgcatcccatttagttggactgttacgtcatagtaatatgactcgttcagaaattgcattacaactaggctggaaaaaaagtcgagttacaaaagttttatctggagaagagaatctcactattaaaacaatttccaagatttctcggctattaggttatgattttgatgtaatttttcataataaaaattatgagagaccaaaacaaccttggcaaattgatcgtgaaagaaagaaagcccatttggttgaaaaatcacataggaataaaacaacttttctttttgatttacaaacaggtcaacaagtagttgaggatgttttatctggtaatgaaaaggaattttatataagcgtaaattcctcaagatataacaatggcaaaactataaatattgtagctcaagaagtgaatacattaccgaacactacttcatcctattttaatgttaaccaagaaataaaggtcggatatgagcagcgctaa

SEQ ID NO: 46358 - DNA, 414 bp, Acinetobacter baumannii
atgctttcatcatcaatggataaacgtgatgtatttctttaccgagatagggctgaattttcattacatagtaaacgagacaactgtgatgtattgcgattattcactcaattagcatctcgctgcgaaatgtgtgaacaaccaactgaactatttgatttctatgactcttctgagttgcatagagcatgtgtagttaaattagatgacaaagatgtaccagtatacagaattcgaaaagctagccttcgattatatttggtctttgttaatgcatacattgttttatttagattatcacctaagcgaaaagacaagattgataaatctgaaaagacaatcattgataaccgtgttagagccatctttaagtatcaagccgacatggaaacattcctggtgaggttgttatga

SEQ ID NO: 46359 - DNA, 765 bp, Acinetobacter baumannii
atgaatactcttgctgaacgacttaggtatgctatggaagttttgccacctaaaaagattaaaggtgttgagcttgctcgtgcagtaggagtcaagcctccttctgtaagtgattggctatccggaaaatccaaaacaatggaaggtgaaaatttattacgtgcttcaaaatttttgaatgttaatcctgcatggctagcatctggcacgggagagattcaatcaagcacgagagataaatttaaacaactggatatcgaagaattcaaaaagaaatacaacattagtgatagtgatgaagctcttttattttcaacaattatcgaaaaaccttttactccatcatctaaacgttgggttcctgtaaaggcgtactccaagatgggaatggatggttattttactgacatgggttatgaaggaaacgctggtgatggatatgttcctacccacactgcaggatctagagcatatgcagtaaaaggtacgggcgactctatgtttccagctatccgtaatggttggtatgtagtatgtgatccagatgcggaacttgtgccaacagagtttgttcaggtgtgtttaagggacggaaggtgcacaattaaggaatttgtaggaataaatggtggtgttctgagtttgttggccgttaatggtagcgaacgcctatcttttgatatggatgaggtcgaaagtattacggctataactgatattgttccgccaagtcagcatagacaggaacatcccaaagctaattaa

SEQ ID NO: 46360 - DNA, 321 bp, Acinetobacter baumannii
atgagcaaagtatcaaatgaattgcctgcaagcgctagcaataacgaatcgctcatattgcaagcactaaatactagcaaccaaagacaagtagccgagaaggtgggaatagatgcaagcaccttgtcgagaatgaaaaatgacaagaaaaacaatggattgacagagattgaatttattagctctctgttgacagccattggattgaaggtggtgccagaaagtgatgtgtattgctcacctgaaattgcagaagcaacgcgagtttatttagcacatgcattcacttcccctgaatacatgcggattttattcaaataa

SEQ ID NO: 46361 - DNA, 276 bp, Acinetobacter baumannii
atgaataaaactaatttatcaaatcaaacaaccgaacgcaaccagccagaatttttagtgggtgacgttgtagtacttactaaagagtgtcgaagttttaaatcaaatgatttgtttgaagtcaaaaataaaaccctgactagtttatggactatcaaatcacaaaatcatttgtttctggtttcatcaaaagaaatacgaacagcaacagttgctgaacttaacgccaaacgccgactaacaagcgctgagcaagcattagcggaggtgtcatga

SEQ ID NO: 46362 - DNA, 261 bp, Acinetobacter baumannii
atgttattcaaaaaattcgctgttgctgctgctgttgctgctactttagctttcgttggttgttctaagaaagaagaagctcctgctgctaacgctgcatctgaagctactgctgctgcatctgaagctactgctgctgcatctgaagctgctactgctgcttctcaagctgttgatgctgctgcatctgaagctgctgcttctactgctgccgcttctgcacctgccgcttctgaagctgctgcttctgctgcacactaa

SEQ ID NO: 46363 - DNA, 609 bp, Acinetobacter baumannii
atgatatataaaagattaatactaatatttatcgcattatgttccattgccacatatgcacaacaagatattgcaaaccaagaaaaaagttccgttaatttccctgtaatagagtttcccctgagtcagattcaacaggaattaaaacaattacagtccattgaaaatcaagagcatcccaagtattcagccttagctcaacaatggtctgaaactaactccatgattaacgattttatattttcaccgcttaataataaaacacaattaataaaagaaaattttgaattattacaaaagcaattgaataaaacaaaaaagcttaaacaagaacttaatgaaatgcgaattagtttattaaaagaagataatataaatctagcgcagttagacattaaaacagaacaaggcctatcattaaagaaactttatttagaacgcaatcaaatatgtatgcaatattttcagaacgaattaacaaatactgctttaaataccactaatatggacttaaaacaacaatgcatacaagctaattctagagtacaagagctgtctacaacactatctgaaaaatataatattcctgataataaaaaagaccgctaa

SEQ ID NO: 46364 - DNA, 201 bp, Acinetobacter baumannii
atgaaaaattataaaaaagcattattggcgttatctatacttgcgaccatgccattgtttgctgatagcacaaataaacggattgaggttacaacttttgctgacgaagatggtgaaaatccaaatgcgtgttcattacgtgaagcaattaaagtggcagctacacgtaaatcagactatggatgcactatttttagctaa

SEQ ID NO: 46365 - DNA, 885 bp, Acinetobacter baumannii
atgtccagtccaagccagaaatcccagcttcatgctttgggctttcttattcttgccatgttaagtgtccaaagtagcgcatccttagctaaagtcctgtttcagaactttcctgtactgactgtttctgcaatgcgtttatgtatcggggcatttattttggctttcatttttcagatctggaaaattaattttagtcaggtccgatggaaagctattttgagctatggctttgctcttgctggcatgaatgctcttttctatttatcgcttgaacgtttacccattggtattgcggttgcatttgaatttattggtccactcagtgtggccctttaccatgctaagcaaaaatatgattttgtctgggtcactttcgcaattattggtctcattttattatttccttttaaccaagcacatagtttggactggattggagtcctatttgcgatgagtgcaggtgcttgttgggccctatatattattgcggggcaaaagccttctggtatctcaggtaaccatacagtttgtttgggcatgactgtaggtgcttgtatacttttacctattacttttttctcaggctctattgggcaagttatagaattaccatactttttttattttattggtctcgccgttttagctagtgcacttccattctctttagaaatgttagctctacgcaatttaacacctttaagttttggaacattgatgagcctagagccagctgttgctgcactttccggttttatcttcttaggtgaatacctgttatggaatcaatggttggcactcgccactattattactgcttctgtgggttgtaccataaccacccaaagagcccgacaacaacgtgaaaaaacagtaggttaa

SEQ ID NO: 46366 - DNA, 630 bp, Acinetobacter baumannii
atgtcgggtctattgtttgtcgtttctgctgcatcaggaacgggcaaaacatctttggtgaaagccctacttgaccgtgtgagcaatttacatgtttcagtttcgcatactacccgaggtcaacgaccaggtgagttagatggtgttcactatcacttcacaacaaaagatgaatttttagaccaagtgaaccaaggtggatttatcgaatatgctgaagtatttggtaattactatggcacttcgcaagcaaccgtaaaacaacagttagctcaaggacatgatgtcttgcttgaaattgactggcaaggtgcagagcaagtacgcaagctgtttcctgaatctaaacagatctttattttaccacctactcaattcgatttacgtcagcgtttatctaaccgtggtacagactctgttgaagttattgaacaccgcttaagctgtgctgttgaagacatgcagcattatgtaaatttcgactatatcatcattaatgatgactttaataaagccctacatgagcttgaagccgtcattacagcaaatcgtttagtcttatctcaacaggcaaaaagacatcaaaatctaattcaagacttgattactccacaaccaaaacaggaataa

SEQ ID NO: 46367 - DNA, 279 bp, Acinetobacter baumannii; identical to SEQ ID NO: 43507

SEQ ID NO: 46368 - DNA, 2106 bp, Acinetobacter baumannii
atgccaggcgaagaggtcagccaagccaagcaacagctcaaattaattatcgacccttacttatcggtaagtgaagtcgaaaaagtgcttgctgcctgcgattttggagatctggcacacactggtattacccgtaaaagtggtgaaccttatattctgcatcctatcgcggttagctgtattttagcgaatatgcgcctggatcctgaaacattaatggctgcacttttacatgatgtcattgaagacactcaatatacaaaagacgatattattgagcgatttggacaaacagttgcagagcttgttgatggcgtaaccaaactaagccagtcgagtgataaagaatataataaagctgcttcttttagaaaaattctacaagctactttgcaagatccacgcgtcattattattaaactagctgatcgctaccacaatatgaccacattgggcgccttacgtcccgataaacgtgctcgtattgctcaagaaacctttgatattttcgtaccgatggcaagattagtcggcatgaatgaaatggccgataaccttgaaaatttatgttatcaaaatcttgatttagatatgtttgataacgttcaaaatgcgttgcttcaaaccaaaccagagcgatgtaaataccaaagtatctgggaacaaaatcttgcggagcttctccacaattatcatattcaaggtcgaattaaaaagaaaaataataatattgagctcttacgccatttcgtaaaaaatgaaatggatttacaagaacttactcatagccatgcctttgaaatcgttttgcaatccattgcagactgcgatcgtttagtagcagcattaaaagaaaattttcaagtcatccaatatcaagatcatatccgccggccattaccaggtggtaatcagtcattaatgatcaagcttaagggtgaaaaaaccaccttatcgctcactattcaaaccgagttgatgcgtaaagctgcacgtttcggtgtagtactcggcgaaaatgctccacaaacttgccgctctgccattcaagcttccatgcagaacctaaatacactcattgatggtgaatgcgctaaaacgacttttaatgacttacttgattatttgcatcaagaaaaaatttgggtttacacaccacacggccagttacatgagttaccacaaggtgccacagtagttgattttgcctattcagctagtcttttcttaggcaaccatgcggtaggtgcgaaagttgatggtgaaattaagccactttctacaccattagttagtgggcaggttattgagattattactgacgttttagcaacgccaaatccagattggctgagcttcattaacactcaaaaagctcgccgtgctttacagcacgtactcaaagaccaagatattgaagaacaacgtttagttggtgcccaagcactttcaagagctttaaaactctttaatcgttctattaacgacctttcagatgcagattggttagatcttttacaatggcgtcatattgataataaagatgcattatttgagcaaattgctgttggagatttacttcctcaacttgtagctaaccatttgtttgcaaatgacaagcatcctcgagcagaaaattcagatcggctaattcaaggaactgaaggcattgatgttaaatatgcccactgttgtaatcctattttaggcgatccaattcaaggccatttaacacgacgtggtttaattgtgcaccgtattcgttgtcataatttgcttcatgaacaacatttacacccagaaaacattatgccgcttcaatggaaagcagacgacgtagatgatgtacgttttactgcttaccttgcgatttatatggcaatgaatgatgaacaggtatcagacctcatctaccaatgtcgtaaaaataatgctggggtagaaatggtacattccaacgaacagcgtactttcgtcaatattgtagtaaacaaccgtaaacatattgcaaaagtcattcgtgatttacgaatgcactatggcttcccacgtattgagcgtctagacgcccctgctccacaaatggaaatttccaaagtcagctaa

SEQ ID NO: 46369 - DNA, 384 bp, Acinetobacter baumannii
atgtcccgtcaagtcattcatactgaaaatgcccctgctgccatcggcacatattctcaagccattttggtaggtaacacactatatttatcagggcaaattggtttagatccttacagtatggaacttgtagacggtattgaagctcaaatccgccgtgtttttgataacctcaaagcagtatgtgaagctgcaggcggcacacttgcagatattgcaaagctcaatatttttcttactgatttatctaatttccaactcgttaaccaaattatgggcgaatattttgctcaaccatacccagctcgtgctgcacttggtgtagcaagcctgcctaaaggggctttagttgaaatggatggaattgttattattaatcagtaa

SEQ ID NO: 46370 - DNA, 462 bp, Acinetobacter baumannii
atgaatgcacaaaaaggttttacattaatcgaacttatgatcgtggttgccattattggtattttggctgcgattgcgattcctgcttatcaaaattatgtagctcgttctcaggctacagctggatattctgaaattagtaacatgcgtacgggttacgacaccgaattaaatgatggtacagcgattacctctctttctcaagttggctttactgcgacttcatctggcgcatgttcagccataggtgttacaaattttggtaacgatggcgcagctactaacgctattacgtgtactttaaaaggaaatccaaaaatcgctggaaagattatttcactttcacgttcagcgaccggtgcatggacttgtagtacagatattgccactactgacgaattcttaccaaaaggatgtacgggtggtggaacaccagccgttggtgcaattactactttgtaa

SEQ ID NO: 46371 - DNA, 1002 bp, Acinetobacter baumannii
atgaaaagaatagcaataattgcagtcgctacatatatggggttggcagtaagtgctgtgcaggcggcgactacatttttaaatgtttcttatgacccaactcgtgagttttatcaggaatataatcaggcatttggtaagttctggaaacaacgtaccgggcaggacgtggattttaaacaatcccatggaggctcaggtaaacaggcacgcgctgtagcaactggtcttgaggcagatgtggtgaccttagccttagccaatgatattgatgaaattgtaaaagcaggctttatccagccaaactggcaaaaagaattccctaataattctgcaccgtatacctctacagttgtgtttttagtaagaaaaggcaatccaaaaaatattcgtgattggaatgatttaaccaaacctggtgttgaaattattacacctaatccgaaaacgggtggagcaccgcgttggatttatctttctgcatggggatatgctttaaagcagccgggtggaaatgacgctaaagccaaagagctggttaaaaaactttatcacaacgttaaggtgttagattcgggagcgcgaggctcgcttactacatttgctgagcgtggaattggagatgttctactttcttgggagaacgaagcactattggcaacgaaaggtctcgataaagataaatatgaaattgtttacccatcaatttcaattttggcagaaccatctgttgccattgttgacaaaacagtcgacaaagacggtaaccgtactttggcaaaaggttatctcaactttttatactcacctttaggtcaagagttggctgctaaacactatttccgtcctcgtaatcctcaagttgctgctaaatatgcagcacaattcccaaaaattaaattatttacgatcaatgatgtttttggtggttgggcaaaagctcagaaaacccattttgccaatggagctatctttgatcagatttatgatgtaaagcagtag

SEQ ID NO: 46372 - DNA, 300 bp, Acinetobacter baumannii
atgaaaattcattatggaaaagctttaagcttgggtttggtgcttagttttgcatcgcaactgtctacagcagccgtactgaaagatacaccaagtaaaagtctttcagataaacagtcttcacttattgaaaaagctttagatcagcaaaaacgtaacactattgtacttccatcaacagatgatgagttaaaagtacttaatactatccgtgttacaccaactcaaaactttcttgcagcacagcatgaacgtttttcacgttttgttcaggcaatcttccagccgcacacttcttaa

SEQ ID NO: 46373 - DNA, 1509 bp, Acinetobacter baumannii
atgaaagttcgtactcgtattgcaccgtctcctaccggtttcccacatgttggtactgcctacatcgccctattcaatatgtgttttgcgaaacagcatggcggggaatttattttaagaattgaagatacagaccagcttcgctctacgccagaatctgaaaaaatgattttagactctctacgctggttaggcttaaattggtctgaaggtccggatgtaggtggtcctcatgctccttaccgccaatcagagcgtatgggaatttataagcaatacgcgttagaacttgttgaaaaaggtcatgctttttattgttttgctacagcagaagaacttgaccaaatgcgtgccgagcagcaagctcgtggcgaaacaccaaaatacgatggtcgtggtttaaagctgtctcaagaagaagtagctcgacgtcttgaagcgggtgaacctcatgttatccgtatgaaagtgcctgaagaaggcgtgtgtaaatttaacgacttactccgtggtgaagttgaaattccttgggcacaagtcgatatgcaagtgcttcttaaaacagatggtttaccaacctaccatttagctaacgttgttgatgaccatttaatggaaatcactcatgtattgcgtggagaagaatggcttccatctgcaccgaagcatcaattgctttaccaatactttggttgggaaatgccaacgctttgccatatgccgttgcttcgtaatccagataaatcgaagttatctaaacgtaaaaatccgacctcaattaactactaccgtgatatcggcgttttaccagaagccttactcaactatttaggccgtatgggttggtcaatgccggatgaaagagaagttttcacattacaagacatgatggataactttgatattcaacgcgtatcactaggtggaccaatttttgacgttgaaaaactcaattggttaaatggtcaatggattaaagggttaaccccaggacaactattagaccgtttattgacatggaaaagtgatcgcagcactttagaagacattgctgccgctattcaaccacgtattaatttactttctgaagctgtaaattgggctggtttctactttaaccatatgccacaaattacggctgaaatgtttgaaagtaaaaaattgactcaagagcaagttcgtcaaagtttacaattcgcaatttggcgtcttgaaagtcagtttacttggaataacgacacagttagtcaaactttaatggatttggcaaatcagatgggcattaaattacgtgacttcatgccaacgttctttattgcaattgctggctcaacaagttcaacaccagttatgcagtcgatggttacgcttggccctgacttaacctttgctcgcttacgacatgcgctagaaattgtaggtgcaccgagtaaaaaagaggtaaaaaactgggaaaagcttaatgaaagtttaaaattgccgaaaaatgaagcaactagcgaagcttaa

SEQ ID NO: 46374 - DNA, 708 bp, Acinetobacter baumannii
atgaatattgttttactagagcctgaagatgttcaatcggatacatggtctatccattcaaaacgtcaattacagcatttgcgtgaacatcttgatattacagtcggccagaacctaaaagttggtattcgcaacggcgcccgttatatcactgaaattgtttcgatgaatgagtacgaagtctgtatacggcctattcgtgaagaaccactaccagcaaaacttccggttcatttaattgtagctttaccaagacctaaagttttacgccgtctaattatggacagtgtgactttaggtgttgaaaggataagcctgattcatagttatcgtgttgataaaagctattggcaaacaccttttttacagcaagtagacaactacgttacgctgggacttgagcaagcaggcgatacaattgttcctgaaattcaactttataaacgttttaaaccttttgttgaagacatcttgccaagtttaattacgcaggaaacacctgcctatgtggctcatccttatgctgagcagcgtatgccaattaatattagctatgcttgtagtgtagtggtcgggccggaagggggatttattccttacgaagtagatttgctcataaaaaacggctgccaagctatgagcttaggcaaccgtattttaagaaccgaaacgtctatttcttatattttaggtcgtttgtttagctga

SEQ ID NO: 46375 - DNA, 150 bp, Acinetobacter baumannii
atgaatatacctaatgttttaaaatattatttcacagaaacatttcttaaaacagcaattcgtaaaccaagtcagttgaatttacctccaactgctctgcgccctatgcttgaacaactttgccgagcatttccaaaacaaaaaatgtaa

SEQ ID NO: 46376 - DNA, 1344 bp, Acinetobacter baumannii
atgccgagcttaacaccgttacatgaaacttattgtaaatgggatcgtacgccacctagtcaggccgacgtactagaaggtttagctcaactgttcagtaccagcttaaatggtgtacatgaattaatacaagtcattaatattgaagtattaaaaaatgcttttggtattagcgcccaaaatgctaaaaatttccaaaaacggcccgctgtccaaaaggcatatcaattttcttatggtgccttacaaaaatatggtagttgttttttagcaccagggttacgtcgtattattgaaaaatttccaacccttcatgagaagccattaacaccaacccttcattttttagtaggagtgttaaatggtattttcggagactatctacttaaacagcacagtcccctcgccttgccaatggttctatacgaccactacggtgcaattcaacaaggcgaacttgcaggccgtattgtaattttggttcatggtttgtgcatgaatcatcttacttggtcaaatgcgcattatggcgggattggtgagcgtctgttagcacagcgtgatcacaacacgatgctgtatttaaattacaatacaggccgccgtatttcagccaatggccgcagtttctcaaatttattagaagatttagtacagcgtaatccaagaattaccagcattgatttaattggtcatagcatgggtggattagtttcccgtagcgcactgttttacggtaaacaaaatatgtaccaatggattcatatggtcgaaaacctcgtctgtattggatctccccaccacggtgcagtgcttgagcgttttggatttgcactacaagatcggctaggcgcttttccatttgttggcctaattggtcagctggttaacatccgtagtaatgggattttagacctacgccatggtagtgttcgagatgatgactgggaatacatggatgcccgtattggtatgatggatgacaaccgtgctccggctcctctaccttcccatatcaatacctttttagtggcaggaacactcgagtttgaaaaagtgcgtaataaagcgcttaccgtgattggcgattacttagtgagtgtaaaaagcgcactaggtgaacatcctaatccacgttttcagcttaaagttccagactcacataaagcggtgttttatggcttaaatcactttgaaattcagtatcactcaagtgttgccgaacagattactcgctggttatatcctcatgtgaatgattatgtgcaagacggtattcaaacccatattattgatatgccgaactattcgctcgaagatttagaaggaattgtagagacgtaa

SEQ ID NO: 46377 - DNA, 1071 bp, Acinetobacter baumannii
atgaaagtgcaacaatatcgtttagatgaattagctcaccttgttaaaggtgagctaattggtgaaggtagtcttcaattttcaaacttggcgagtttggaaaatgcagaggttaaccatcttacttttgtgaatggtgagaaacatctcgatcaagctaaagtaagccgtgcgggtgcttacattgttactgcagctttaaaagagcatcttcctgaaaaagataattttattattgttgataatccctatcttgcgtttgcaatccttacccatgtatttgataaaaagattagctcaacaggcatagaaagcactgcccaaattcatccatctgctgttatttccgaaactgcttatattggtcactatgtggttattggtgagaattgtgtagttggcgataataccgtcattcagtcacataccaaacttgatgataatgtagaagttggaaaagactgttttattgattctcatgtcactattacaggtggttctaaattacgagatcgcgtccgtattcattcaagtactgtcattggtggagaaggttttggttttgctccatatcaaggcaagtggcatcgtattgctcaattaggttcagttttaattggaaatgatgtccgaattggatcaaattgtagtattgatagaggcgcacttgataatacaattttggaagatggggttattattgataaccttgtgcaaattgcacataacgtccatattggttcaaatactgctattgcagcgaagtgcggtattgccggaagtacaaaaattggcaaaaactgtattctagctggggcgtgtggagtggcaggacacctttcaattgctgataatgtgactttgactggaatgtcaatggtcacaaaaaatatttctgaagctggaacttactcttcgggaaccggattatttgaaaataatcattggaaaaagacgattgtacgtttgcgacaattagcagatgtgccattgacccaaatcactaaacgacttgatcatatacaagctcaaatagagtctcttgaatcaacttttaatttgcgtaaatag

SEQ ID NO: 46378 - DNA, 1344 bp, Acinetobacter baumannii
atgaagacccccaaagtcggttttgtttctttaggttgtcctaaggcattggtagattctgaacgaattttaactcagttaaagactgaaggttatcaagttgcatcagattatgatggtgctgatttagttgttgttaatacctgtggttttattgaatctgcagtacaagaatctttagatgcaattggcgaagccatgagtgaaaatggccgagttattgtgacgggctgtttaggtaaagacgaagataaaattcgtcaaatgcaccctaatgttctaaaagttactggtgcagcagcttatcaagacgttatggaagctgtacatgaatatgtgccagcaccgcctaaacataatccgtttattgaccttgttcctgaacaaggtatccgtttaacaccgaaacattatgcttatttaaaaatatctgaaggctgtaaccaccgttgtaccttctgtattatcccgagcatgcgcggtgatttagtatcacgtccggttggaagcgtattagaagaagctgctgcgttaaaacgtgcaggtgtaaaagaaatcttagtcatttcccaagatacctcagcttatggcgtagacaccaaatataagctcgatttctggaacggacagcccgtaaaaaccaaattctttgacatgtgtgaagcacttggtcagcttggaatttgggttcgcttacattatgtatatccatatccacatgttgatgcagtaatcgatttgatggctcaaggtaaaatcttgccatacctcgatattccattccagcatgcaagcccacgcgttcttaaattaatgaaacgtccggcgcatagtgagaatacattagaaaaaattaaattatggcgcgaaaaatgcccggatcttgtgatccgttctactttcgtggttggctttccaggcgaaactgaagaagacttccagattttgctcgattggttggttgaagctcaacttgatcgtgtaggctgctttacctattcaccagtagaaggcgctacggcaaatgatttaccagatcatgtgccagaagaaattaagcaagagcgttacgagcgctttatgcaagtgcagcaacaaatctctgctgccaaattacaaaaacgtattggtcaaacgatgactgtattggtcgatagtttggaagatgaatatcctgttgctgttgcacgttcttatgccgatgctccggaaattgacggtaatgtctttgtagaagatatcgataagagcactattcaaccaggcgatatgttggaagtcgaaattaccgatgcggatgaatacgacttatttgcaaagttaattaaaattaaatcggtctaa

SEQ ID NO: 46379 - DNA, 417 bp, Acinetobacter baumannii
atgcatgatccagtccttgagtcacatcatctcgtatgtgaaaaaccccaaacacgccgcggtatagaacgtcgtttagctctattgctaagcgcaaccgagctgtttttggaaaaaggatatgatgctgtctctcttgacgacatcgttaatcatgctggtggttcaaaaacctctatttataaatactttggtaataaagatggcttatttactgcaatctgcgattatcgccgtgaaatgttttttaaagatatctgtattgcatttcaaccagagcaaacttctttaaaagattatttaatccaaactctcatccgtttttataagcacattattcaacctgaacacattgcctttttacgtttggttattgaacaaactcaatgtaatgcctttgagccagtacttatatga

SEQ ID NO: 46380 - DNA, 525 bp, Acinetobacter baumannii
atgacaacccttgaacaatcattatctgaaatccctgcattttcaatcattcatgaacatttatttagttcagcgcaaccttctatcgaacaacttaagttcattaaagagtatggttgtagcactgttataaatttagctttatcgaattcaccagatagtattaaaaatgaagatcaggtctgtcttgaatatggtttaaattatattcatattccaattgactgggaaacaccctcttatgaccaatgcttattagttttagatttgattgatcatttagtgcagaatgaaattgtttggttacattgtgccaaaaataaacgcgtaagttgtcttatgtatgtctacagacaattttatatgaatatggatatgccaacctgtcaggatttgcttcatgagatttgggagccaaatgaaacatggacaggactcattcatagtattaccttacagcttcaaggccgtaaggctaccttagaacttcaacagtctttgcaacaaaccaatgatttagtttaa

SEQ ID NO: 46381 - DNA, 186 bp, Acinetobacter baumannii
atgaattattatcgattcttagttgatagttgttttttattaagaatgagtgaagaacttatgaaagattgggtctacttttatatcgaaaacacaattaagtatggtgaactattctataaagaaattggctggtcattaggtttgaagaataattatatagttatgagcttaatacaaagctaa

SEQ ID NO: 46382 - DNA, 501 bp, Acinetobacter baumannii
atgagcattatccccaattccattatcgaaattaaaccacatctcaatgctggcaaggtattgagtgaggttgaatccataaaattagtttcacctactacttttttttcaatacctttagctatagaaaaagtttcagctggttttccctctcctgctcaagattatgttgatcgaactctcgacatgaatgagcacctaattaaaaatgaagaagcaacatttattgttagagtggcatcactttcgatgcttaacgctggcattgatattgatgatgagttgattgttgatcgtagtcttgatgctaaacacaacgatattgttgttgcacttatagataatgattttactgttaaacgcttaatgattgatgaaaatgagcgttggttaaaagctgaaaacccagattatgatgatattcatcttcatgacgggcaagaactaataatttggggtgtagttacttatattctaaaaaatacaagaaaaaaatcatga

SEQ ID NO: 46383 - DNA, 1299 bp, Acinetobacter baumannii
atgagacatgaagataaagtcttttttctcatagatgtaaataacatgtacgtctcatgtgaacgagtctttaatccaagtttaaacaataaaccagtcatcgttttgtcaaataacgatggatgtgccgttgcgcgcagcaatgaagcaaaaaatttaaatataaaaatgggggtgccattattccagatcagagacatagtaaaaaaacacaatgtaattgttctctctagtaattatgaactttacgctgaaatgtcgcgcagatttcataaaattcttgcatcgtatgtaactgatgaagatgttgagaaatattcaatagatgagtgttttgttgatttttcagcttatgaaaaaaattttgacctagaaaaggtcgctcaagatatgcgcttaaaaatatggaaatggcttggattacctgtgtgcgttggaatcggtagaagcaaaacagaatcgaagattgctaaccatatagctaagaaaaatcaatcgtttaatggcgtttgcgatttagtaaacatggatccgtgcaacaaagaatatttcttcgcgcagatagatgtttctgaggtttggggagttggccgtaagcatgctaaaaagcttcaatcaatggaaattaacactgtattagatctcgcatgtagtgaacccagagagatgcaaagaagattttctattgtgatggctcgtactattaatgagctgcaaggcatctcttgccttgaaattgaagacaccccaccctctaaaaagcaaattattaagtcatgttcttttggtgcaaaagttaccgaacttattgaccttcaagaagcgatagcgatgcatgctcaagaagcttgtaagagattgagagatgatgagtcattatgcggctgtctaattgtttttgttcaatctagtccttttgatgaaaatgtacctttctataacaagtcaataaccggctcattttcacagccaacagattgtgcattagatttcgtaaaagctgcaacaaagatggtatctcacatttttaaagaaggtattaagtataaaaaatgtggggtcatactaactgggctagaaccaaaagttggacacacttatgaccttctcacggattttgaagctatagaaaaaaaagaacaattgatgaaagcactggataacgttcacaacaaatttggaaagaaaaaactcggtataagtacgtgttatgtaccaggacggaactggtctatgtcgcgggataaattaagcagaaatccttttttgtgggacgaactgttgactattaataactaa

SEQ ID NO: 46384 - DNA, 1146 bp, Acinetobacter baumannii
atggaaatcaaaaaaatcttcaatttgataagtcaaaaaatgatggctgaattttatatttctgctgaatttaatcatcatggtgttaaaggtgattatagagaagatgctttaaaaaattttttagaaaatggcaaacttcctaaacaatataaattaggaaatggagaaatcattagttcatatagccaaacttcaaagcaaacagatttaattgtctatgacaacaacaagagtattatatttcaagcatcagatagtattcagatctatccaattgaaactatttacggaattattgaaataaaatcaaagttaagtaaacaaaaacttaatgaaggcttagaaaatatcaaatctttaaaacaaatacattcaccttcttttatttctaaaaaactagggccaacttccacagtcacatatggcaatacaccgccttttggggtgatctttgcgtatgatcttggaggtaatagtcttgattccctcgaagaaaacctaagagaatggtgctctaagaaccctgcttctgtatggcctaatatgatttgtgttttaaatcaggggttaattttatttagagaaggcttaaaagacagactacattctaatgagataacggatgaatgcacaacgattggtctgcatttcaaggaggattctttatttgaatttacatcaagattaatttccctatgtagtacaagaaaggtcgaggtatttgatataagccaatattctgatattggactaattgtagatggattaagagtaaaaggtgttagaagatggaaacataaagatgacccaagcaaacaattttgcttgaaacaagaatttattaaaaaagtatattcagaatgtaaagaacaaatttcaagtaaagaattattgattaagcgtcttggtaatatttctggactagagcagctttatcaagatactaatggattagtctatttatataaccctgaaaattataaaggaatggcggatatcctatctactcctacccaaagtagtgaaagcataattgaaaggttacaaaatgagaaaaatatagctaatggtttctttatgtatataaatgaggttccttattttgtaccttatatttacgtaacggatgaagatttagaatag

SEQ ID NO: 46385 - DNA, 312 bp, Acinetobacter baumannii
atgaaacataggaaagtaactttatcagcagttttattatggggcgtagttgcttatgcacttgcacttcttacatattgtacaatgaagagtgtattaagtgcttcagcagataatatttctgcttttggctctatacttggggcatgtggtgcattctttgctgcttttgtagcaacatatttattcaatgattggagacttcaagcctcttttgatttaaaaaaacaacatgtaaatgaaattagttatttattagcccaaagttatgacgaacttcataaaatggaagaaatactattattcatttaa

SEQ ID NO: 46386 - DNA, 483 bp, Acinetobacter baumannii
atgacgaacttcataaaatggaagaaatactattattcatttaaagcaaatgatttaagagatgagttttatagcaaacaactgaatgttaaaatgcttgatagacttaataaaagtcaaaatgaaatatttgttgtttatgcaaaataccagaaccatcttgtatatttagtagataactttaatcgcattcaaaaatcatatattcgatattatgataaatttaatagcgaaatgggtaatgccgagcgtatacttatgttgaataaggggtcattcccaaagtatatacttccaagtgaaaaaaatgctgaagaggtcggtcttttaaatacgcatatctatcttcctatacaatttgagaaagaagatatatcttatacttttaataatatatttgagttaataaaaaagctaagtgaaatatataaagatcttgaagctaaagttcttgactcaattgaccttacaaaaaatgattag

SEQ ID NO: 46387 - DNA, 2769 bp, Acinetobacter baumannii
atgtcatatagaaactatacaacacgaatgtcttgttttgcactgattgccgccattgagtcagattttaggctaatcatatattttgaaacaagtgacaaaaaaattgaaagtgtattaccagaagatgtactctcaaatgctaagcatagatttaggtcagataaaccttcagaaaatcatgaggaggtaagcttatctgatttactagaatatgtagacttttacgatttaagtaaaattttaaataaagtaaaaaatgagcagaaattctttacgatagagcaactcactgttgtaacaagaaatttagaaaatttgacagctgctaggaatagagtttgccactcgcgaccattagaagctgatgattttacatctctttttgatttttcttgcgaattagaatcaataaataaaagtgataataattggcgcaatctaaaatatgctaaacaaaaccttaataatgcagattttattttaacaaatactattcctgatttttggaaaaatgagaaaaatcatattttacaaaatttacctttaactgaatttgatgatacatctttccttggaagaaaggatgatagaaaaaaaattacagatttaattctttctaatactagagtcattacaattataggtgagggagggatagggaaaacggctattgcacaacgttgtttatacgacatattggaaatctgtgaaaatcaaaaagaagaacaacgctcatttgatatgatcttgtgggtttcactaaaaacaaatcgtttaacgcaggctggggctattagtattaaggatgctattactaatagtagtgatatgtttaaaatcattcatgataattttgctaatagctcagatatgactattgatgatgttttgaaggaaattttagagtatatggatacttttaaaattcttctttgtattgataatttggaaactatttcctcagctagtgttcgaaattttttatcacagattcctaataaatcaaaggtcttgattactactagaatggggttaggtgaaattgagtatcgttataaactagataagttaaatgataaagactccatagatcttttgagaactatggcaaaaatattaaacttaacatctatagtaaaaaagaaggcagatacattaaagactttatcatcacaactttttaataatcctttgttaattaagtggtatgttcttaatgaagcttcgggtaataatatgagagaattttttaataaaaattcatcatcttttaaagaagccttaaaattctgttttgaaaacttatatgataatttgagtgattttgagttaaaaactatatcaacaatagcatgtttaaagaaaccagttagcaatgttgaattgaaatactatttagatgatttggatgagatacaattacaacaggcacttaatcaattatttaattcctctatgctagtttcctcttcagtagaggatagtaataaattatatagtcttacaggtattgctgaagaatatattgtatcattaagacctgtagataagagtttttatattcttattaaagaaaaacaaaagaaattacagaatttagtggaatcagagcgaaaagaaaaaaatcattacaaatatgatttaagtgttattcattctaataataaagatgaggcaatttgtgcactgtatcttaaacaagctctagctgcttttagagataaggaatttgattatgctggaactcttattgaaaaagcaaaagttattatgcccgattactcagaaatatatagggttaatggttatttgctaaaagatattaacccatttcaggcagaaacagagtttgaaacagggattgaaattaatgaaagagatcctcttataagatatgcttatgcacaattttttttggaacagggtgattcaagcaatgctcttgagcagattgaagcagctctaaagttagatcctaaagagattgctttaataaattataaagcttgggcattaaccatgagtggaaaatatattgaagcgattactatttatgaaaagttacttgaagatccatataatttaagtccgcacaagaaatttcgggctagtacctttgatcaggcaattggttgttatcgtcggtacgcagagcgtttaatgtatgataatgattgggatagtgttgaggagcagatactgaatgcactggttctagctaataaagctatttatacaaataatattgataatgggaatgttaaacaaatttttaaacttacccgggtaattgataagattcgtgacaagacaaaaaagactaatttattaaataaatttttagaggtagttgagagcaatgctattgattttaactatttaagtagaacttggtttagaaataatttatatgattttaaagattttatagaggccatattttttgaacgtttaaatgaccttttgcaggagactttaaactctgctaacttagcattgggagtgtgtaatgttggttatattcagaccttaaagtcgaatgaaagatatccaaatactgtttcgtttggttttattgatgctggaggggtgaacagatttttcttttcaaggaataatttaagagtaaaagactctttggatcattatattgataagaatctttcggaagatattttgattgaagtgagctttaatattggtagtaatgataaaggtaattttgctcaggatatcggcgtggttaatgttactgatttaaattaa

SEQ ID NO: 46388 - DNA, 552 bp, Acinetobacter baumannii
atgaacaaaaatgaattctacatatcagtcgatattgaaacatcaggacctatacctggtgaatttagcttattatccattggagcatgtatcgtatctaacccatcaatctctacatatcttgagttaaaaccaattagttcaaagcatgatctagaagcaattgctgtaacaggtctaaacttaaacaaactggaaatagaaggcttggaccctgtaatggctatggaagattttgaaaaatggataaaatcttcatgccctacagatcaagacccaatttttgtgggacttaatgctccatttgactggtcattcataaattactattttcacaaatttttagggagaaatccttttggttttactgctcttgacatgaaagcttatttcatgggagccaataactgccaatggcaacaaactaaatcctcttatatgacaagaattcttagtcctaaaatgaaaccatcacataacgctttagatgatgcctattatcaagctgagttattctctcttatgatgaaaaagagggaaaatggccaataa

SEQ ID NO: 46389 - DNA, 492 bp, Acinetobacter baumannii
gtggatgagaatattgaagccatcgcttggaaatggacttggccatctattgatgttgaacttttagtctctcaaaatgtcgcaaatatttttaatctttatagacaaaataaaggagttgaacaaggaggacaattgtttattgatccttttaataggaagggaatcgttctggtcgaagcatccataccacatcctaacgatcgtgcaggaagggcttggcttgaattagatgaagtccgttgtaagcaggaaataattagagctaattcgaaagggttacgattgattggttattggcacacccacccacaaagaattccaaggatttcgtcagaagatttaaatagcttttgcaatttttcgaagaaatattcaaaggagctaccatatccgctagctgtcattgttggtacatcacaccagtcagatggaattaaggcatggtcatatcgtagctctggttatattgaggctgttcaaaatatataa

SEQ ID NO: 46390 - DNA, 1758 bp, Acinetobacter baumannii
ttggctgaaaatatagaattatttgtagaacgtggtattgctgagttaaaaaaagttttagggagtaatacagacgaatctttattaagaccttccccaacaaaaattggggaggcagcttgctttaaacttacgctacccattgattatactggtattgagagagtattaaggattgcttttcctgtcaattttccacgtagacagttaaagttatctgtagagccctctccttggttagtatggccacatagtatgaagactagtttatgtcttcacggatttaaagaaaggccaattacaggctctccagaaaccattgtaaaagattgtattgatcgtattcgatatattgtttctttatgtatgatgggctcagatgagcaaacacgtcttaatgaatttcaacaagaaattagctcgtattggaatttacaattagatgattctccacagaaccttattctttttgatagacctgagaagtctataaaattatatgctttgagtgacccccgtagactgatttcttctggttttgaaactatttggctgtcttcaaataaatcgattatccagaaacattatgcaagagtacttggaagaagtgcgaaaactagagcattagctactcccagttattacttaaaattattatctttaccagaattatatattcctcaaaatgaggattttctacagtggattgctcctcatgtttctcaagcagattcaaaggagtttttaacttggttcgatgagagtaaagatttaattagtaaatgggtactgttggagttacctaattctggtggaagaattttctgtttaaatattcggtctccatcattgcaagagtatagaggtccaagatttggactacgttcttcacgtagacgcaattttgagaaaaatgtaattcctcctcaaattattctaacttctacaatcaatttacttactaaggaaacaatgctttctaggaatattgatagtaatacaaatgaacttggatctaagagcgttgttttaattggtaatggttcattaggtggaagtgttgcttcacaacttgctcgctcgggtattggtcatttgactcttattgatccggatattctggttgcagaaaatcttgggcgacatgttcttggtgcagatcaattaggagctttaaaggcaactgaattacgaaaaaaacttattatggagtttcctataatcgaggtgaaagcatttaatgagtatgttgaaactgtattaaatcaaaagcctgaaatattcgaaaaagctgatttggttataaatacaacggcagattgggaatgtgaagctagattatgggccctaaagtctgaaggaagttcttgggcttacttgcaagcatggagtgaaccatatgcatatgtagggcatgcactttttgcccctagaggtgcttatgatgctcgtatattttttgaggataatggagattttaaatacaaattaactgattggccaaatgatggaattcaaccgctcccagcatgtggcgaaagttttataccaggaggagcaataggaatagtaaatatagcttcaatggtcgcccaatttgcattacatagtcttactagccaaattaaagactgtgtatggtgttccagtattaataaacctcaagatacaagtcggttaaagggaaaatatttaggtccagaattacctaaaggcgcacaacaattgattttagagagagaatggcctagtggatga

SEQ ID NO: 46391 - DNA, 1257 bp, Acinetobacter baumannii
atgaatatgctgaatattccatctaaagttgacagttgggaatacctattattacgagcggcacagaatatatcgctttcagagtcgaaatatacccaaataatggaacgatataatcaattagaaaaaatcttaactgcatctaacaaccctttattagctgaagcacatattttccctcagggttctatgcgtttgagaacaacgataaagcctgtcttgggagcacccgctgatctaggtacagttgatgctgatgccatcatttggttgccgaatgcacaaggcgttgaggccagcgttattttagaggcaattgaagaacgttttaaagaaggtgctcgtgttcaaaaggacatacaacctttacgtaggggaattagaattgtttacgctgatgttgaccctggttttcatatcgatgttacacctgctcgcgctatagatgggaatgatgaggaaaaaggagagggtaaattagaagtacctgatcgtgtaactggttggaaagcaagtagtccaataccctatgctaattggctcaaatatgtgtcgtatcaaaagatagagttggcaatggaaagttatgatttggtgaggaaacatcagacatttgatgctgcaacacaagaggaacttcctgcatattctgattattcagatatgaacccattaattgcaacgattaaactcttaaaacgtcatagagatgaatgggcaattcgtactggttgtaaagattggagaccgatctctgctgttattacaacattggcgacacacgcctattctgatgtagtaaagatgtcagctagtaacccccttagacctctggatgcaattttagctatagttcgaaaaatgccagattatattcaatatttaggtggacagttttttgtttgtaaccctgaagatgcagccgaaaattttgctgaaaaatggaatagggtaggtgaaggatataaatataaagaagctttttttcaatggcatactaatgctatggcttctgtatctattgggttagaagattttagttcttatgaatcatttgaagctgttataaaggaaaaatttggtttaagtggatctttcatttcacaagtgaatagagaaattcctcctgattggacacagcctggaagggttgagggaacaactagaaatgcagcagcaattggaatattgtttggtggtgaatcaaatagtgaaaacattcaaaatactgttaaaccggtaggtcgtcttggctga

SEQ ID NO: 46392 - DNA, 717 bp, Acinetobacter baumannii
atggctatgtctgctgaaggacttactgcaattggtcatgaaattaggattatttttccgcctccagggcctcgcgggagagataaactttattggcagcaaattaaagatagtattcagttcgagtttgaaaataaattaagaatgaggggcggttcatatggtgatatgcctaccttagcaattgtaggattagcagatatcccagcactaatacttttgggccagtcaataggtgatcgttctaagcgattacttttctctgctaatcgtgaacatggtttgaagtggccagatacatcagcagcagcgccaaaatttgttttttcattaccaccagcagggactgggccaattgcattaatattatctgtttcagctcaattacctaagcaagatattatagatgtgttagaagatgctcgcgtagttgagttttctattcctgaaccaagttatatggtggtaaaaaatcgtagtgtaattcatgaatttcgtaatgcgctacaagtttgtttaagtcaacttgaagcaattactaaggatcctattcatgtttttgctgccctccctgctgcattggcaatagagtttggtgctttattaaccacagaacatcagcatccttatcgtatttacgatagaagcaaattacataataatgcatttataccgacattaagtttgggtgtagattctaaggagatatatcaatga

SEQ ID NO: 46393 - DNA, 807 bp, Acinetobacter baumannii
atggccaaacttgatactttgcaaaataaagtggtgtggattacgggagcctcttccggtttaggtaaagctttagctggtgagtttgctttgcaaggtgctcaagtgattttaacttcgcgtcgctttgaagagttagaagaagttcgcgttggtttactccatccggatcagcacttgtcggtagttgcagacattaccaatcaagagcaagttcaagaggcttatgagcagattttaaaagcaaaaggacgaattgactggcttattaataatgcgggtttaagtcaacgtgctcttattcaagacaccacaatggcaacagaacgcgccattatggaagtcgattatttttcacaagtcgctttaactaaaaccgtattaccgaccatgctaaaacaaaagtctggccgagtcgtatttgtctctagtgtagcagggcttttaggtacgcagtaccgtgccagttattcggctgctaaagctgctattcacatgtgggccaacagtttacgtgccgaggttgccgatcagggcgttgaagtttcggttattttcccgggctttgtaaaaactaatgtttcgtttaatgcactaaatggtgcagggcaacctcaaggccatcaagatgaagcaatcgaaaatggactagaagccgatgtttttgcagaacagtcagttaaggctttaatgcaaggacaggaatatattgtagtgggaggtactaaagaaaaattaggcgtgatggtttcccgtatgtcaccgaaactactctataaaatgatccggaaaacaaaagtgaaataa

SEQ ID NO: 46394 - DNA, 333 bp, Acinetobacter baumannii
atggtcgatgattttaaaatagaaggtaggttatctgaattagagcaaaaaattataaactcacctgtattttttgaatattttaatgaggaagatgaatcagaatatttagatcttgaaggacttaaagctaatgatttattagatgcgaacggtgatattcaagaatgggcagattgttataaatgttattattttgaggatgaatatgttgctgagcatgacttagcttctagatttttatccgaaatggtaaccgaatatgtaggatgtgattttttttacgatactgagtacgaccaaatctatttagaagttattcaagattattaa

SEQ ID NO: 46395 - DNA, 1926 bp, Acinetobacter baumannii
atgaataaaaaaattttatggccttttgctcttaccacaattgcattgatgttaaatggttgtggtggaggaagttcgacaattaatgagaatccttctaatggatcaggaggagctagttctagtggaagctgttctgtaacgaatagcgattgtctacaattttttttagattacccgattgctggtcttaattttacctgtagtagtactggaagccaaagttttattactaaagcttcaggaaatattgtcatcggttcttgtaaagttggtgatacagcgaccttctatttgcaaggtgctaagaatccaagaaaagtagaattaggttcagttaagttagattcagtctcaaaaattcaaatgactgtgccacctcgtctaaaagtcatagatatggcaataggattaacagggcagactccaacatcgcttagtcctagtgaccctactattcgcgtagcaatggcattagtaaaagttttccaaagcattggcttggaaagaggagataatgtagttggtgatttacaaccaacacaatttactgaagataagaaaaatacattaaatgttgtactgcaaaatatcacggcaacggaatggaaaaatggggcctatgtcaatttgttaaaaccatggttagatgtaagccagatttcagatgagcaggctttcaaccttataacccagttagcaaacttaagtttggttggattatatcaatcagattatattactttggcaaaacctaatttagttgctgaaaacttttatggatgtaatttaacgaatttaaaagattgctcaaaaaatagtgcgaatacccaacatgtatttggcaacttatttttgctatctgaccgtcaaggttatacatttggttatgggttacaatggaaagggactagcactacctcaagtcagctagcaattggagccgtgttggaggtattgacaaaagctaagccaactcaaatgattgccaatgcacagactacttggcttgacccaataaaaacagaaattagatcaactcagccgttccgtttgaaaacttctaataatacaaatgaagatttagtaatttaccaaggtaaattattaaatgattcacttattgccggacatgatagctcgtatttagctttaaccaatactgaaactccgaacccacaacattatgcattatggagacagtccgtaggtacccaaaattataatggctctatggatatttataaggtcagccctgctagtttccttttaaaagatatttttaagacttctaaaaatgtagcaacaggccaaacatatattttccctttatatgcaacattaagattccagttcaatacggctggtattgcaccaattgatttaggtattgtggttgatgaatatggggacattcggactgatatcaaacctaatgcaacggcgaccgatatgtctgggcaatgtggtgttgtttctgataatactatgatcgataacaatggggttcaacagtatcgtataggaacaactggaggaacagaatcttccacaaatgataaatccgttactgtaagaatgattcttgctgagcctcaattagggaatttgaatgggattgtggtaggccttaactcaaatgtcatacaagcaattaaagaaacaggtagccaatctttaacagtaagtggggcaaaaattaacgttgccaatctattacaaggtcaggcaagtggtgcaaatcttacgacttatgataataaaacagttaattggttgaatccatatgccttttatcaacaagtttataacaatattgaaaatgtctcacctgcaccaactgaagctgaaaaagcactgggacagcgtatggctggaacagtaacccttagaaccgctgattgttatcaaattaagacaaaataa

SEQ ID NO: 46396 - DNA, 231 bp, Acinetobacter baumannii
atgagtgagtttgagggtaaatctggaaagtgggcttgggagattcaaaaagaacaacaagcgaaagtggaggagctgcaaaagcgtttagatggggcattaaaagagactcaatatgctttgcagtatgttgaagaagacatgcgcggcaatcatgaatttctacaaatggctatgattcgagcatttaaagaattagagaaagtgctcaatggtggtgagcctaaatga

SEQ ID NO: 46397 - DNA, 408 bp, Acinetobacter baumannii
atgacatcgatgagtttagcggattatcactctaaatttccaaacggccataaagctaaaaagggccgtaataaatttaatgcttcaaaagtcacattagatgggatgactttcgacagcaaaaaagaactcaagcgatatatcgaacttaaagccatgcagcaacgcggtgaaatctttggattagagcaccatgcaaaatttgaattggctcctaaaactaagatagagggggaaaagagaacaaagccggcacttagatattttgctgattttacttactacctcatcaatggcgagtacatcgttgaggacgttaagtctattgctactaggaaattacctagttatcgcaataagaaacatttaatgaaaactgtacacggtattgatattagagaggtttga

SEQ ID NO: 46398 - DNA, 285 bp, Acinetobacter baumannii
atgagcgacattgaaacggtaggctggacggcagataagcggtttttcatattaaaaattaatatggaaacgagtttgactacagatgattgtgaggttttagcaggattgtttgttgaaaaatatagtctggaattttcaggctgccagtttcatggaaagctcgcagtgatatgtggagataaagtttacgtgaatccttgggcgcttgatcaagaagcaagtgtagatgaaccagttgaggaactgtcatttagtgagttccaaacgttattgaataattaa

SEQ ID NO: 46399 - DNA, 564 bp, Acinetobacter baumannii
atgactacagttgtaatggattggtcaagattttctatttttgaatggttcgtttgtggcttaaacccgaaatcaccttcatttggtgctgcgaacgttagatgtactgatgggaggtcaatagactttcatgacaaattaggggtggtagctgcaatgggtgatcaactaacaaaatcagttgcaatggtcattatgaccgaaggaaagtcccaacgggattatgaatatgttcgcaatcatttagctaaaataatgattgatggagcagagaaagataaaagaagagagcctaaggggatagctatttaccacttagcttggttaattgctcgtattgttattgattttgctttagatcccgaattagaaaacgcacataaggatcctggtcgacttgtttatgccggcattagaagtttccaaatggatccggaggtataccgcaaaacatggaaacgatacgaagatatgatgattgccgcgcttaatgaagaaattttaaaagctactgtaatcgctgaacgctataagaaagaaaccttaaatgaagcaagaaattag

SEQ ID NO: 46400 - DNA, 231 bp, Acinetobacter baumannii
atgactatgacaaacgctgaattagagaatgaaatcaaagctctaaaaactcaaattacatctcttcaaggaactgttagcaataaagctgatgctacagcagtaagtgctttgaatgcccgagttactagtgtggaaggtgtaaatacaagccaaggtaattcaatcactactttgaataatggcttaaatgcagtttcgacacgtgttactgcattagaaaataaataa

SEQ ID NO: 46401 - DNA, 771 bp, Acinetobacter baumannii
atgaaatcaaaaccaataattccatggcaaggtggtaaaacccgtttggctaaggatttgttgtgtaagttcccagaacattcatgttatgtggaattattttgtggtggagcagcattattcttcttaagagaaggaccagcaagaactgaagtaataaatgatctgaatggcgagttggtaaatctgtaccgggtagtgcagaaccatttagaagaatttgtgcgtcaattcaaatggtgcatttcaagtcgccagatttttgaatgggaaaaactaaaagtaccagacacactaacggatattcagcgagctgcaagattttattaccttcagcaacatgcgtttggtggtaaggtttctgggcagacatttggatatgcaacaacaggccgctctttaaatctcttgcggatagaggaaagtttaagtgcagcacatttgcgtttgaatggagtctatattgaaaacctgtcctgggatatttgctttgataagtatgaccgggaacatacatttttttatgctgatccgccgtatctagatacagcaggttatggagtagattttccattagatcagtatgaacttctttctgaaaagatgaagacttgcaaagggaaggtaatgctatcaattaatgatcatgaaaagattcgtgaaatctttaaaggttttaattttgcatgtacttcaattaattattctgttggtcgtgatttggctgctaagagtaagaaaagtaatgaactgataattatgaattattga

SEQ ID NO: 46402 - DNA, 204 bp, Acinetobacter baumannii
gtgcgtatgagccgattattactagccacaactgctggattaatggccttaaatacaaaactaagtgttttaagcgccttggttgcatcatgtggacacgcatcacctttgagctgtaaggcaaatacagtaaagagtaaacctaacaaactaagtcaaaagaaaaaacgccttattgctcgtcgtcttaataaacataagtga

SEQ ID NO: 46403 - DNA, 174 bp, Acinetobacter baumannii
atggacaaaaacgaagctaaaaaaaatctggataaatattcacaggaacttgagcgttatcaaaatctctccagatcgggtcttagccgtgatgaaatgttagttatcgatagaataattcttagattaaaaaagcaagttaataatttacggacggccttatatggacagtaa

SEQ ID NO: 46404 - DNA, 468 bp, Acinetobacter baumannii
atggacagtaacgattatttttggcttacaagaaaaaaagaaccaagaacaaaaccaaaaagccgcccattacccaaagcaactcaaaaatacctagaagctgaagaagaatttactcatgcattagatgtgcttgaaatcaaatatgaaaagaaatttaagtttaaatctacaaaacattggcgatttgattttcatttaattgaacatcgtattctggtcgaaattgcgggtggtccatggtcaggtggtcgaaaaggtaagctcaaagataaagcttggagtatggatcgatacgatgatgctgaagcaatgggatatacggttgttcggttagaggcagcaccaagttttaaaattaatgaatctggcccgttacagatacaagctcattttgctagtcagtggcttaaaaacttaaagaggcaaatatttaatggatcagatcagaccatttcctccaactga

SEQ ID NO: 46405 - DNA, 642 bp, Acinetobacter baumannii
atggatcagatcagaccatttcctccaactgattttatagaccaagcagatgaagaggaagcgatacgcatagtacctgcgcctgatttaaaaaactgggtagttgctaattacttaactattggtggacctctttataaccccgatcatgatcacatagctgagctgcttcacgataatgaagaatttttagcatttgcttgggcctcttctgcatataaaagcaagcaagctatggtgttaggccagtgcgaaaaagtcatgttcaatgttggtggctggcgtaaagctcgacaagagcaacagatgcgagactggtttggttttgtacctacatatttaataacggtcgatgcatctttctgtgagcgtgcaaacgatacagagttctgttacttgcttgaacatgagctttatcacattggtgtgatgaaggacgaagacggcgaaatcatttatagcgatagtacggggctgcctaagcattacttagctggtcatgatgtagaagaatttgttggcgtggttaaacggtggggggctagtcaaagcgttaaacgtattgttgaagctgcaaaaaatccgccgtttgtttcgaatcttgatatttcaagatgctgcggaaattgtgtaatcaattga

SEQ ID NO: 46406 - DNA, 471 bp, Acinetobacter baumannii
atggcagcactaaaagagcctgtgaaaatatttattgttcaagctcttgcatgccgtgatacccctcaagaagtggttgaacaggtcaagcaagagtttggagttgatattagtcgtagccaatgtgaatgctatgatccaacaaaatattcgggcagaaacttaagcaagaaatttgttgagctttttgaatcaaccagagagaagtttgataaaggcttaattgatattcctattgctaataagtactaccgactgaagcaataccaaagacagcttgagaagactagaaacgtcaaaacagccttaaaaattcttgagcaagccgctaaagacattggtggtcaatttactaatcgtcaagaaattacaggcaaagacggcggaccagttcaaacagttaattctgaaattccagttccaatggaagattacttaaaagcgcggagggaagtcttagatgagtactga

SEQ ID NO: 46407 - DNA, 1428 bp, Acinetobacter baumannii
atgagtactgatgcggctcgggataaagccatccagatcgaggcgcaagaagatttatatttctttacaaggtacatgtttaaggagcgccgaggctacaaatggatgcaaaattggcaccacttagaaatctgcgaagcattaatgaaagtttatcgcggtgagactaagcggttaattattaacgtaccacctcgatattcaaaaactgaaattgctgtaattaattttatggcttggtgttttggaaagaaacctgactgtgagtttattcatatcagttactcggcaatgcttgccgcaaataatgcatttcagactcgtaatatggttcaagaaaaggcttataaaaaggtctttcctgatcttaaattacgtgaggatagtaaagctaaggatttctggcgcacagatgcaggcggagtctgctatgcgactggtactggcggtaccattacaggttttggtgcaggcaaaatgcgtgaaggctttggtggttgcatcatcattgatgacccgcataaggccgatgaagccaaatcaaaaactatccgtgaaggtgtaattgactggttccaaaatactctcgagtctcgtactaactcaccagaaacgccaattattgtcattatgcagcgtcttcatgaagatgatttggctggatggctgctaggtgatagaaaagacggcgttcctgtagctggtggtaacggtgaagtgtgggagcatctatgtctttcggctattcaagaagacggatctgcattgtggccagcaaaacacaatattcaaaagttgaagcaaatggagcaagctgcgccgtatgtttttgccgggcaatatcgtcaaatgccatcaccgccagcaggtggtttttttaagcctgacaatattgaaattgtggatgctttacctgctgatgtagtgaagcaagtaagggcttgggactttggtgctactgagaatgaaggcgactttacagcaggtgttagagaagctcttggcgcagatggttttacttacattgtcgatgttacaagaggacagcttggtccagacaatgttaataagcgcttaaaacaagtcacagagttagatgggatgggcgtaacggtaaggattcctcaagatcctggtcaagctggtaaatcacaagctagtgcattcgtaaaacttcttgcaggatatgacgtcaaagccaaaccagtttcgggagacaaactcacacgtgcacaaccttttgcggcgcaagttaacgtgggtaacgtgagaatgcttagaggtgattggaataaagactttattgaagagcttcgcaattttccaaatggaacgcatgacgaccaagttgatgctggttcagatgcatttaatgaattgaatggaggttttgaggccttctttgctgatatgggatttgctcgatga

SEQ ID NO: 46408 - DNA, 1452 bp, Acinetobacter baumannii
atgagtgacgtaacttttaaacatcctgaatatgttaaaaacttgccatattggcagaagctagatgatgtgtgtgaaggcgaggatgctgtaaaggctaaaggagaaaagtatcttccgaaacccaatgctcatgatcaatcacctgcaaataaaagtgcttatgaggcttatcgtactcgggcagtcttttatgaagtaacggggactacatctaatagtttagttggtgcagcttttgcaaccgatccaagttttaaatttcctccagaactagctcacttagaacgcaatgctaacggcgcgggattaagtgcttatcaattggcacagaacgggatccgacatttattaaagcattatcgttgtgctttatatgttgactatcctgcagttacaccggctcgaaatcttgcggagtttaaacagcaaaaagcctacccgatgattcacttattgaatgccattgatgtgatcaattgggattcaatgatgattgataaccagaaaaagctttgcttggtggtcatccgtgaatttacttcagaacgaggcgctgatggctttagcaaatctgaggtagagcaatacagagtacttcgtttagagcctgataatgaaggaaacttcatctatacagttcaagtttacacaaaaggcgacaagggtacatggaagggcgaagataagaagtatcccactgataataacggggatttctggtcttatattccattcacttttgtgggggctattgataactctgaagagattaaaaagcctccattgctcccattggctaatcttaatttagctcattatagagatagtgcggactttcaagagtccgttttttatatgggccaaccacagttttatgctaagggagttaattgggcttggtatgacgaggctaaaaagcgtggcatttatatcggtgcgaaagttctattacctttacctgaaaacggtgatttggggattgtacaagcagatccaaacacattagcacgggaagctatgaaggataagtgggagcaaatgaaggagcttggtgctcgacttattgaaaaaggttccgcagctaaaaagactgctactgaatctaacagtgatgatgccgtgcagcattccgttctttcactttgtgttgtgaatatgaatgaagctttgtctatggctttacgttgggctgctaaatttgtagtacctaatgttgatgttctgactaaagatgaactgatgttcgaaattagtcaggaatttaacaagcaaggttatttagctgagttggctcgtcaattgtttgaagcagctttacaaggtagatcttcattcaaatcttggtgggaatacaaccaaacaggaatgtttcctaaacaaaaatatgaagaagaaatcctaaatgttgaagctgaacaggatgggactttgaatcaaggagtgaattga

SEQ ID NO: 46409 - DNA, 1104 bp, Acinetobacter baumannii
atggcggcaactatcaaagaactcttagaggcactaactcaacaccaagcatatctttttcgcgcttcatcaaaaacagttaatgaattattaggtttatttaatgatgatacaaaagcaatgctttcaaagctgcgtgatctattagaggaacttaatgattcagagaaaattgctttagctggtgggaagtatacaacgtcaaacctcagagagattaaagatttgattgaccaatggtttgctagtgtaaatacaagcttacctgaagctttcaccgtctctgctaccgctttagcggtttatgaagctaattacatagccaagctatacggagcgaaaaataaaactcttagcggtgacaagttctattctgctgctaaaaaggtaccattggctggtggtgccctagttgatgatcttttatcaagaattactgaagctgcccgtcaaaaagttgaatatgcaatcagagatggtatttacactggcaaaactaatagtgagattattcagcgtatccgtggtaccaagaagctaaattatgaagacggattactcaacagcacaaaatcagacattgagcgcactgtaagaacggttcggagccatgtagctaaccaggcatatttaaaaagttttgatcaaattggcttcaaatatgtgcgatttgtgagtgttcttgatggaagaacttcaaaactttgtgcatcccttgatggaagcttttgggaaataaatgacccagcaaagcgcgttcctccattacatccaaattgtcgaagcattctggtaccagttgagaaagacggttctttagctggtcagcgtccttttgtgatggatgagagaagagtgaaagacatccccaaagaagagcgtgatcagttgattgggcaaatggatgcaaacataacatttaaagagttcttcaaaaagacagatgacttctttcaaaaagaatggttgggaccaaagcgttacaaactcttcaaagagggaaaatttgattttgaaaagttcttcgatccggatggacgtctttatacactcgaccaacttcgcatgttggacgaacaattgttcaagaggttgggaatatga

SEQ ID NO: 46410 - DNA, 144 bp, Acinetobacter baumannii
atgaagcaaataactatgactcaagcacaatacatcctaagtacaaatcttattgttgtgccttttgtaaggaagttgattccaagatatatggctattttaggatacaacttcaaacagcccacagcacagattccgcattaa

SEQ ID NO: 46411 - DNA, 513 bp, Acinetobacter baumannii
atgacaaagcaaccgcaaacacttcaagagctagttcaaaatgttgaatatttcaatgtggaccaagcatcaccagatgcactacctaaacgcattatatgcatcctaaaacttcactctggagtgcaagtaaacggcgagtatttgattcctgaaggttcacctgttggtgattacaatccgtttgcacttacatctgccattgaaaatttaaaaaagctcggatttgaaattattgaaccaccttctgaaccacaagtaatcgaaggtgaggcagttgaggttggccagaatttagatgacccatcacttaaagcggttgaagcaccaaaaattaaaagtctggaatcccatgtaactgttacgggcgcaggggttaatacttatgatgttcgtcatgcaaatctgcattcaattgaagcattgacctcacttttgaaggttacgaagttaaatactgatgtgtcgaatgctgcaaactctaagcttgttgaacttattaatggactctaa

SEQ ID NO: 46412 - DNA, 315 bp, Acinetobacter baumannii
atgaccaaagaagtaacagagcaagagttagcggaaaagtctgtggcaccccgagtaactaaagcgcaaattgatgcgatgatggaccgcgttacatatacagtggagcagcgccctggaggtacaacatctacttttgtacatgcatttttagatggaaaattttttctagcaacgggttttagcgcatgtgtgaatgcagaaaactttgatgctgaaatgggtgagcgtatagctcgaagcaacgcagaaaagtcagccgaaaataaactttgggaactcgaaggctatcgtttatttgccacaaacttctaa

SEQ ID NO: 46413 - DNA, 768 bp, Acinetobacter baumannii
atgaaacttaaaacagtaacgatcgacggtaaagtttatgcggaagtagacggtgataagccgatctatattcatgatgacggcaaagaaatgccacatgatgcaccacactcggtagcaacaattgcacgcttaaacaatgaagctaaaacacatcgtgaagccaaagaagcagccgaaaaagcattaaaagcttttgaaggaattgaagacccagcggcagctaaaaaggcattacaaacaatccaaaatctcgatgataaaaagctggtggatgccggtgaagttgagaaagttaaagctgaagctatcaaagcagttgaggaaaaatatgccccgattgttgcgcaacgtgatgctctagaagcctctttacataaagaacttatcggcggtggttttgctcgttctaagtacattcaagacaacattgcagtacctgtggacatggttcaggcaacctttggtcatcacttcaaaatcgaagaaggcaaggtggttgcatatgatccgaacggcgaaaagatttattcacgtgtccgcccgggtgaacttgcaaatgttgatgaagctttagagtcattggttggtggataccagcataaagacttaattcttaaaggtggtaaaggaactggtggcggttttcaaggtgggggcaaaggtggagcgcctgcaggaatgaaacgcagtgaaatgtctgtttctcagaaagcagattacatcaaagaacatggcaatgatgccttcctaaaactaccgaactaa

SEQ ID NO: 46414 - DNA, 954 bp, Acinetobacter baumannii
atgactacaacagttaactcagacatgatcatctacaaccaattggcacaaactgcttatttagagcgtttgcaagacaatttgaatgtatttaaccaagcctctaatggtgcaattgtttatcgtaatgagatcattgaaggtgatttcaacaaagaagcattctacaaagtgggcggtagcattaaacatcgtgatgtgaattcaaccgccaaagtagtgcctgagaaaattggttctggtgaatctgtaggtgtaaaagtcccatataaatatggcccttatgcttccactgaagaggcattcaaacgccgtgcacgtacacctgaagaatttgcaatgattcttggttatgatttagcagatgcattggttgcaggacgtttacagtacagtttagcctcattaaaagcagctatttctagcaacccagatatggttgccaaaggcagtattgcggtagatggccgtaaagcactaacacgtggtatgcgtaagtttggtgataagtttggtcgtattagtttgtgggtgatgaactcagatacttatttcgatattgtcgatgatgcaatcaccaagcaaatttatggagaatctgaaatcgttatctatggtggtttaccaggtaccttaggtaagccggtattggttacagatgctgtaggtgatgatgatgcatttggtttgcaaatgggtgcggttactgttacagaatcacaagtacctggcttccgagcttatgacatcaatgatgaagaaaacttaggcattggaatgcgtgctgaaggcgcgttcaacttagatattcttggttatagctgggatacatcaaaaggcgaaaaccctgaccttactttacttggttcaagtgccaactggaaaaaacatgctactagcaacaaaatgacagcaggcacattgcttgacttgtctggcacaacaactggttaa

SEQ ID NO: 46415 - DNA, 666 bp, Acinetobacter baumannii
atgaagctaatctatacacgtattgcggcagcagctgcattagaagtagggactattgcaaaccctgaatattatgaatatccaaatcgaagtgctgaagaggtaatcatttacggtgattacccgaaaattcaaaatgattatgaagctttgaatattccagttgaagttcgcaaattggaagaacctgcaaaaacaactttggccacagtaaatgtcgcggttggaattactccagagctgcaaaaagtcattgatcaagcaaaagctgactgtgaaaaggttattgaagaaaacgggcaacttaaacagaaaatcgaaatcttggaacaagctaatggtgatagttcagagttaatttctgaaaacacacgtttaaaagatgcagtactccaagctgacaatgctactaaagcggctgaaggaaaagtggtaagcattcaagcagaatttgatgcttttaaaaatgatgttgctgctatgcaagcgcgtatagctgaattggatgctggaaaggcagcagaaaatccagcaacggatacggcgacaaatgattttgaaaattggtcaaatgatcaattaaaagagtttttggccagtaaagatattggctacaaaccatctgcaaccaaagcagaactccttaaattaatcccgaaggaataa

SEQ ID NO: 46416 - DNA, 390 bp, Acinetobacter baumannii
atgagctttattactgtagatgacgcaaattcaattttgggcagcgattttgcaccagacagtgataaagctcgtctggttcaacttgcaaatgtttggatgaaaaacaaaataggttttgtgccagatccaattgatccacttcttaaagatgctgcatgtgaaattatcaaaggaattctggccaaagtaatttataacggcaaagagcagcaattgaagcgtaagaaggtcaaagctgattctgttgagtcggaaaaagaataccaagacggatcagaagcaatatctagttttgaacagatagcaattgactttattgattcacttgatttgaaagatccaaatgcaagttttaatggctttggcataccactttacagggcatga

SEQ ID NO: 46417 - DNA, 369 bp, Acinetobacter baumannii
atgggcttacgtgacgaaattcaggcagacattgctgaagcatttaatgatgatttagcagatgccattcatacctttacatgtgagcggatctctaaaacgaattgggatcctaaaactgaaacttatgttgaagttaaagaaaactattctggccgtggcgttctgtttggctcatacagtcaatatgagatccaaacacttggagtactggccacggataaaaaggcaactgtgctgcagaatgaagttaccaaagagccgatgattgatgacgaatggagtacggcgcaaggtacatatcgcatcatgcatatcaaacaagatccaatcagtgcaagctggaaatgtcagcttcgaaaagtgtag

SEQ ID NO: 46418 - DNA, 405 bp, Acinetobacter baumannii
atggttaataccgaatatgttccagagtggtacatcacaccttttcagcatgtgcaatacacgcttgctagaaatcagcttcacatggatttgttatttgaagatatggatgaagctgatcaatttttggatatgggagcggatgcacaggttagtactttttctgatggtgcatatgcaatcgtccaaattggtgatacggcggataaagacaaaattcaagtatatggattgcttttacatgaagcggttcacgtttggcaaatagtaaagaagcgaatgggtgaaagtgaaccaagtgttgagtttgaagcatattcaattcaagcgatcgctcaagacctatttgaaatgtacgaagcaagcgaggtgagcaatggggtggaaggggaaaaagccgactag

SEQ ID NO: 46419 - DNA, 369 bp, Acinetobacter baumannii
atggggtggaaggggaaaaagccgactagctttagtgttgatgtggtgaaaaatgctgaagagcaagtaaagaaaatcacgatggataccgtgcaatcacttgtagtttcgagtccagttgatacaggtgcttacagagcttctcatatcgtatctattggaactgctgattatggtgttcgtgaaccatcaactaatccagttcaagatgcagcaattcaagcagtcaagtttaagcttggaaatctgatctatattcaaaacaacaaagcctatggtccgcgattagaaaacggttggtctgatcaagcacctcttggtatttacagcactactttcacttacattactcaaaaatatggtggctaa

SEQ ID NO: 46420 - DNA, 399 bp, Acinetobacter baumannii
atgccaatgacattagagcaagctagacaagcaatagtcgaccgtatgatgacctttacaggaatttctcaagaaagaatccattatccaaatgcaccaggtttcttggcaccggcaaagggcttatggtgccgattaaccattaagtggggtccaagtttcattgctggattagccgatacaccctgtactcgacgtactgggaatatcttgattcaatgctttgcaagaccagacacgggagaccaggcaataactattctaagtgttgcattactttcacattttgaatatttcaggattgggcatttagaatgctttcaaggtcaaacgatagatgcgggtaaagatgctgactttctgcagtacaatgtgacgattggatttacggtgaattga

SEQ ID NO: 46421 - DNA, 213 bp, Acinetobacter baumannii
atgtcttacatgctgacgctagaagaaattgaaattaaaaaacaagagcttgaacgacacttggcagatgtaatggctaaggagttaagtaaatggcagttgtctaataaattatgtatttctgatgtaaaaattcgcctcgctaatgttaatagcataaatggaccaaatttaaatattgttactggagtaagtgttgatttggatgattga

SEQ ID NO: 46422 - DNA, 930 bp, Acinetobacter baumannii
atgtcgagtggtgcacgtcagataacacaaatcgcgaaggaaaccactgttggtaccacaccatcacccttcgcacgtacgacctttgaatttactgaaaatggccttgatgcgacagtaacaaaggaagactctaactcaatcacaagtggccgtattgcacgttcatcaatgattaccggtgcagagtatgccggtgaattaaaatgtgaagcgaagtacagcgttttagttcaagacttgatggctgcagctgcttttaataactggtcctcaaatgttttaacttttggtggcacacttcgtcaaacattttctgttttacgtggctttgaagatgttaatgactaccatgttttccgtggatgtcatgtaaacacttttggaattgatattcctgaagctggcttaattacaatgactttcggcctaatggctcttggtcgtacaaacttttcttcagcaccagctggaacaattacagcggcagataacaatcctaaaatgtcgaatgtctctgtaggtgacattttaattgacggcgtttctcaagctgggatttcatgcttgaccgcttttacatttaattgggataacactatgcagctacaacgctgtttaggtggtggtattgatgcacgtgcaatcctagaaatgcttgcaacaggtacaggttcatttaccgcagcttggtcacgaaatacatccgatatgtatgaaaagcaattcactaacaaaacaatttcattaaaagttccaatcactgatacagatgggaataaatatgaaatttttattcctaaagctgaaattactgccccattacctagtggtggtaattcagatcttttaaatgcttcattcgaatataaagtcgttgaagtagccccaaccatcactcgtacaccagcagcagttcctgcgacttaa

SEQ ID NO: 46423 - DNA, 534 bp, Acinetobacter baumannii
atggctttaaaagtaagcattcagactagtaaaacagttagtaaatggcgtaagtatattgatggtgaagggaatgtattagctgaatttaaagtacgtggtatctcatataaaccatatcaagtggcccttgagcgtgcaaataatcagattgcatcaaaaggttatgatgtaactaaagctagtaaagacgacaagctatatcatgaattgcttcttgaagctgcggcctgccatttaattgaggactggaaaggcgtagtttttgaagaagtaaccgaaaatcaagaactgattgtgtctgaaccagaatattcgcaggaaaatgcaattaagttgttgaatctaggcgatcttggtgtggcaatttggttgtttgtgagacaagaggcggaaaatatccaaaaagaagctgatgcatataaggatgaagtagtgggaaagtcattaacctctacaactggaccaagttcaactcagaagaagaagcgagcgactacaacaagaaacaaacagcaattgcaaaagccttaa

SEQ ID NO: 46424 - DNA, 183 bp, Acinetobacter baumannii
gtgaaaagtctggatttaatcaaaatgattgaagcagacggttggtatgaggttagggtttcaggaagtcatcatcacttcaaacacccaaccaaaaagggattagtaacaatccctcatcctaaaaaggatttaccaaacggaactgttaaaagcattttgaagcaagcgggtctaaattga

SEQ ID NO: 46425 - DNA, 405 bp, Acinetobacter baumannii
atgttgtatccaattgctatagaaagaggtaacgacaccgaggcttatggtgttactgttccagatattccaggttgttttagtgctggcgacactttagatgaagctatcgagaacgtaaaagaggctatttctggccatctagaaatccttgctgaagatggcgaggagattccattagcatctgatgtaagtaagtttatagatgatgctgactataaaggaatgatctgggcagttacagaagttgatgttagtcgttacttaggtaagccagaaaaaatcaatgtcactttaccaagtcgtttaattcatataattgatgaaaatgtaggtaaaggaaaaagatttaaaacccgatctgcatttttggccgctggtgctgaaaagctactacatgcttaa

SEQ ID NO: 46426 - DNA, 546 bp, Acinetobacter baumannii
atggactttacaagaaacggtgaaattatgcagaagttcttagcagtaggggtatttagtttaggattagcagggtgtatgacaccaataactcctacacagcaggctatgccagagatatcacaagtaatagaagtgccaaataaatcgaaagatcagatatttgaagattcaaagatatggatcgctcaatcattcaaatctgcaaataatgtcattcagtatgctgacaaaagcacaggttctattattgggaaagggaatatacagtacccttgtgatggatttatagattgtggtgcttttggaaatgatagagttaattttacaatcaaaattgatactaaagatagtaaagcaagagtaacgattaatgatgtaactagaacaaatctgacgtatgttcaaggtggtgtgaacaacctagggaaagaagtccctatcacaattctgcagcatcaacaaaaaattgctgtaaaacttaataatgtaattgaccaatacaagtcagcaattacatcgactaaggctaatgaaaactggtag

SEQ ID NO: 46427 - DNA, 3969 bp, Acinetobacter baumannii
atgactcaagaatcacgtctagtcattactattgattcgaaaaatgcggaacgaaacgcaagaaatctaggcaatgaactcgacagcatagaaaagaaaggggactttgcatcaaagtccatggatagtttgtctgtagcaacaagagcacttgctggacacatggcaggtcttgttacagttggcgcggctatatccaaaatggatgagtatacaggcttacagaacagacttaagttagtaaccaagaatcaagttgagctaaataaagcaactgaagatacatttagaattgctcaaaaaacttatgcgacatggaattcggttttgcaggtctaccagcgttttagtgacaatgcgaaaacactaaacataaacatggacgaaacggcccgcttaactgaaacagtatcgaaagctgttgcaattagtggagcaagtgctcaagcagctgatgcagcactagtacaatttgggcaggcattggctagcggaacacttagaggtgaagagcttaactctgtgatggagcaaacccctgctttagcaaaagcgatcgcacaagggatgggtattactgtagggcaactacgttcagttgctgctgaagggaagattacatcaaaagaaattgttaaggcccttaaaaatgttcaagatgacgttgatgctctttttgcaaaaacagatatcactatcggtcaatcactcactcttttaaacaacgagatcacaaaatttgtcggcgagtcaggtaagggaagcggtgcggctcatgtgcttgctgattcgattcagcttcttgcatcaaatttaaagttgatttctgatggagcactggtgttagggattggacttgtaactaaggcaatcgctactaaaaccgttgcggtatatgccgatgttgcagcaactgccgcaaatgtaaaagcaagcaaagaaaaggttattgcagacgcagctgaagcagccgctgctgtaaaaacagcacaggcgcaaatagcaaattcacaagcaacattgcaagttctagccgctgaaaaagcattagaagttgaacgactaaaagcccaaatgaatgcggtcggtcgcacacaatcaattacgcgtatggccgaattaaagaaaattgaggctcaggtaacgcgagaattagctgctgctgaaacagcattagcagctgctcaaactaaggccaatgccacaaaagtgacagccttaacaacattaggacgacttggaaaaggagctttaggacttgttggtggaccaattggtgcactcgctttgggcgtttcagccttggccgcaacatacacttattttaaagacaaggcagaggaggcaaataggaagctcgaggagcaagctgcggtggctaatcgatcagccacggagttgaaaaatttgcaaggtcaagccaaaacagacgcaattaaagacttaacaaccgcattcaaggctcaaaatgatgagcttacaaagatggaatatcgggtaggttctgcgttaatcgacattcagaattatgcacaaggaaatgctgaagtagctcggatttcaaatgaagcacgtttaggaaccattagttatcaagaagctttgaaacaactagcgaaagtgaaattaccacctagcttaagacaggcacttgaagaacaaattgaaaaatataaggatgcatacgataaagccgataagaccaaaacagcaattaaattgtttggtattgaagtaaccatatctggtaataaggctcagaatgcagctattgaacagcaaaaacatgctgatgcaattaaaaatacaaaacaagcagcagatgaggcgcaaaagtcactgaaagaaatgtatgatcaaaaaaacttagatactgattttttaacgatcaacattaaaagtcatggactggaaatgggtaaggcgttatcagatttttacgataacaacaaaatccctaaaactcgcagtttaactaaagatgaatgggcaatattccaaaaaaactttgataaggtgcaagagcttaaaaagcttgaggaggatattaccgcttctaagagacagcaaaccaaggaacttgagaaacagcaaaaagttttagctgttaactcccaagttaaatctaacgcctcaaagtataatttttccgatcttgaatctaaatatgacttattgcctggcctgctatcagcaatcaacatgcaagaaagcaggggtgatgcaaacgttattggtccgaatacaaaatacgggaaagccaaaggtgggttccagatgttggatggtaccgctaagcggtggggattagttggtaaagaagtttttgatactggtaaagctgcagaagcagctgcgaaatatcttaactttttatttaaaaagttcggcaattgggatcaagcaatttctgcctatcatgctggtgaaggtaacgtagaaaaaggtactaatattggtcctgtaaatagacagtacgttaaaaacgttaaaggatatattgctggatcaaatggttttgatatgaaaggagtctctgaaaaagatttcgattcctaccttaatcaatttcttaaaacgcaagaggaaactgaaaagctacgtgatcagtatcgagataaagatacgcttgcagagaaagaatatttaaaaagaattggtgagttaaagttacattttaaagatgcagagttaaagcaactcacggataaagaaacagcacgttacaatgctcaaaaggagttaaacgctgaacaacttgaatttgaattaaatgagttccgtttaaatgaagttcaaaagctggaaaaacaaaagcagattaaattacttcaaatcaaagcatcaactgattactctgaaactgaaaaagaaattcgaatcaaagctgttaatacaatgtttgattatgaaatttctgagtacagaaaactccaaaagcaaaaattggaggagtatcgaaaaacaatgtatgagcaagcctcaataccacaatcagatgttattaatttactagctaaaaagaacctaacttcttcgcaatatgattcatggaatctacagaatcaatatagtgatgaaatgcagaatgctaatgatacatattcctcaaatgttaaagcagtttcagaagataaaacaattgttgatgaagaaaagcgattccaagctttattagaggctgaagaacttttccgtcagcaaaagtttgctattaatgaaaaatacactttgatggaacaagagcttcagaagtcatctcggcagacagaaatagaaatttatgggcaattattatcccaagcgtcaagcgtatggggaaatatgacagcaatggtaaaagagtctgctggtgaacaatccgctgcttataaggcaatgtttttggtacagcaagccatggcaatggggactgcaacgattcaagcatatcaagcctacagtaatgtattagctaatgcgccttatccattaaatatgactatggctcctattgctcttgggcttggtatggctaatgtcggcttaattgcagcccaaacaattgctggcttctctgatggcggttataccggtaatggtcttaaacacactcctgcagggattgtgcataaaggtgaggttgtttggtcgcaagaagatattaaacgctggggtggtgttagcgttgttgaaagtatgcgtcaaagcaatccaagtggttatgcgaacggaggttacgtttctaataatcagtctgatgctattgcaatacgtagagagtctagacagtttgaggcaatcaactctaatcaatctcaattgaatacgaacgaaaagccaataaatgtgtatgtcactgttaatgccgatggcacaagtaaaacagagacagaaaacgactcaaaacaattgggccaaatgattggtaatgcagtaagaactattattcgccaggaacaaagacaaggtggtttgttatctaagtaa

SEQ ID NO: 46428 - DNA, 342 bp, Acinetobacter baumannii
atgagtgacttaaaatttacctttgagtgtgatcttgaaggtaataatcaaacccaacgttttaatacgttatcaacaaaatttggtgacggatatgaacaaaatacttcaattggtataaacaatcgatctggtgaatggacctatcagcgcacagctaagaaagctgaaattttggaaattaaagcattctttgataagcacaagggtgctaattcttttctatgggattcgccgttagatggtgaagtgcgcgttaaagcaggggattatcaaccagtttgcttgggtggagatacgtggcgcattacaaccacatttactcaagttttctatccataa

SEQ ID NO: 46429 - DNA, 351 bp, Acinetobacter baumannii
atggctattaaaactttagatcttgctgaagcatatattgtcggtgaattacgcactcaattattagatgcacgtagtttcgggaataatttgcctgctggcagaattgaaactttagcgattaattatgatcgaccttctgattcagtgaatattgctgttacaccaggtggtggtttaaacggaagtatgactttacttgatgctgacatcacaaagtgggcaattcaaacgatcttaaacacagcttatctctatcaggtagatgtaaacactttaagccttaaatatgacttggctgctaaaaaaattactattgaatatactccagttgtttcaggtcaagcttaa

SEQ ID NO: 46430 - DNA, 699 bp, Acinetobacter baumannii
atgactttacaaagtgacttccagaaacttgaaccaggtggattaattcacctgtatgaattagatgccagctcgtatggagttggcattcttcgatttcatggccatcagcaaatggaaagtattttttggcagggtcaggagtttgaagctattagtctggatgtctctggtttagaaatgagatcagatggtaaggcttcggctcccacattaacaatcgccaataacctgaacggaatacaaggtgcaatttcagcttactgtctccaatgtaaagatttcgttggagctaaactcaaagttataaccacactcaccaagtatcttgatgccaagaactttccagaaggcaatccaacagcatcaaatgaatcaaaagagcagatttggtatatcgagcagaaaacatctgaaaatgctcaacaagtaacttttgagctttcaaacccgattgattttgaggggttgagaataccagttcgtcaaattacttcattgtgccattggtgcacgatggggaaatatcgtggtgaagaatgtggttataccggcgctgctatgtttacagaaaaggatgagccaactgataaccctgcattagatcgatgtggaggaaggttgcgctcttgccgattacgctttggagaaaacaagccccttccttttggaggattcccagcatcaagcttagtttga

SEQ ID NO: 46431 - DNA, 792 bp, Acinetobacter baumannii
atgaaactaacagcaaaaatcaaaaaagcggtaatggcccatgctgatgaatgctatccgcatgaatgctgtggggtcattgtagacaaggaatatatcccttgtcgaaatgtagcaaacaaatcagatcagtttgaaatacatcctgaagacttagcttttgcagaagaccagggcgagatattagcgtatgtgcattcccaccctgacggaactacaagagcctcagaactagacttaattcaaattgagttacatcaaaagccttgggtaatttgttcctatccggatctagattttcaaatatatgaaccatgtggttatcgcgcccctttagtggggcgtaattattttcacggttggcaggattgctacgctcttatacgcgatttttatagtcgtgaattaggagtcgagcttatggatttcgagcgtaaagatgcttggtgggaagataaagatcatccatcactttatcttgagaattatgagaaagcaggcttctatgaagtagatacgccgcaatatggcgatatgcttgtttgtcgtgttgggcgtactgaacatcccaatcatgcggttgtttggctgggggataatgggcagcttaaatcggaacaaactgagcaatgcataggttcaagtctaattcttcatcatccatataatcgtaaatctgttcgtgaaatttatggccaacaatggcaagagcgaacagtaaagatattgaggcatcgagatgttaaaaaccatcaaactgtatggagtattgggacaaaagtttggccgtga

SEQ ID NO: 46432 - DNA, 672 bp, Acinetobacter baumannii
atgttaaaaaccatcaaactgtatggagtattgggacaaaagtttggccgtgaatttaaacttgatgttttaaatacacgtgaagctatgcgtgcattagcagtacaagttgaaggtttcgagcagttcatgttgaaagcacatgagcaaggactccagtttgctgtatttcttaagagtaaaaattcaagcaaaaagcgtggaaagaaaagcccatcaatttatgaccatgaatcaaaacgactgattactggagacaatatcagtgaagaccagcttgatatgaatactcaagctgaaattattcatgttgtgcctagagtagttggagcaggcgggggtggtggccttcaaacaattatcggggctgttatggtagttgtaggggtggttgtaggggtgtttgctggatggactggtattggtgcagttgtggcacaaggattaatcggggcgggtatcggcatgatgcttggtggagtcgcaatgatgcttatgccaaaggtcgataatactcaggaccaaaaccaagatggtaatagggcaaaccaaggattcggtggagctgtaactacggttgcccaagggaaccctgttccagttttatatggccaacgtgaagttggtggattcattgtgagtgctggtcagtatcctgaagaccagatgtag

SEQ ID NO: 46433 - DNA, 8283 bp, Acinetobacter baumannii
atggcgattgtaaaaggcgcgaaaaagggcaaaggtgaggcaagaaaacctgtagttgctccagattccgcacaatctaaaacctatataaaaatcttatatggtttaggtgaaggcgaaattgaaggattagccaatggcaatcaatcaatatttcttgaaggaactccactacaagatgccaatgggaatctgaattattcaaacgtaaaactagatttccgtaaaggaactaatgatcaagattacattgaaggttttccttcagtagaaagtgaaactgctgtcgatgtcgaattgaagtcaggtgctccatgggtacgagcttttaataatattgatcttgatgccgttcgtattcgcttaaagtggggaccacttcgccagcaggactcaagcactggtgatgttagtggtataacaattgaatatgctatcgatatacaaactgacggtggtgcctggacagaagtattaaaaacaaaaatatccgataagacttctgcaaattatgaacgagctcaccgtattgatttaccaaaggccgatagtggttggttaatccgggtacgtcgcattacacctaattcaacctctgagtttgtaagcgacaaaatgtatgttgaggcatttactgaagttgttgatgcaaaattaagatacccaaatacggcattattaggtctgcaatatgatgccgaaacttttggaaatgtggcgaaattagctgtagatctgaaaggtcgattgcttttagtaccaaccaattacaacccgcaaacgcgacaatatactggaatttgggatggtacttttaaaagagcttacacaaataacccggcatggatttactacgacctttgtacaaatgatcgttatggtttaggaaatcgcttaaccccattcatgattgataaatggtctttgtaccgtttagctcaatactgcgatcaaagcgtttccgacggacttggcggccaagaacctagatttacatgtaatgtgtacattcaaaatgctgaagatgctttcagtatattaatgaaattggctggtgtctttcgagcgattgccttctgggatggtacaagcattatatgtgatgccgatataccacaagacacatatttcacctatacccgtgcaaatgtggttggtggtgttttcgaatactcaggaacacgtgcacgtgatcggcataatgtagttaaggttgcgtgggataatcctgcaaatcactataaaacagaatacgaatttgttcgcgatgaaaatgctattgctgagtctggccaagtacgcattcttgaattagatgcgtggggatgtacttctcgtggccaggctcaacgtgcaggccactgggctttaaaatccgagcaaaaggagactcgtacagtttcgtttaaagtcggtttagatgggcatattccactgccaggaagagtaattgaaattgcggatgaactgtttgcaggacgtgctaatggcggacgtgtatctaaaatttctgctgatctcaaaagcataaccattgatcgagatgacgttattgctaaagctggtgatcgtctggttatcaatggcgaaaatggcaaagcacaaacgcgaattgttcagtcgatctctggtcgggttatcacagtaacacttccattcgataagaattcaattgctgtacaaaacgtatgggttcttgatgctcaagatttagcgacaatgaagttccgcgtaatttcaatctcgcaagaagaaaaacaccaatttagcattacagcgcttcagtacaacccgcaaaaatttgatgaaattgataacggggcattctttgaagatgcacctatttcaattattaatccttcaatccaggaaccggttaaagatgttttgattacgactgaaagtcgtgttgatcagggtattaatatcaccacaatgattgtgtcttggatgcaagcgaaaggtgccgttaagtatctggttgagtggcgaaaagatgatggatcgtggatccggttaccgcaaacaggaaataattcagtcgaggtacctggtgtttattcaggtcaatatcaagctcgtgttaccgcaatttctgcttttgaaatcgcatctttaccggttacatcttccttaactgaaattactggaaagcagggattaccgccgaaaatagcttttatacgtgccacaggtattttgtttggaatgaagcttgattggggattccctccaacaggtgcaaaagatacagcttataccgaaattgaagtttcacctgatggcatcaacaatattgctcaattaggattgtttgcatatccgactaccactaccacaatccaaggtttacaacctaatcttagacagttttatcgcggtcgattaattgaccggattggcaatgttggtccttggtctgaatgggtcaatggtacgaccacagcagatccggaagcggttcttgatcttatttctggtcatattaatgagagtgatcttgcccaagagcttcaaggtaaaattgaaaattcagtcgatgtatctgaagcagcccaaactgcagctaacaatgcccaggctgtggcctctgaagctaagacggcggcctcgagtgctcaatcggcagcaaccactgctcaaacacaagcttcttcagcccaaaaaatagcaaatgatgcgagtgttatagcgaccaatgctaaaaatactgctgatcaggcagctgaagatgcgtcttcagcaataacggcagcagcagaagcaaaaactactgctactaatgcgaatacgaccgcaacgaatgcacaaacaaccgcaaataatgcttcttcggcagcatcaaaagttgcttcagatttaacaacctcaacaaatcagttgaataagaaaatcgctgatgaaactgatgcacgcacagcggcaatttctaaactgaatgatggtctcaccacagaaacgtctcagcgcaagtcagaagatgctgcgttgttaagcaacattgagacgttcaaatcaagcactaaaggctcgttatctagcttgcaagagcagatcacaacgaacgccacgaatacagatgccaatgctcagaaaatcacgtcgcttgattcccgtttgaccacaaacgagggcaaaaccgccgaagcgattaattctgctgctacagctcaacaaaccgcaagtacagcggtagacaaggctaacgctgccgcaaactccgttacagctcttaaatcagaattaagcagcggaaaaggcattaataacattgttgcgcccttctcggacccacaagaacttccagctctaggtggagcaggtcgtaccgtagctttagtggactctgcgttacgtcgaaacggtaaggcttacaaagtgtcattcacggcggcggctcattatgtgtatttcggcaccgctcaggccgctctagcgccatcacaaatggcgatgcaagttgaggcggggcgcgcttatacatttagcgcttggttgaaggctttatcaacggccgttccatcattccgtttcaacatcatgtggtttattcgtgaccctagcactggaaacatcacaacaaatgccggaatcatttttccacaaggtcaaacagattcttacgttgctccaaacgctaacggtcaacgttattcctttaaaccagtcaactcacctgcaaacacaatcggcgcaaccgtctatgttgtaggcaacccttcggggccttctgccggcgaatacctcatcgatatgttgatgctagaagagtctgtcggttccgaaaagcctgcttctacgtggacggcgggtcctgctgatctaaatgcgattaagaatgccttagatacaaacgctgtagcaatcaacaacctaactacacgcgtttcgaacgacgaggggaaaattacatctcagggcaattcgatcacgcaactaaacaacagcattaatacgattaatggaaccctttcaaacaaagcggatgctacggctttaaatgcattaacaactcgcgtttctaatgctgaggggcaaatttcatcacaagggtcgtcaattgtctctcttcaaaacgatctagcatctaccaacaaagccgtttcaaccaaagctgactcaagcgctctcaattctttggattcaaaagtatcagaaattgatggtcgagtaacaagtactgccaatgccgttacctcgcttcagggcagtgtttccagcattgagaaggggctttcaactaaagctgacgcgtctgcattaaacaactactacacaaaaactgaggctgattctgccgcctctggcgcaatcgacaagttcaacagtcaattgacgattggtggtgtaaacgttgttgcgaactccgaagctcctcgcacttcaactgccgcaacgaatcgcgaatatttactgtatgaacgtagcgccgaattaaaagcgttctatgacgaaaaccttgagaagccaatcacgatttcgtttgaaatgagcgttcctgtggctggaccggttcaagtttattcgtcaaatggttctgctcaccaattcgttacttccgttaatgcaattatcgtaaatcaatttgccaaatattcagtaacagttagtccaaaagcgcatacggcaagtacaactgtttcgacaattgagttctatggaacgtatggaactggccgtatcccgacgattcgtaaattacaaattgaagcgggcacaaaggctaccgcttggagtccaagccctcgtgatacaaaggctgcaattgacgccaatgcttctgcaattcaaacgacccaaacaaaagttgacaatatcgatggtcggctaaccactgctacagattcgattacgtcactaaattcgcgcatgtctacagccgaaggaaatatcaacagcacaaatactgcggttggtggactttcgacacgcatggcaaccgctgagggcaagatcaccaatcaaagtgattcaattgcatcgctacaaaatagcgtcacctcaatcaatggaacactggcaaacaaagccgattcaagcgcggtcaataacctaactagccgagtggaaacagccgaaggcaagatttcaagtcaaagcgggcagattacttcgcttagcaatagccttgatctaacaaacagtaacttgaacgacgtaaacgttctggctcgactgttatctcttggcaagcctttacgtgacgacccaacttttaaaactacctctgcgggcgggttgtctgcatacagtttccctgcgggcacctcatggattaagcaagccaagtcaacggacaacccaactggctcaactaatgaaatgctgatcaaagcgactcaagctttgggcggtggctggtatccaactgcacctacgcttgtactcactgcaaataaaaccttcttaattaaacaaattattaagatgccagtgggtacaaaattacaagccatcggtaatgctacgggtacgggtggatacatccgaatcttgggtaatgatctaggaactggcaaatttgaaacgtactactctgtcgtacaaggtggggctgatttaagtggctctactattcaaggtcatttccgcgtaattgccggtactaacccgccagtaccaacggttgataatccagtctttgtcattcttgcttcttatgaagtatttgatgtaacggctgtgaacgacaccattccaaaggcttatagcgatgctattgcagccaatgcgaatgcgattaacaccctatcaaatacagtcagccagcagggtaataccattacttcccatagtaattctattacccaactcaacaacagcatttcaagcattaatggcgcactttcgagtaaagcggatacgagcgcattacagtcgcttgattccaaagttacaaatattgacggccgtgtaacttccgcatctaacaatattgtttcgctcaacaatagcgtcacaaacatcaatgccacccttgctcaaaaggcagatgcgacagcgttaaattcgctctctaaccgcgtaacaaatgcagaaggaaatatcacaagccaaggtaactcaattacctcattgactaactcattagcagttagcggaaaaggtggaactaaccttctcattaaatcaaatgtagttggcttgtatgatggcgtctcatacccacaccacacttacaaactaggtgaagattgggaaattggcgctaaatacaccttgatctggtgcgctgaacataaacgagggactggcgataacaactcttacctagcggtttacgcgggtggtggtagccagactttgcaatctattgttaatacagacggtaaggttgtcagcaaagttacctttgttaaaaacagcgcagttgcctctggcccaattatccacttctacatgatcaaccgtccgaccgcagataagggcactatcggtactgtttattgggcagttttagtcaaaggcgatgtactcacaacagatgcttggattccaagtccatatgattatatccccgatagcaatgcaaatgccgctgctatcgcaaatcttactaatacagtaagtcagcaaggcaatattattacatcaaatagcagcagcattacctcgctcacaaatcaaatcggtaatacgaagtcatattcgctggtgactttccgtaacagctctgccgttggcatgccaaaggcggctggcgtctacactggaaacaatacgcgattatatggatttgggcgcggtttaaatctcattgtgtttaaaaatggggacgttgaaagctgtacgcaatatgacacctatggcgacatcgtatctgcatgtaacgccatctatgccgctatcaaggcgcttgcatcgggcacttactttgcaatcgtgggtacagacaacattggctcagttggaaattcaaacccaaatactgatttacgtgcgcttttacttgcttgtggtgctggcgacacatatttcagatcttggaactggaatgctcttcctatttttgtaggacgcaaagacctagatgaaggcaatggtattctcggtatgtttgattcgactgttcctaatcagtggattgaatacccgcttacttttgtgaatggtgtacctgtaggtttaggtgactctcgaactttgacctctcaactggacgcaaatgcttcagccatttcttcattgaccaacacagtcactcagcaaggtaaggatattgcttcacatagcagtagtattacctcgctaaacaatagcatcaccaatattaacagcacattagcaacaaaagcagatagttctgcgcttacaaacctcgcaagccgcgtaaccgcaacagaaggtgcaattacatcccacggctcaagcattacttcactgaatgcatctgtgaatggtttattaaaggatgtttcagtatccgatacgcggtcaacaaatcagccgccgtcatggtactggtcaaactatccattacgtatcgttcgcgagttcaaacaagcatctgtgctaggtttaactggcatgggcacttatgtctctcttgaaacatacgtttattggactgacgcatctggtggcccaattattcaaattgcacgcggcacagattcgaaacttactgctgaacgtcgtagtgcgagtacagcggcatggagtacatggacacaagatataaaagcaataagtgatgggcttgcaaataaggctgaagcatccgcactttcatcacttgactcgaaagtgtcggttattgatgggaaagtttctactcaggcctcaagtattactacactgcaaactacagttggtggtaatacagcctctattcaatctcaacaacaatcaattgatggcctgaaagcaagagcaacattgaagctgcaatccggcaatttggttggtggcgttggcattgagaatgacagcaaaacagtcgatttcatcatccaagctaataagtttgcaattggtgcgccttcaactgtttccggctctgtgacgcctaaatatgcattcgtctatcaatcaacagcaacaactctgccgaatgggacagtgattcctgctggcttgtacttagacagcgcgtctattagctatatcaacgccaacaaaatttatgcagatagtttaagtgctattagtgcaaatcttggtacctttacctcattggcagatcaatcaaaaccaaatggtgctaggactgtaattagtggtgagaggatcgaagtttacgacgaaaacaatgttatgcgtgtacggattgggagatggtaa

SEQ ID NO: 46434 - DNA, 324 bp, Acinetobacter baumannii
atgcccacaggaatgataataaattctgaatcaggggaagttgtttttgatggaactgtgaagatccctaaaatactagggaaggttctaatcgagaatggacaaacttcagcagtattaaaccttaacaagccacttgatggcacgatgttttttattccaaaaggattagcaactacagtcgatccaatctatgcccctttgggaattaactatgaagtaagtcttagttctaacaagcaggttgtaacggttaaatacatcgcgaccagtgagcagccaaaagcagggactgattttgaagtttatattggtgaatattga

SEQ ID NO: 46435 - DNA, 726 bp, Acinetobacter baumannii
atggataactatttcttagtaaagaatgacttcataaatgctattgatgatgactatttcaatcttgcatttattagaaaacaacgttttaacttcacatctgaacctgggattacctattactatcgtacttttgaagtagatataacagggatagattttcctgttattgcaattagttgtgtttgtccttctgcttatttaagtatgaaagccaatacgctttctattgtttgctcagcaagtaattatgatggtgtggctaattcagttagcaatttaaataattcatctaagtatttagatgtgtttgtttttggtcgattgcctagaagcagtattccagaacatggtattggtgtagtctgtttagatgcatcaagtaaagtagtttattacagtggtgcagagtatttgaaacccataaaaatgtttattgatcccaatacttatcgaccaatgtttaattcaaactacaatactcaggtcgagtatttgccgattggcaagtcttatgcatgtattcccttaaatagagtaaatactgtttattcggagtggacgcctgaaggtcaagatgtcatagcaatgtcatcagtttgtgctattgagggcaatactattacttatacctcaaatcaggtgcaagtcgcacaagatattagtgctgtttacaatggatattgtagacatatgtacatgttaatcgatgtatcgaactattaa

SEQ ID NO: 46436 - DNA, 294 bp, Acinetobacter baumannii
atgaacgatcagacaaatagtgtagttggagcagctgcaagcacggctgccgcgactgcaacaaaattcacttatggttatgtagtgggagggagcttgatcggtgttattggcaaaattgattgggctgtagtcttttcgattttaatcggtatcgcaacctttctgacgaatctctatttcaaaaaaagagatgataagcgtaaggatgagattcacgagctacaaacgaagcaatatgagctaactaagaaacgattggaagggggttcagatgacaagcgaacagactag

SEQ ID NO: 46437 - DNA, 225 bp, Acinetobacter baumannii
atgacaagcgaacagactagagcttatctggcttttgcacttgtggcgttaatgttcgtactggttattgctttattttttgtgaatatgccacgtgagaacagcaatttaattaatacagcattgggtttcattgcgggggcaatgacaactgcctgtggattctatttcggaagctctgaccaggaaaagaaaaataaaactgaggaatcaactgagcagtaa

SEQ ID NO: 46438 - DNA, 543 bp, Acinetobacter baumannii
atgaatatcgaacaatatcttgaagagttgatcaagcgtgaaggtggatacgtaaataacccggcagaccgtggtggtgcaactaaatatggcatcacacaagctgttgcgcgtgaaaatggctggaatggcaatatgaaagatttgccgcttgatgtggccaaagctatttacaagaagcaatactggacagctccgcgatttgaccaagtaaatgctgtttcttctgcagtagctgaagagcttctagacactggtgtgaattgcggtaccggatttgcaaaacctcttttacaacgagctttgaacttgcttaataaccaaggtaaagctggatatgcagatttagaggttgatggtgtttatggctcagcaacgctaggtgcccttaaaacatacttgtcaaaacgtgggaaagaaggtgagaaggttctggtgcgagtgctcaatattatgcaagggcaacgctacattgaaatctgtgagcgtaatccaaagcaggaacagtttttctatggctggattgctaaccggatcggctag

SEQ ID NO: 46439 - DNA, 195 bp, Acinetobacter baumannii
atgtcttcacagttaatcaaaattcattatcatgcatattctcgcgttgcagatctattagcagatctagataagaaaggagaggtcactaaaatttatgacctcaatggcaacgaattaaaaattaatttcttgcgtgacgaagtttattataaaaaagtctggtggcattttcagaagaagcaaggcggttaa

SEQ ID NO: 46440 - DNA, 1197 bp, Acinetobacter baumannii
atgttaagtgactcaaaaattagaagtgcaaaaccgaaagaaaagctttataggcttggtgattccgatggtttgtgtgttgaaataaaacctaatggcaagaagtattggcgctatcgttttcaatggctcaaaaaaacacaaatgatgagcttaggtgaataccctattgtgggattagctgaagcccgtactaaaagagatgaagctaaatctttagttgcaagcggtataaatccagttgaagaaaaagaaaaccaaaaaaaggctaaatctgatgagtatgacaatagggttctctttaaacatgttgctgcagaatataaagcagaaaaattaaataatcgttcagaaaggtatcaagaagcttttcaacgcgccttagataaagatattttaaaagttattggtgataaggatattaaagaagtcacctcagcagacgttttgactatcatgaaaaagacgattgcacgagttaagcgtcaaaaaaaccatggtactggcgaagtgtcagcaattcaaaatcgtacttttattggcggcgtaatgcgttatgcaatcgccacacttagagccgactatgatccaacctatgccgttaaaaacgttgtagaacgtcccgaaatagaacatgccagacccatggaaaaatatgaggctgtgcaacttagaaataaattaaatagctatggtggatctactacagttaaaaatgctggccttgtaatgctctactctatgctcaggactatcgagatccgccgcatgaaatgggaatatgttgattttgaagctagaacaattacattcccaaaagagatgatgaaaaagaaacgtattcatatcgttcctatgtctgaccaagtttttaatattcttcaagaacagcgcaacattgtaggtaatcgtgaatatgtttttccagccatctatcaagatgggatgctctccgctactacaatgaataaaatgctcgattacattggcttgtctgatgtcactgctcatgactttcgtgccactgcatcaaccttgttaaatgaaaaggattacgatgacaaatggattgaaaaacaattagcgcatgcagatggtaataaaactagggccacatataaccatgccaaatatttagaaagcaggcgaaaaatgctacaggactgggctaatattgtggatagctgggcggtttaa

SEQ ID NO: 46441 - DNA, 1716 bp, Acinetobacter baumannii
atgcgcgcaagccgctttttatttgcaacgttgagagaaaccccaaacgatgctgaagtgatttcacatcagctcatgttacgtgcggggatgattcgtaaattggcatctggtttatatacatggctgccgatgggaacacgtgtgcttaaaaaagttgatgccattgttcgtgaagaaatgaaccgttcaggtgctatggaagtgttcatgcccgtaactcaacccgcaagcttatgggaagaatcaggtcgttatgaacaatatggtcctgaattattacgtttcaaagatcgtcacgacaacccgtttgtgcttggtcctacacatgaagaagtgattaccgatttagcacgtaacgagctaaaaagttataaacagcttcctgtaaatttctatcaaattcaaaccaaattccgtgatgaaatccgtccacgttttggtgtaatgcgttcacgcgagttcatcatgaaagatgcttattctttccatgcaactcaagaatcattacaagaaacttatgatgtgatgtatgacacctatagccgtattttcactcgtttaggtttagatttccgcccagtacaagcagatacaggttcaattggtggttcagcttcacatgaattccacgtattagctgcaagcggtgaagatgacattgcattttcaactgagtctgattatgcagcaaacgttgaaatggctgaagctgttttagtgggtgagcgtgcagcgcctacacaagaatttaaattggttgaaacacctaatcaaaaaacaattgctgatgtttgccagttcttaaatgctgatcctaaacaatctgtaaaagccttattagttcaaggcgttgctgatgagaaaggcaatgtacctgtcgttgccctattcttacgtggtgaccacgaactgaatgaaattaaagccgagaagcatcctttagtggccgctcctctcgcgtttgccacagaagaacaacttcaagcatttggcttaactgctggcttcactggtccacaaggtttagttgaaaaaggcatcactgtaattgttgaccgtgctgcatctgttctttctgacttcgttgctggtgcaaatgaggcagacaaacatgctgtaggcgtaaactgggaacgtgatgcacagattactgaagttttcgatttgcgtaatgtggttgaaggtgacccatcgccagatggtaaaggtatactacaaattaaacgcggtattgaagtgggccatattttccaacttggtactaaatactctgaagctttaggatgtaaagttctcggtgaagatggcaaaccatttacagtaacaatgggctgttatggtattggtgtgacacgcgtagttgcagctgcaattgaacaaaactacgatgacaaagggattatttggccacaagcgattgctccttttgaaatcgcaattgttccaatgaatgcacacaaatcaccacgtactcttgaagcagcagaagcgctttatgcagaacttcaagcccaaggctttgatgtattacttgatgaccgcaacgaacgtccgggcgttaaattctctgaccttgaattaatgggtattccacaccgtattgtgattggtgaaaaaggtcttgatgcgggtacttttgaatataaaggtcgccgtgatgctgaagcgagcaatttaactaaagaagaacttttagctaaattagcgcgttaa

SEQ ID NO: 46442 - DNA, 1464 bp, Acinetobacter baumannii
atgcgtatttttcagcgaattcatcaaaagttaaattggtcaggacgtcgttatatggcggtcatactttgcgttgttgctattgcatatcttgcatcggcaatttatcacacagtgaaaccattgccgcaaggaattaactttagtggcaagctcagacatgccgatgttaaatttttagccgataaaacgtatattgatgcgaatgggcaacaacaggttgatcagcacatctttgatgaaatcttgaaaatgattgatgaggcaaaaaccacaattgtggtggatatgttcttatttaattcagaagtaggcgattcaaaactaaagcaaagaccattgatgcaagagctcactgatgcactaattagtaaaaaaagacaaaaccgtcaaattcaggttgttatgattaccgacccgattaattcggtatatggtggactaagccctgaacactaccgtcaattacgccaagctggtgttgatgtcatcgaaacgaatctagcacctttacgtgcttctaacccattctggtcggggttttggtacatctgttgccaaaatattggcaataatccagagaaaggctggttacccaacccatttggcgatgaaaaaattacgctacgtagttatttgaacttatttaactttaaagcaaaccatcgtaaaactattgtcgttgataccgatgcgggttggaagtcattggtgacctcagcaaacccgcatgatggtagttcgcgccattctaatgtggcattgatggtaaatggagccacagctactgatgtactccaaaccgaagctgctgttgcgcaaatgtcaggaagtagttcaccatcacttattttaggcgattttgaaaaagacgttagcaagcctcaagttcaagtgctaactgaaggggcaatctatgaagctgtattaaaattaattaatacggctaaacctaaagaacatcttgatttaagtatgttctatttgtctgaacgtaagattattaaagctctaaaaagtgcccaagaacgtggcgttattgttcgtgttttactcgatccaaataaagatgcgtttggtagacaaaagaatggtatcccaaaccgtcaggtagcttcagagttacatgctgctggcattccaattcgttggtgtgatactcatggcgagcagaaccatagcaaaatgatcttaaaatataatgctcaacaagctgagttaattgtaggatctgccaattttacagcccgtaatttaaaaaattataaccttgaaacggatatgttggttgtaggcaaagttcaagatcaagtctttaaagatgctcagaattacttcaatacttcgtggtcaaacctacaaggtagacagatgagcgtggattatgcgaagtatgccgatgagtctaaagtgaagtattggatttatcgttttatggaatggtcaggtttatcgactttttaa

SEQ ID NO: 46443 - DNA, 1863 bp, Acinetobacter baumannii
atgtctaagtcttttcaacctactcgtctggtaggggctatcgctattgcgatggggttttcacctgttatttttgctgaagatacaacgaatgtaactcagcttgatccaattgtagtgactgcttcaaaaagtgctgaaaaagcaagtgaagttccggctcgaatttctattattgaacctaaaattgtagaacagtcacctattgctgaattaccacacttattaatgagtgatgcagctattaatatggttcaaagtggtggcttagggcaaacatcttcaatttttattcgtggtactaattctgagcatgctttgattttacgtgatggcgcacgtctgaacactgcctcaactggtgcagcaaatcttgcatttattgataccacagatattaaacaaattgaaattctcaaaggaccagcatcagttctttatggtacggatgctattggtggtgttgtacaaattatttcaaagactccagaaaaaacctcagcatttgtgacaggtgaaattggtgaaaataaaacttataaatcgattgtaggcgcagatcttgccgaaaacggattttatgcgcaagttcgcggtcaacgtttagagtctgacggttcacgtatcactgatctaaaaggtaatgacattaaaaaagcctcttatgatcaaaaaggcttcagcactaaagttggggtagaaaaagaagatttcggggcatctgttgactacacacaaaatgaaggaacaagccaatacgatacttttcgttatgatggttcattgacttctcaagatttcaaaaatgaattacttaatattcgtggccgtgtaaatctcaattcagatatttctctaaatgcaagattatctcaatttaaagatgaacttgatcaaaatggttcaagggattttgtacatagtacgacaaaagaagcagaggtttacggcaaatggcaattcacctcatctcaaaatgtattggcaggcgtaactcatcaaaatattgatggcgatgtactctcttatggttcgccttacgatgaagatgtcaatagcacaggctatttcgtacaacatcaatatcagaacaatggtttaaatacccaagtcggtgttcgtgttgaagataacgaaaaatacggaacacataccgtggcacaaggtgcaatccgttatcaacttttaccattgacgagtatttatgccaacattggttcagccttcaaagcaccaacactaaatgacatgtatggttctggtggcaatcccaaccttaagccagaagaaagtatttcttatgaagtcggtatagatcagaaattaaattacaatattgcgactggcctttctgcctattacaccaaaatagacaatctaattgaatcacgctgtatagctgtatgtaatggcgattggataaatacattccctgtttatcaaaatatcaacatcgacaaggcatctatgcgcggtggtgaagtctatgcaaattggagtagagatgacttatttattaaatcatcttataactatgttaaagctatcaacgatgaaacagatcaagaattatcaagacgtcctcgtcaaagctttactgtaagtacgggtttacaaaatgaacattacggactgagtatttcactttctgcaaaatctaaagcgaaagactacaaacaagatacgccaggatatacaactgttgacttcagtggttactggaatgccacaccaaacgttaagctttttaccaatatccagaatattggagatgtgaaatataaaactgcttcctatgataaaggcatctattacgtaaatggtggccgccttgcatcagctggtgtgaccttaagctactaa

SEQ ID NO: 46444 - DNA, 2724 bp, Acinetobacter baumannii
atgttggcaagtctgatcggaggtatcttcggtacaaaaaatgagcgtgaactcaaacgcatgcgcaaaattgttgagcaaatcaatgcgctcgagccgacgatatcagctttaagcgatgcagacttatctgcaaaaactccagaattcaaacaacgttataacaatggcgaaagtttagataagttactccctgaggcgtttgcagtttgtcgtgaggcagcaaaacgtgtaatgggcatgcgccactatgatgtccagttaattggtggtattaccttacatgaaggcaaaattgccgaaatgcgtaccggtgaaggtaaaacccttatgggtactttagcgtgttacttaaatgcattaagtggtgaaggcgttcatgtcattactgtaaacgattatttggcacaacgtgatgctgagttaaaccgccctttatttgaatttttaggtctaagcattggtacaatttattcaatgcaagaaccagcagaaaaagcagctgcctatctagctgatattacctatggtaccaataacgaatttggttttgactacttgcgtgacaacatggtgttttctttagcagaaaagaaacaacgtggtttgcactatgccattatcgatgaagtcgactcaatcttgattgatgaggcgcgtacgccattaattatttctggtcaaagtgaagattcttcacacctctatactgccatcaatacgattccaccaaaattacgcccgcaaaaagaagaaaaagttgccgatggtggacatttctggattgatgaaaagcagcgttcagttgaaatgactgaaattggttatgaaactgtagaacaagaacttattcaaatgggtttgttagcggaaggcgaaagcttatattcagctacaaatctaaacctcgttcaccatgtttctgcggctattcgtgcgcacttcctattccaacgcgacgttcactatattattcatgacggtgaagtcgttattgttgatgagcatactggccgtaccatgccgggccgtcgttggtcagaaggcttacaccaagcagttgaagcgaaagaaggtttggctattcaacctgaaaaccagactttagcaacaactactttccagaactatttccgtctttacaaaaagctttcaggtatgacaggtactgccgatactgaagctgcggaaatgaaagaaatttatggtctggacgtcgttattattccgacacaccgacctatgattcgtaatgaccagaacgatttaatctacttaaatcgtaatggtaaatataacgcgattattcaagaaattatgaatattcgtcagcagggtgttgcaccgattcttattggtacggcaacgattgaagccagtgaaattctatcgtctaaattgaagcaagctggtattcatcatgaagttttgaacgcaaaacaacatgagcgtgaagcagacattattgctcaggcaggtagcccgaatgcagtaacaatcgcaacaaatatggccggtcgtggtacagatattatccttgggggtaactggaaagcgaaacttgccaaacttgaaaatcctacccctgaagatgaagcgcgtctaaaagcgcaatgggaacaggaccatgaagatgtattgcaagcaggtggcttgcacattattggttctgaacgccatgaatcacgccgtattgacaaccagttacgtggtcgtgcaggccgtcagggtgaccctggtgtttctcgtttctatttatctcttgaagatgacctcatgcgtattttcgcaggtgaccgtgtcgttgccatgatgcgtgcaatggggcttaaagaagacgaagcaattgaacacaagatggtaagccgttctatcgaaaatgcgcagcgtaaagttgaagcacgtaacttcgatattcgtaaaaacttacttaaatatgacgatgtgaataatgaacaacgtaagatcatttattcacaacgtgatgaaatcttagctgaaaatactttacaagaatacgttgaagaaatgcatcgtgaagtaatgcaggcgatgattgctaactttattccaccagagtcaatccatgaccaatgggatgtggaaggcttagaaaatgctttacgtattgatttgggtattgagctaccagttcaagaatggctagaacaagatcgacgtcttgatgaagaaggcttggttgaacgcatcagtgatgaagtgattgcgcgttatcgtcagcgccgtgcacaaatgggtgatgaatctgcagcaatgcttgagcgtcatttcgttttaaattctcttgatcgccattggaaagatcatttggctgcaatggattatttacgtcaaggtatccacttacgtggctatgcgcaaaaaaatcctgagcaggaatataaaaaagaagcatttaacttgttcgtgaacatgctgggtgtaattaaaactgatgttgtaactgatctgtctcgcgtacatatcccaacaccagaagagcttgcagaaatggaagctcaacagcagcaacaagcagaagcaatgaagctttcttttgaacatgatgatgtggatggattaacaggtgaagtgaccgcttctcaagaagcacttaatgattcggctactgaacaacaaacgttccctgtacctgaaagtcgtaatgctccatgtccatgtggttctggtttgaaatataaacagtgtcacggcaaaatttaa

SEQ ID NO: 46445 - DNA, 1464 bp, Acinetobacter baumannii
atgagtaagaataacggaaagcaattcctggaaggagatcttcttggtagtcaacatatgactgagcaagaagaagagaaattgcagcgctcattgacaaatcgtcatattcaaatgatcgcaatcggtggtgcaattggtactggattatttatgggttccgggaaaacattaagtgtttcgggtacttcaattgttttaacctatttaattattggtttcttctttttcttcgtgatgcgggcaatgggtgaattgttgcttgcgaataccaattttaaaaccttcgccgattttgcaacggcttatctcggtccgtgggcggggtttttccttggttggtcgtattggtgtaactggattattactgctattgcagacgtgattgtgatcggagggtacatgcagttttggtatccagatttacccgtctggattccggcatttacttcattggcgatcttaaccatactcaactttgtggccgttcggctttttggtgaacttgagttttggttctccctgatcaaaattactgcaattattctatttattctggctggtatttatttaataggtacagggtttacttcaccaaatggtgttaaggcctcaatgagtcatttgtttgaaacagaatcaatgtttccttatggtgtaacaggtttcttggcaggctttcaaattgccatctttgcatttgtgggtattgagcttgtcggtacgactgctgctgaaaccaaagacccgcatacttcacttccgaaagcaattaactctattcctttacgcattttattattctatgtgggcgcgttggtttgtattattgcggtcacatcttgggcaaaagtttcaccagaaaaaagtccatttgtagaaatgtttactttagttggattgccaattgcggcaggtttaatcaactttgttgttgcgacttcggctttatcttctgcaaacagtggaatctttgcaactagccggatgctatacggtttggctttagacaacgatgcacctaaaagctttagtaagctgtcaaaaagaaaagttccaattcgcggactcgtattttcaatggcatgcgtaacggttggtacttctattttatttattgtgcctaatgtcatgaccgcgtttacgattatctcagcactcacttcaattttatgtatttttacgtttatgttgattgtgctttcatatatttattatcgtaagaaaagtcctgagctacatatccagtcaaaatataaaatgccaggtggtttatttatggcatggatgaccatgttgtttttagtgtttactatcgtaattttggctttagaccatgatactttaattgcacttgagtgttcaccaatctggtttattggtttatttattgcgtataaatataaaaagaaaaagatgttgcagcttgatattttaaaagcacaaaaggttgattatatttaa

SEQ ID NO: 46446 - DNA, 855 bp, Acinetobacter baumannii
atgaagtcttttaaaaataaagtcgcagctgtgacaggtgcgggttcaggtattggacaagcaattgcaatcgccctcgccaaacaaggctgtcatctggcactttctgatattagtgaagccgggttagccaaaacagtcgagcttttggcaccttattctgtcaaagtcaccactcaaaaagttgatgtcgctaagcgtgatgaagttgccacttgggcaaaggcagtggtagatgagcatggccaagttaacctgatttttaataatgctggtgtcgcaatagggagtacggctgaaggtgtgagctacgaagatcttgaatggctcattggtattaatttttggggcgtggtttatggtaccaaagagtttttgccttacttaaagcaaagtggtgatgggcatattattaatatttccagtatgtttggtttaacagctcaaccgacccaaagtgcttataacgccagtaaatttgccgttcgtggttttactgaatcattgcgccaagaacttgatatgcaaaatgctggtgtgagcgcgacttgtgtgcatccgggtggtattcgcaccaatattgccaaagctgcacgtatgaataatagcgtccagtctttaggaatggacccgctaaaaagccaagatgctttcgataaattacttcgcacccctgctgatgatgcagctcaacaaattttggaagctgttcgtaaggaccgccgccgtttacttattggagccgatgcaaaagccgtcgatgtgattcagcgtattctgccgcaaggctaccaaaagatctttgcagccgcgaccgcttggcaaactcgcctactcaacaaatcagcaaaataa

SEQ ID NO: 46447 - DNA, 609 bp, Acinetobacter baumannii
atgaaaaaaattctaacaacgccaatcaaagatgaagaccttttagaccttaaagtcggtgatgtagtttatttgactggccgtttggtaacttgtcgtgacgttgcccatcgcagactgatcgaacaaggtcgagaactaccagttaatcttgaaggtggagcaatttttcatgctggccctattgtgcgcaagaaaggtgaaaacgacttcgaaatggtttcgattggcccaacaaccagtatgcggatggaaaaattcgagcgggaatttatcaagcaaactggcgttaagctcattgtgggtaaaggtggcatgggaccagaaacagctgctggatgtcaggaaaatattgcagttcatgcgattttcccaggtggatgtgcagtacttgcagcaactttagttgaagagattgaaggcgctgaatggcaagatctaggtatgccagaaaccctttggattaaccgtgtgagagaatttggtccgctcattatttctatcgacactaaaggcaacaacctgattcaacaaaacaaagttgaatttcaagccaagaaagcaccgattttagaaaaaatcagtaagcaactaagctttattaaataa

SEQ ID NO: 46448 - DNA, 900 bp, Acinetobacter baumannii
atggacaaagatattgcagtccagtcccttacggacaccatggccaaatttacggcttatattggaaaacgcctaccgaaagatgtgaaaagcaagttaattgaactgcgtactttagaaaccaatccattggctaaatcagtttatgactcgatggaagaaaatcagcaagctgccgataaactcaatcgcccaagctgccaggacacgggtgtcattcaatattttgttgaagcaggtgccaacttccctttgcttggtgaacttcaagatattttgagcgaagcaactgctgaagcaacacgcataggtccattacgtcacaacgctgttgaaacctttgatgaaaaaaatacaggcacaaataccggtactcaaattccatggttagactggcgtattgtccctgaactcgatacttgtaccattgatgtctatatggctggtggcggttgtactctaccgggtgcggcaaaagttttaatgccaggtcaaggctacgaaggcgttgctgaatttgtaatggatgttattaccgaacgcggtgtaaatgcctgtccaccgttactggtcggtgttggcgtatcaacttcggttgaaaccgcagctcgtctttctaaactcgcgattatgcgtccagttgactcaacaagtgagaacccacgcgctgccttaatggaacaactgttagaacaaggtcttaatgaaattggtattggtcctcagggactcacaggcaataacagtgtaatgggggtcaatattgaatcttctgcacgtcatccatcaacaattggtgttgccgtaaacacaggttgctgggcacatcgccgtggcaaaattaagattaatccagatatgtcgtatgaaatcttgtctcacgaaggagttgtactatga

SEQ ID NO: 46449 - DNA, 1299 bp, Acinetobacter baumannii
atggaaatggatattgaaaagcgaacgttacgtcgaattacttggagaatcgtaccgtttattatgttgttataccttatagcctatatcgaccgcgtcaatattggttttgccgcactcaccatgaaagaagacttaggctttacagcctcggttctcggttttggtgccggaattttctttttgggctatttcttatttgaagtcccatccaacattattttgcataaagtcggtgcccgtatctggattgctcgagttatggtgacatggggtctgattgcagccggtatggcgtttgtagaaagctcgaccagcttttacgttatgcgatttttactcggcgttgccgaggctggcttctttcccggcattattctgtacttaacttactggtttcctgcacgacatcgtgctggggtgattgctttatttatggcagccgccccaattgccacagcagttggttcaccaatctcagccgcattacttgaaatgcatggaatttggggtctcgctggttggcagtggatgttcattattgaggcaataccagcaatcatcttaggcgttgttgtttttaaatatatgacggatcgccctgaacaagctacttggttaggacaggatgaacgcgaatggcttgtaaaaaccatgaaggaagaggatgtaggaaaaaatgcacctgagcatcacagcattcttcgtggtcttgccaacccacgggtacttgcccttgcattgatttatttcggaacgtcggctgggctttataccctcggcatctgggcgccacaaattattaaacagcttggcgtaacgtctatgactgtggggcttttaaatgctattcctccaatcgtttctgtcattgccatggttttatggtctcgacactctgaccgcaccaatgaacgtacatggcatgttgctctcgcgtgtttaaccgcagcagttggtctcgcaattgcagcaggcacacataacgtcattggattaattgcagcacttaccattgtgaatgtcggtattagttgtgccaagccaccgctatggagcatgccaaccatgttcttgtcaggatcagccgcagcagcaggcatcgcaacgattaactcaatcggaaatttaggcgggtttgcaggccctgccatgatcggctggattaaagatcaaactggagatttcacaggcggactctattttgttgcaggcctactcatcatctcgaccttactgacactagtgctgagcttctcccaaaaagtgaaagtaaacgctgccaaagcaacccaataa

SEQ ID NO: 46450 - DNA, 921 bp, Acinetobacter baumannii
atgaatgcagatacggaattagctttcttttgtttattggtcaaacaaggaagtcttgtcgcgacggcacgagagttaaacttgactccacctgcggtttctagacgtttaactcaacttgaagagcgtttgggagtaaggcttttaaatagaacaacacggcgaattagtttaaccagtgaaggtgaggtctactttgaaaatgcagttcgtattttaaaagagattgatgaaatggagcgtttggtttcaagtagtcgggcagcacccaaaggggtattgcgtgtgaatgctcctttaggctttggtcgttcttatattgcgccagcgatttctacatttgccaaaatctatcctgatgtcgatgtccaactgcatttaactgaccgcccgattaatctgcaagatgaagcgattgatgtctcaatccgctttggcgaaatacctgattcacgtctaattgcaaaaaaattggcagccaaccgccgtttattatgtgcatcacctagctatttaaaaaaggcagggcaaccactcactcctcatgatttaacacagcatcagtgtattgtgattcggcaaaatgattctgcttatggtaattggcggttaagtcatggcaaacaagttgaaaccgttaaagttcatgggcaactgagtacgaatgatggggcagtcgcattaaattgggccttagaaggctatggtattttgatgcgagcagagtgggacgtagcaaaatatttaagaagtggtagattagttcaagtgctagcggactatgaaacaccagccgcagatgtctatgcggtgtatttagagagactgaatctgtcgcctaaagtcgcgcattttctagatcatttacgccaatttttaaatcagcatgtcgatggtccagagcctcgttcaagttggtaa

SEQ ID NO: 46451 - DNA, 612 bp, Acinetobacter baumannii
ttgtttgctaacaattactaccctgcactacaagcaccaaataccacgcttattccacatggcctggttaaagtcgaaggcaatacggtgattgcagctaatggcgaacgccatgaagttgatgtgattatttggggtacaggttttgaagtatctcacccaccaatcggcaaacgtgtgtttaatgaaaaaggccaacgtttaaatgatttgtggaaaaatagttcaccggaagcttacttaggaaccaatattgaaaatgtaccaaatgcattcttagtattgggaccaaacgtactggtttatgactcatttattggtttggcagaagcacagctcgactatatcgtagatggcttgctaaaaattaaaaacaaaggaattagcaagttaaatgttaaggctgatgtgattaaaaagcacaatgacttagtgcaaaaacacttacaaacaactgtattcaatagtggtggctgtaagagttattaccttgacgctaacggtcgcaactttgcagcatggccgtggtcattgaaaaagcttaaacaacgtttgaaaaaactagatttgaaggattatgaagttacatatcaaatgtcaaagacacattaa

SEQ ID NO: 46452 - DNA, 318 bp, Acinetobacter baumannii
atgaataaaaagcatattattgtatcgatcattattggtttgattgtgggcggactaattggcgcatttggttattcaaaaactgtagcaaaatatgacgctatttcgactgcatgtgtaatggtgaatgaagcagtagaaaaccaactgctaactacagaacaagtgaaaactttaggtgagttgactggaacaaacttaaagaaagactatccaactgtagcttcaaaatttgctttctcacctgaaagtttaaagaaagcttcagaagcatcaaattgtagtcagtttattgtaggcttcaatcaatctaaataa

SEQ ID NO: 46453 - DNA, 192 bp, Acinetobacter baumannii
atgcgaaatcaaatacacccgattaataatgttgatccattagataccgagaacgagcaaaagcaagaaaactcggtgcttaattctgtgaatcctgatccagttgaagtaacagatttatttgtagaaattggaaaagatatagctgattttgcatcatctattttagataacattgatatcaatttttga

SEQ ID NO: 46454 - DNA, 294 bp, Acinetobacter baumannii
gtgttagcgaaaaggcttactatccttaattccatctactctcatgctgagttatctactccttcatttattattgactctccacgacaacaagatattgattctgataattatcatcatatgcttaatattttaattagtaatacacctgacgatgtacagttaattattgcgggagtgcaaaataactttattaacagcattaaaggaaactttgaagaaattaaccccgaatcaacacttttaactgcagaagagtatgaacttgccaatttcttaatcttacatagttaa

SEQ ID NO: 46455 - DNA, 216 bp, Acinetobacter baumannii; identical to SEQ ID NO: 42270

SEQ ID NO: 46456 - DNA, 1263 bp, Acinetobacter baumannii
atgtctgatcctcagctctctcttagtgaatatctcggtacagtgcaggaagtcatacgcctgacttttgacgagcctgtatgggtgagagcggaaattcgtaatttaaatgttaaaggtggacattattatttagagcttgcagaaaaagatgctgacaccgacaaggtcattgcaagctgtaaagcaaccatctggaaattttcagcaagtaaaattgttctaaagtttgaacgtgaaacaggtattgagttagctagtgatttaaacgttttaatcaaaattagagcgcgtttcgatccacaatatggattttcagtcaatattgaagaaatagactcaagttttacacttggagaaattgcaaaacgttatcaacaaattgtagaacgtttaacgcaagaaggtttgattcataagaataaacttctccctactccttttgatatacaaaatgtattagttattgctcctcaaaatgctgcgggtttaggtgactttaaaaaggatgcggatgctcttgagcgaaatagggtttgtcattttgtttatcaaagtgcgacctttcagggaaatacggctgccgtcagtcttatggagtcgttggcaacaggtttaaaacaatgggcaaataattttaactttccacccgacctgattgtgattattcgtggtggcggtgctgtaaatgacttagattacttaaatgattatgagcttgccgccctactctgtaaacgtagcgtgccgatttgggtcggtattggacatgaaaaagatcgtactatccttgacgagattgcacaccgttcgtttgatactccaagtaaagtgattgcgggtattcgcaaccatattgttgaacgtgtacaagaagctgtagacaacctacaaacaatcaaactcttgtcacaacatcaaattacgacctaccaaagtaagagtgatcaatatctacaacatattaaatcctctgcccaagctcagcttaattcagctcaccagttccttgagcagataaaggaacgcattcaatttgtttcacagcaacaagttaaattttctctatcgcaaactgaatctcttatgcgagaaattcttttgcaaaacccgaaacaaattcaagcaaaaggttatgcaattgtaagatcagaaggcaaagcaattcgttccattcaccaaatcacaagctctaccattactgttgatatgcaagatggagcaattaacgctaatattactgaggtaattccaaatgaatga

SEQ ID NO: 46457 - DNA, 225 bp, Acinetobacter baumannii
atgctactaaatttctctcttgataaagatatttttaaaaatgattttttatataaaaaaccttatttatttaaaagtgcaattgattcatctggtatttcttggaacgacgtaaatgagctttatagtcgtggtgatatttcacatcgcgactttaaattgatgaatggttatgaggggctttgttgcacaaacctatctgtaaagggtttttcagcgatataa

SEQ ID NO: 46458 - DNA, 171 bp, Acinetobacter baumannii
atgtcgtggattcattatttcttattagcgatagttttgttatttgtatttcaaggaatttattatctatttaacaaaaaaatatatactttcagaaatcctctattgcccgcagttattgctgttttttttgcaagtatagtgacttgtattgaatcatactttatttaa

SEQ ID NO: 46459 - DNA, 339 bp, Acinetobacter baumannii
atgcgtgaattaacactaaaagaattggatttaatttctggagcggctgctcaagttccagtaatggttggtggagctgttattggagccgtcgggtatgctggtgccgttattggcggacaagagttttcttgggcagaattaggactagcagttacagggggagctattgctccaatggctggcggtgcaaaagttgctaccatggtcacaaaagaactacttcattctatgaattcggcattcgcagcgggcgttctgagtggtgctttgggcaatcagccagacaaagaaaaagaagatgggaatgggtattgtgaggatggtggcaattattaa

SEQ ID NO: 46460 - DNA, 492 bp, Acinetobacter baumannii
gtggcaagaaggaaggctcacaccttcaaagttaaagctatcattcattataaaactcagaaaattttgagtttatgtaccagtcgcggtgctgtacatgattttgaactctttaaacgtaacttgaatcagattcatgtgggtgtctttatccttgcagataaaggttatcaaaggatttacacagtatatccgaatagcctattaccattaaaagcaaaaaagcaaaaaagcaaaaaagcaaaaaagcaaaaaagcaaaaaagcaaaaaagcaaaaaagcaaaaaagcaaaaaagcattgtaagctatatcccgaactaaaaatctataatcaagaaatcaataaaagaagaataggcattgagcatgtatttggtagcttaaaaaccttcaaaatccttgctgagcgatatcgtaacagaggaaaaagactcagtttgagattcaatttaattgctggaatctataacttggagctgactaaaaaatga

SEQ ID NO: 46461 - DNA, 396 bp, Acinetobacter baumannii
gtgaatggagtcactgtatcttctgtctgtaaatgcctgggtgtcagcacttcaggctattatgcctggcgaaaacgccaggccaatacagcgcaaaaatataatgatttaaaagccgtatattggcagcatcatgcacgattgggtgcaccttcattggtacatgacatgcatgatttaggttacagcatgagcgaacgaaccgttggaagaatgcttaaaaagcttggtttacgtagcaggattgcacgtaaatacaagcatacgacagattcaaaccatcgtttgcctacagcaccaaatctgttggagcgtcaatttacagtcattcagcctaacactgtatctgcaacgctggttcaagcacaggctactattacgctgatatataattaa

SEQ ID NO: 46462 - DNA, 1587 bp, Acinetobacter baumannii
atgcatattaaaagcctccctttagatacattaattacaggtataggacgactatttaaatatgaaaataaaccatggtttattaatttgtggggagaatccgaagaaactaaaaagggatattacacctctttttcccatatgcatttattgactaaacgtcgaattatcaactctaccaaaaatgagcatcgaaagtctggatttcacctaaaatttacatgcccccctccagcagaatggatatcttttgctcaatctaaatcacaatttcacttttttgggtttgatgctttggcaacgttttcaaatgaagcacaaaccgttaaaaatattcatattgaattaccacagcttgagttagcaagagctttcttcttccaaaacgcttacctaactcgatcagcgcttgagttgaatgtactggcagaagattttgatattcagaacagggctgatcattacctgattaatgttcttccttcatgtgaaggctcccttgcacttactcatttcaataaacctggatttcgtcgatttcttgcatatttactcctaaatgaaaatataagagcttcatatgaaagtatcgctcaacagtgtcaggcttttgaaagaattaataatacgcaaagaacatgggactttagtttcatccctcccaatttaacagacgtaaacattgaagcatacggttattacgacaagctaaccaatacattcaaaattaatgaaattattggcttttctgggctctacgcccatattgataagcctgtttattttcatcatgataaattttctggagcatcaaaaaaatcgggtaataccagtaccataccaccaaagccgaatcatgcagaacccaaactgaatgatgaggaggaagcaacacccagcaataagcccacaattatagatagcccaactactttacttgattttgatgatccatttgaaactaagaaagtcgcagataaaactggttcaaaaaatgatgttatcgtggatgatgcccgagagtatattgaggaattaattggtgatgtgaatactgatgaaccaggaattggcggtacagttaaagctggtgattttgagggtgcaaaagatcaaactaatgatgcacatttatatctagaccgtttctcagcctttatacagatgctttataaacttgaggaaaattatggaatacagtattcattaactttaaaaactctgcctgaagtagaaggatttaccaaacatctaaaaaccgataataatccacgctgtattgctgaagtgcatttcctatatcagggtcagcatttcattttattggaagttgatacatccgataatgcaacacgcctttcgacacaattattgacgataaaaaatatgaattgctgggaagaagattatgaaaaacttcgtaagtttgtggttcaaaaaactcttaactggccaaatagctttatcaaaaaaatagcaattcaacacattagatttaatcatccacgtattgatgatagccaaaaagtctctattgaagacttggagggttgggccactcgaatttatataggattaaataaatag

SEQ ID NO: 46463 - DNA, 1530 bp, Acinetobacter baumannii
atgtggaattttccaacaccgcttcccaatgaactaatttacagcaccgtcgctcgtgctggattacaccatggtattcaaagtcccaaacagctacttgatgaggtttttcaagatcggaaagtcgttgctacagtagacttacctagccacttaaatgctattgtacatttattacagcgaactgatcgttttgttttaatagacctgatttacaaacataccatgtttggcttatatgcaccctttgttcaggaatcccatcgactaaaagcaatcactttaatgactgagcaggcatctggttctgttcatcttatgtttggtctaaatgcttccagagtccccaacaaaaataagtttcattactgcccaatctgcatacaacagcaacgagaaacgtatggagaatatttctggaacagggcttggtttgtacctaaccttccaatatgcctgaaacataattgttcacttctgtctcaagattatattcaacaacagcatcgacaccttttcttaccgttgttgccaaaccaaactcaggacctacctgaaccctactttaaggaagactttatattaggacaaatgtccgtagagttattacaacttgatcctcagccatccccaagccatgaacaatggactaagttttatctagaaattgctgatgcaaagaattgccgtaggggcagtcaggttcgccatgaacaaacttatgagcaagtgattaacaaatttaaatatgtatatctcaactctaagaatttagggattaatcctgatcaagatacttcatggctcaaaactatttttagaaagcatcgcaaagcctttagttttttagagcattgtattgtctggtcttcatttatacctgaaatgacacctaaagacattctgcaatatgtcagctctatttcagcaaaccaatattttgtaaaacgacctacttctacggacaatattccccctgtaaaaatagaggagatgagacagaaatggcaagatatcgtgctacttcatggtgtaacgtctggtcgtaaaattaaatcaggccaagcaacttatatatggctatatagaaatgatcaaaattggctcctaacctttaattcaaaacatttgtcaaaaccccaagtccgaaaaaataaagtaaattggcctatacgtgatttttcaataaccaaagaattattcaaaattttatatcgttcaaatgatgacttagcttgtccaagaatgtcaaaaagttggtttctcaatcaattatccaaaggaaattccatttccaaaaatttgcaccaactgcctttaagctccaaatttctttcaacttattctgaagatacaatagcttatcaaatacggagaattacccatgccatgatcaggcttgggtatacagagtacagtactaaagatagatggcggatattgcgacttgcaggattaagtaaagaaagaattactcaagaagcccaaattttcctaaatatgatttgtgagaagatttatgcatattaa

SEQ ID NO: 46464 - DNA, 1650 bp, Acinetobacter baumannii
atgaataatctaataacagatgctgagtatcatgacactggtgtgcatgcttacaaaggtaatcctttcatcgaagctttacctcccattcaagagccttttgaagatacaaaaattctcatctctaaagtaacacctacccttgacgatctaaagcaaaaaagagttattcgtgctcataatattcatcagatcactggctcatttttccaacctttagcaatgcatatgctattgagtgagcgtatttctctcatgattcgtggaggatatgtcggtcggaatccaaacacaggaaaattgcaacaacatctacaaaatggctatgaacgtttgcaaaaaggtgacttggatgcaaaacgctttgatggagctgaatcaactgcccatagcatggctatcattgggtgttcaggtagtggtaaaacaacatccttacgaagaatactaaacacatatcctcaagtcatttttcacccaacattaaatcgtcatcagatcgtctacttaaaaatagattgctctcacgatggttcacttaaagagctttgtctcaatttttttcgagcaattgataaagtcatcggctcaaattatgagaaaaagtatggtatgaaaagacatggcgtagaaaccatgcttgctctcatggctcaaacagccaatatgtttgcgttaggcctcttagtcattgacgaaattcaacatttaagtcgagcaaagtctggtggttcagagaaaatgctcaacttttttgtcacgatgagcaataccattggaattcctgtactttttgttgggacgcctaaagcaagagacatctttgatcttgatctacgttccagtcgacgtgcagctggtctaggttctatcttttggaacccaatttcacaatacctacctgatcagaagagtcaaaaccctgagtggatagcatttaccaatacactttggaaattgcagtacttgcagaaaagagaccctattttaagtgatgagattcgagacacttggtttgatttgagtcaaggtattctcgatattgtagtgaaactttttattttggctcaattacgtgccctcgcaacgggagcagaaaagattaccgtagagctgctgaaacgtgtttatgaggatgaactaaaacttgtccatcctatgcttagtgcattacgttcaggtatacctgaacgaatcgctcaattctcagatcttgctgtacccgatatggacaagaaaatcatccatcttattcagaaaatctctgcatctactgttgagtccgaagaagaccgagccttaaaacagttgagtaatgatgatcagcgacgtatctatttaatgctaaaagatgaatttccatcagactccatcatctttgctattcaaaaaattgtagagttaaaaccccaaatatctagacaacagctcttggcttctattattcaggcaatggagacagataatacaacttctcaagttacagtaaccaaaaagaaaaaccaacggatcggcttaaagcaatggaatgaactggaggataccgatcttcgtcatattttttcgatgaactcaactagcccagaaagtatctatacccaattaaaccatcacggtttaattctacaaatgtcagacctgttgtcatag

SEQ ID NO: 46465 - DNA, 2091 bp, Acinetobacter baumannii
atgtggcgaaccaatgaagtcgttaaatttgatgaaagccactaccggattttattctttcaatctggagaaatcatatggattaatatggaggaaaccaaaggtgttccctctttagttcttgaagagcaactttcacaatggattgatgaaaaacgtttatttagaagttcagacccttttgagtatctaaagtctatagaaccacccataaattcagtcgcttttgaaaaacgtgctcaggcttatcaaattattgaaccaattatatatgacaaaggctgttttaatgaagaaattagagctaaacgggttcgtttagtagaacaaaaaaatatcgcaactaaagctacaatatacaaatatctccgccgctattggcaaagaggtcaaattccaaatgctttactaccagattatagaaatgctggagcgccaggcaagccaagaaccttggcaggcactaaaaaatcaggagcaaagcgtaaatttggcgacgggactggtattaaagtcacgccagaaatagaaaggctctttcggttaatagctgagtctgaattattaaatgataaaaaaattaatatcacatctgctcatcgaaaatttgaagaactttttgtccaacattacccacatataaaacaggcagatattccgacacgtagacagtttgactatttctacaaacgtgaataccaacttccacaaagaatagaggctagaacacctgtattaagtttccaaaaagatatacgaccattaagcgggactgctacagcaaatacgcttgggcctggtagtcgttatgaaattgatgcaactattgctgatatttatttagttgctgatgatgaccgaagtaagattttaggtcgtcccacactttatgtcgtggttgatgtttttagtagaatggtggttggtttctatattggctttcacaacccatcatatgttgttgctatgcaagctattgtaaatgcttgcagtgataaagttgatctatgcaagatgtttgggattgatattcaaccagaacaatggccaacgataggtttgccggatgccattcttgctgaccgtggcgaaatgatgagccatcaagtcgaacgtttaatctatggttataatgttcgtattgaaaatgcacctgcttatcgaggggatgctaaaggaattgttgagcgctactttggaacgttacaggcagaattcaaaccctatgcccctggcgtagtaaaaggaaaccgtattaaaaaacatggcgaaagtgattaccgccttgaggcagctctgcccattacagcatttaccaagatgatcataaagacaatactttatcgtaatcagcatcatgtattggatacttatgacagagaggccgatttccctccagatttaccttctatcccattacatatatggaattggggtattcaaaaccgcacaggtcatcttcgcatcgtagaaccaacaccttttcggatcatgatactacctcgtaagaaagtttccatttctacttctggcgtcaatttatggggactgtattacattggatcagagatacttagagagggttggctacatcgtagtaaagaagtctctcgcccacaggatcttcaagctgcctatgatccaagtaatgtagataagatatatttatttccgaaacatgatagtacgatctattgggaatgctctttatcaactaaaagtcgtcaattttcgggtaaatcattttggcaagtctgggaaatacaagatcaagaaaaaaatctacatgcaattggaaaagataatagcaaagctgctcgtagagagctggatcaatttattcgtgacaccattgctgaagcaaaaaaaatggcgaccaactctggtgtgtcaaatcgtcagcgtttatctgaaattaaatcaaataaaaaatctgctcgtgaaaatgaaaaattatcagataattactcgaagactgataaacaccctaaagataaaggaacgattatttcatttaagccaaagcaagatgaatcaagttatccacaattcgttccaggtttttttgatgacgaggatgaccaatcatga

SEQ ID NO: 46466 - DNA, 738 bp, Acinetobacter baumannii
atgggaaaagattaccaaccatggctgactattcaggatgtaccttctcatggggtatctcatcgtatttactctcataaaacgcagagagttcatcatttactttcaaatttggaactgtacgtttttttgattttagattggtctagctctgttcaggatatacgggaacaattccctttgaatctagatgacacaaaagaaatctgtttagagcatggtttgagacatccaagcatacaaggctcagatcaagtcatgagttccgattttctgattgatacgaataataagaacaagcctcaatttgtaattcaggtaaagcctttaaaagagctattaaaagaaaggactattgaaaaactagaaattgaacgtcgatactgggcactcaaagaaattccgtggagtattgtgactgaacaaaatattcctacaactgcccgaaaaaatctcgaatggttaagcccctttgttacagaacatatagatcctgatatctgggacaaactacatttaatttcttattatttttcaaagaaaccaagtgtttccatcattaaactttgtaaagaggttgatgttcaggaaggaactacagctggaacaaccctacaatatctaagaatactcatagcaaatcgtttgatcaaatttgatatccaacaaccattccaaaagttaaaaggttctgacctagaatttgatttagaggtatcttatgtggcgaaccaatga

SEQ ID NO: 46467 - DNA, 882 bp, Acinetobacter baumannii
atgtcaattcataaagagctgcatattttaaaaacagatgaccatggcgagtttgctttatgggaagttgctaaaagcgagaataccctgataaaggaagaagcaattttcttatctcatggtgctttttcagacaagactgtttgtatgggtattgcagattacttggcaaatcatggatatatctgttttattttagaatggcgagggcacggcacaagcccaaaaacagatattccatttaattttgaaactgttgcgttatatgaatataaaactgcatttcactatatttatcatcattttaatatcgcctctttacactgtgtaacccatagtggcggaggtttatgcttaacaatgttcttgattaattatccagaatatttaaagaatatccaaagtattacttttatagcttgccaagcatttggagcagtaaataactcttttgactttattaaactcttttctgcaaaactcattgttaaaggtctaggccagataccagctaataaatttaaattaggacgagtaaatgaaagctactacaccatgcggccatggtttaactggaatttaaagcaaaattttattagtgaatttaaaaatattgattataaaaaacatatgagctctattagagtcccaatatattctattagcggaactggcgataaatttattgcaccagttaaaggatgttataaatatttaaaagcttttaaaaatcaagataacgtatttcgtgaatttggttgctctaataataacttggaaaattattcccatagccgaattgttttaagccaaaatgctgctaaggaagtctggcccactatattgcaatggatagataagaactcaaaagaagttctataa

SEQ ID NO: 46468 - DNA, 1392 bp, Acinetobacter baumannii
atggatattgtttcaattaaaaatttcatccaaaaaaataaagtaagacatttatcaaataaagttctacatacccatccctcacctaaaatgtggaaaacggatttaaaggaagaagaaaataattactttttattaaatacagatgctcaatataagtctataaatttatatttaggcattccatattgtattcctactgatccacctcattgtggattttgtcttttcccaacacaagactataaaggtaagcgggaaatggacttttatctggattttttaagtagggaagcccacttatataaagaattttatcaaggagctaagcttgaaagtttgtatgtaggaggaggtacacctaatttacttcagcctaatgattatatgaaactgactaaggttgtatcttctctttttcccgatgctggtatatctagccctatagaaatgacattagaaggtatccctcaactttttaatgaagataaaataagagcaattaaagatgcaggttttaaccgtgtcagtatgggagtacaacaggttaatgatgagttaatcgctacaagtggtcgaaaacaaacgagaaagcaggtttttgatgcaattgaattgttccataagtattctttatcttgtaacgtcgatttgatctatggctggccaaatcaaacggttgaggcaatgctaagagacttggaaagtattgttcaatcaggaataaaacatattactcactatgagcttaatattgctggtcgttctgactttgcgacaaaacaaaagcaaaatacgccctctattgagaagaaaattgaaatgtataacattgctaaacagttcttaataagcaaaggctataaacaaaaaacagtatatgattgggaaaaagaagataataaccaattaatttcagagaaatatttatatgaagataacctcagagactgcttagatgccaatgggcaaagtaaaatgaccacaatgagtggactgggttatgcagccgttaatatgagactgcaacctaactcatcaagcattaaatctgtttcagcaatgaatcatcgaaacctaactgaatactacaatgcaatatctttaaataaacttcctgttgaacgtatgtttgttcatgatactgaagatgtaaagttaatttggatatttcaagcattacaagagatgaaaattaacaccaaaaagtacgagaaaatttttaatagtaatattaaactcgattataagcctatttgggatgcattagccgaagaaggttgggtagagcataatgatgaatatattaaacttattaatgaaggtgagttttatactccacttattcaggcattattaagtcaacctagaataaaatctttgcaacagtag

SEQ ID NO: 46469 - DNA, 1041 bp, Acinetobacter baumannii
atgaatcgctatgaagaagtattggagcagcttaagagcaatcctaaaacatggttaataacgggtgttgcgggttttatcggatcaaatctgttagaaactctattaaaattaaatcaaaaagtaattggcttagacaactttgctacaggtcatcaatataatctggatgaagtagagactttagtgagcagtgaccaatggaagaattttactttctataatagtgacattcgtaacttagaggattgtcagaaggcatgcgctaacgttgactatgttttacatcaagccgctctaggttctgttccgcgttcaattgctgatccaatattgacaaatagtgccaatattacgggttttttaaacatgttagttgctgctagagatgctcaagtaaaaagttttacatatgctgctagtagttcaacttatggtgaccaccctgctttaccaaaagttgaagaaaacattgggcagcctttatctccctatgcaattacgaaatatgttaatgagttatatgctaacgtattctcaaaaacatataattttcacagtatagggttgagatattttaatgtatttggaaaaagacaaaatccaaagggtgcttatgcagcagtaattcctacatggacatctctacttttgcaaaaagaacaagtctttattaatggtgatggtgagacgagtagggatttttgctatattcaaaatgctgtgcaagcaaatattttggctgccacagctccaaatgtacaggagtcagctgtttataatatcgctttcggtgaaaggattagtttaaatcaactctatcaagaaatttctgataatttaagaacactggctaaacttgagaaaactcagccgcattatagagattttagaacgggagatgttcgtcactccttagctgacattactaaagctaaagaaatattacattaccaaccaagatatagcgtaagagatggtttaaaggaagctgtatcatggtatgtagcagagttcaataaagttggatctggtaaataa

SEQ ID NO: 46470 - DNA, 1206 bp, Acinetobacter baumannii
atgaagtcaaaaatccatttccgtgagtttgcactgttgatggcattactcatgtctatcgtgtctttttcgatagatgcagtgttgcctgctttaggtgaggttggacgagtttttgaattaaagaataataatcagacccagtgggtcattattggtattttctccggcatgacaatagggcagttgattgcaggtccactttccgatgcgattggacgaaaacgtattttatttaccggtattatcatctactttttgggaagtttattgtgctttaccacacaaagttttgaatggtttttagtaggtcgctttattcagggtattggggtttcaggtccttatgtcgcctcaatttccattgtgcgagataaatacagcggtgctcagatggcccgtattatgtccttaatcatgatggtatttatggtcgctccagcgattgcaccaagtctgggacaactcattattcacttctttggttggcgtgatatttttgttttatacatgatctatgcaactgtcgttggagcgtgggtcgctttacgattagaagagacgttacttcctgaaaatcgtttacctatgcggttacaagcatttcaagatgggttcaaagaagttgtaagtaataagaccaccatgagctatttgttatgtgcaggcttttgctttggtggatttattggttacttaggtacttctcagcaaatttttatgcagcagtttggtaaaacagggcaagagtttagtgcttattttgctgtgcttgctggtgtaatgggcattgcttcatttaccaattctaaaattgtcatgaagtttggtatgcgtccaatctgtatttatggctttctcggtttgtgcttaatttcattaattttcttagggattcaacttataggtgtgactgtagcattttggatgtttatgctttatgcctgtattttatttttattatttggaactttatttggtaatttaaacgcgattgcaatggaacctatgggacatgtagctggtatggcatcagctattattggtgcagcttcgtccgtattgtcgcttattcttgcctctattattgggcaattatataacggcacactaattccaatgacttgcggttttgtcattttatgtggtttagcatttatgatgacagtatatgagaacagatatttaaagaaatcgaatgtttaa

SEQ ID NO: 46471 - DNA, 723 bp, Acinetobacter baumannii
atgaacacaacaaacgccttccctaaaactatttatgccattcagcatcttgctttcgaagacctaggttcattagaagatgttttttatcaacttgggtttcgtgtccgctattttgaagcaggtgtggatgatttaacccctgcttttacacatgacggtttaactattattttaggcggcccaatcggagtttatgaaaccgaagattatccgtttttaaaagatgaaattgctttacttaaacaacgcttggcagcagataaacctacacttggtatttgcctaggcgcacagcttattgctcatgcacttggggccaaagtatatgcaggccatcaaaaagaaattggctggggaaccttaagcttaagtttacgtcctaatcaggtattatcacctttgcttaataatgtgcatgttttacactggcatggcgacacttttgacttgcctgaaaacgcagtgttattagctagttcagagatttatactaatcaggcatttgaagttggaaataatattcttgccttgcagtttcatattgaaacaacagaagaaaattttgagaaatggttaattggccatacatgtgaacttcgtaatgccaaaatttcaattccgaaactacgagaagaaaacttacaatatgctcaagcacttgaacatgctgcatttgaagttattcaaaagtttctaaaacgaatcggatatagtggttaa

SEQ ID NO: 46472 - DNA, 1728 bp, Acinetobacter baumannii
atgaagcctaatgatgttgtctcgaacctgccaaacaacccgacaccgaatactcatgcctctgtcgattctgcgcagcaagaacaacaggctggattagattttgttcgccaagtcattaccgatgatttagctgccggacgtgccaaacaaatcgtaacgcgtttcccgccagaaccaaatggttatttacatattggtcacgtaaaagcaatttgcctcaactttggcgttgctgaagagtttaatggtctttgtaatttacgttttgacgataccaacccggatgctgaagaacaagagtatgttgatgggatcgccaatgatgtgaaatggcttggatttagctggaatggcgaaccacgttatgcttccggttattttgatcagctatatgcttgggcaattcagttgattgaacaaggcgatgcatatgttgatttgcagtctccagaagaaatcaaattaaatcgtggtagctttgttgagccaggtaaaaattcgccatatcgtgatgcttctgttgaagaaaaccttgctcgttttgaaaaaatgcgcaatggtgaacttaaagaaggtgaagctgttttacgtgccaaaattgatatggcaagcccgaatgtacatatgcgtgacccaattttgtatcgtgttttacattcagagcatcaccaaacaggtgataagtggaaaatctacccaatgtatgactatgctcatccattgtctgatgcgatcgaaggaatcacacattcactttgtacattagagttccaagaccaccgtccgttttatgactggattgttgaaaaagttaagtctaaagctgtgccgcaccaatatgaatcttctcgtttaaacgtagattacaccattacgtctaaacgtaaattacgtaaattggttgaaggcggttatgtgaatggatgggatgatcctcgtatgccaacggttgtcggtatgcgtcgccgtggtttcacaccagaaggcctacgtgatttctgtaaacgtgtaggtgtgtctaaaactgacggtattgtggatgtcgcaatgcttgagttctgtattcgtcaatctttagagaatacggcagcgcgcggtatggcagtgttaaatccattaaaagtaacacttacgaacttaccggaagatttagaccttacccatgctcgtcatcctaatgtcgatatgggtgagcgcgttattccattaactaaagaaatctatattgaccgtaaagatttcgaagaagtaccgccaaaaggctttaaacgtttaattcctgatggtgaagttcgtctacgccatgcatatgtgattaagtgtgatgaagtcattaaagatgcaaacggtgaagtcattgagctgaagtgttcaatcgatccggatactttaggtaaaaatcctgaaggccgcaaagtaaaaggcgtaattcactgggtatctgcaactaaaggtattcctgctgaagtacgtatttatgatcgactgtttacagaagctgaccctgaaactggtgatgatttcttagcaaacttaaatccagattctttgaaagtggttcaagctgtaatcgaacctgctttagctcaagcgaagccagaagatcgcttccagtttgaacgcgaaggttatttcgttgctgatcaatacgatcatactcctgagaagcctgtgtttaaccgtgttcttgacttaaaagacagcttcaagcctgagaaaaagtaa

SEQ ID NO: 46473 - DNA, 264 bp, Acinetobacter baumannii
  misc_feature (214)..(223): n is a, c, g, or t
atgctaaagacaattgttgaatttaaatttgatgattatcagctatatgatcaaaatttatcagcagaagacgggaatactttagtacagaaaactgaagatattgcacaatatatttatagtatattaaaaaatagatatcacttaaatattgagttaaatgctgagcgttggggctgggaaatagaagtgccattacctgagattacgatgnnnnnnnnnnccatattatgttgctacaaaattatattaatgtcattttga

SEQ ID NO: 46474 - DNA, 1821 bp, Acinetobacter baumannii
atgaccgaaaatttaaaacaaaagcttaagcactgtagtgtcggcctattctttgccggaatggctttaacgggttctatatctatttttgcgaaaagcccagccgatccaaataaagttttgcgttatgtattcccaacagctgaaacaggcttcgacccagcttatgtacatgacttatattcagcgcatgtactcacatctatatttgaaactttatatacctatgattatttggcaagaccagcaaaattaatcccacacgtggctacggctatgccagaagtgagtgcagatggtctgacttataccattcacattaagaagggtatttactttacggccgacccagcgtttaaaggtaaacctagagagttaacagcttacgattatgcatattcttttaagcggttattagacccaaatttacgctcacccaatagttggttattggaagataaaattgaaggtatgaatgctttagtcaaagcagccaataaatccggaaaatttaattacgatcaaaatgtaagtggtttacaaacacctgataagtacactttggtgattcggttagtaaaaccagactataactttcctttattactggcccatgatccgacaggtgcggtggcacgcgaagtcatcgagaaatataaagataaagccggttttgttatggggcatccggtaggaaccggaccttatatgctcagtaagtggatacctgcctcacgtattgttttaaaagcaaatcctgaatatcgaggttttacctggaactttaatgccagtagccccggggatgaagcaattgtaaagcgccttaaaggtaaacaaatgcctcaaatcggcacaattgatattcaggtcatggaagaaaaccagtcacgatggttagcattccagcgtggtgaggtagatatcattcagcttgaagggcaattagtttcaaaagcgattaaagacggtaaattaagacctgagctcgcaaaagaaggcgtgcaattatctcgtattgttgatccagaaattagttatatctattggaatctcaaagatcccgttgttggaggaatgagtaaagaaaaaattgccttacgccgtgctattgcgatgtcccgttcaatagatcaagagattaaattggtaaggaatagtgatgcagaacgtcttcatttcccagttccacctggtgtagtgggatatgacccacagtatagaagcagtacgccatattcagtaaaagcagccaatctgctgttggatcgatatcactacaaaaaagatgcttctggttggcgtacacaaccaaacggcaagccgctcgtggtcgaatataaagcgcgcaatgacagtattggccaacaaagtgctgaactttggaagaaaaacttcgatagcttacatattcgcatggtgtataagccaatgcttttttcagacttacttcgatcacagaaacaatgtgagggaatgtttggttcttctgcatggatcgctgattatccagatggggataattttatgcagaatttttatggcccaaatacccatatgactaactggtcttgtggttcgataccagagtttgatgagttgtaccgccagtctcaacaagtgaagccaggcccagaaagagatgcgttatatcgaaaaatgacgcgcttgttagaggtttatatgcctgtgcaaatgtcttatgcacgctatcgcaatatgttggcccaaccacgaattattggatataagaagcatccgattttacatgctgaatggatgtacttcgatattgatacaaatacgaaatctaatcattaa

SEQ ID NO: 46475 - DNA, 939 bp, Acinetobacter baumannii
atgctggcatatgttattcggcgtttatggcagatgattccgaccatgttgggagtagtgctgcttatttttatcttatttaattgggtcggtggagatcctgcctatattttggcaggtaagatgtctaaccctgagcagattgaaaatatccgtaaacagttaggtgttgatcaaccttattatgttcaactttggatttttattaagcaaattcttacttttgactatggcgcaagttggagcacaggtgaatccgtttcacaaattatcttaacccgattaggaccgtcgctcacacttttaattccactcaccattttacaaacagttatttcaattattttagcattggctgtagcggcggtacgtggctctctaactgatcgtatggtcatgatgttatgtaccatcggtatgtcgattagtattttggtttacattattgtttttcaatatgttctggcttatcaactgagctggttcccagtacagggatggagcgatagttttaccgaaaatttatttaagttttccttactaccaattctaatcatgctagtggtgagtattgcacctactttacgtttatatcgtagctttgtgcttgatgaggtaaatcaggattatgtgagaaccgcacgtgctaaaggtgtaggggaaagccgaattttaagtgtgcatgttctacgtaatgcctcaattccgattattactgatgtgatgtcaaatttaccggcattattgataggtgcatttttaattgaacgcttttttggtattcccggtattggtcgtgaggtgattattgctgtagagcgtagtgattttcctgtcatcaaagccattactgtatatattgcagctgcaaccatgatttttaatttgattgcggacttggtctacaaagtggttgatccacgtgtacagttgaagtag

SEQ ID NO: 46476 - DNA, 1866 bp, Acinetobacter baumannii
atggaatcgtttcgtacagtcattaagggttggctcggcaaagtccttttagttttgtttttgacccctttagcgcttgtaggtattgaaggatattttaataggggaaacaaggcagatgtcgcaaaaactgtaaatggacaggacatatcaaaaaaagaccttgaaactttaacgcaaaggtataaagaacaatatttagctgctgtaaagggcgatgaaagtttacttaatttaccggtaattcaagccaaagctcttgatatattggtatcccgtaatttgctcattcaacaagctgaaaaattaggtatttctttaagcgatgctcaaatcgagcaaatgttagctcagcagccaagtttgcaagaaaatggccagttttcacaaaaattatatgaaaattatttacgttcgattggtatgacaagcgaaggcttaattgctagcttacgtcaagatcacgctttaaaaatgttgacttcaacttttgcagattattctttagtgagtaaagttgatttaatgcaaattgcgaatttgcaaactgaacagcgtacattgcatttggctagtattaagttagacccttataaagctggtttaactgcatcgaaccaagaggctactgattactacaacaaacatcagaatgagtttaaacagcctgcttctgttgatgtagattatgtcgttttatctccgtctttaatggctaagccagctccagcaacagatgccgagcttaaacaagcttatgcaaagtttgtagaaactcagcaaaaagatgctaaacgcatagtgaaacatatccttattacgacagacgctcgtgctgatgccgcagctcaaaaacttgctaaagatgtatatgcaaaaattcagggtggactttcatttgctcaagcagcagctcagttctctgaagatccaacttctaaaacgaaaggtggattagttgaagcatatgcacctggtgttttctctgatgcatttgataaaactgttttaagcttgaaaaatggtcaaatttctcagccagtaaaaacacaatatggctatcatattattgaagcggagactcaggcgaaccaaattccttcatttgaagctgagaaaccacgtttaattgcagaagtcgaaaagaataaagttgcatctgtttattcagataccgtaaatagtttgaatgaaacgattgttggtaatgattctttagatgctgttgtacagcaagttaaaggtacaaaaatcgaatcattaaatggtgtaactttagctactcaaaatccatatttaagtgatcctaacgtaaaaattaaattgtttaatgatgatgtgaaaaatggcgatcgtaatgcttcatctaatattcaattagcgaacggagatactgtttgggttaaagtacgtgactatcatgcggctggtgttaaaccacttgcccaagcaatgaatgaagtaaaagctaaagtaattgatgagaaagcacgtaaagcagctcaagcgaaaatcgctacaatgctgacagaattcaaaactcagccagctgaacaagttgtcgcgagaaataaagttgcttttgaatcagcgggtgtatttactcgttcacaaggtttaaaacgtgcaattgagcgtgcagcatttagtgttcctgcgccaaaaccaggtatgtggtctgtaactaccgcaaacttaccaaatgagttagtggttgtggctgtttctaatgtaaattcagctgctgttaacgctatgcctgctgatcaattgcaacaattaaaacagctttaccgccaatctcgtggtcaacagatacttgaagattacagcgaatacttaaagtcacacgctaaaatcaaataa

SEQ ID NO: 46477 - DNA, 126 bp, Acinetobacter baumannii
atgaaaataggaacagatggcgtacaaattttaggtggtcatgggtttacaaaagaacaccctgttgaacgttggtatcgtgatttacgcgcaaccgcaattttacattctggcctacatgcttaa

SEQ ID NO: 46478 - DNA, 216 bp, Acinetobacter baumannii
gtgcttcggttaaaatgtcttggcggccctctgtatggacaggaatattctcatgcacacgatgagtttatttttaaagacaaacagacaggaaaacagacgcattatcgtaaacagactttagacttcacaccgccccaagagttctttgtagcagaatcaatttctacaaccgtagcctacaatcttgcattgcaattgatgaaacgctattga

SEQ ID NO: 46479 - DNA, 261 bp, Acinetobacter baumannii
atgaaaaataaaattctgatgggtgtagtgggtgtcagtattctgattctaaatggttgttcttcccagtttgaaaagggtgtgaagcagggctgttacaacatgggcggcagtcgcagctattgctcctgtgtctatgacaaagtggaagaacattatggtcgcaaagtcatgcgccagattgaacgtatgagctatatcccgaatgacttagacagtgtgatgtatcagtcaggtcagcagtgcgtacataaactttaa

SEQ ID NO: 46480 - DNA, 1080 bp, Acinetobacter baumannii
atggtgatgagtataaaggaaagaatccagcagagtcagtgggtgcccttattgaggagtagcgacaacatttattttgcaccagtcattcccaataaaaagttacaaggtgctatgacatatttaccttatggtgtgggccctaatgatgtactgatgctgattgacgacacagtatttggcagcgccaaggtcgggatgtgcgtaacggaaaaggggctcttctataaagctagctttgaagatgagcagacttatctgttcgaacatatccagcagttagaagctgaaattggaatgatcaccagttcgattttaatcaatggtcatgatgaactgaactttagccaactggataagagtgtgattcgtgctttggtggcattcttaaatgaatgttgtcagggactacacggaagacaggacgataggcaaatgagtatcaagattgaggccgagatgcagatcatgattgatctgtttgcctacttcattacctttagtgtggggcaatggaatacccgatcgaaagaagcggtatccgatcattttactaaactgaatgataaggcagtgcatcagtatatcgaacaactcctgaataaacagacgctctttgattatgaagacttattacatcgtctggcagaccttaaagataagcttgcctataacttccgtagagagatgattgagcaactggtctatgccatggcactcggtcaagttgagcagaatcaagctgatcttttcatgactcatttatgccgtgtatctaatgtctcaagggcagtctttcctgatctcgtcaaaattgtctatcaatgtatggcaggtgagatgaacgagaaaaaagtttctgatctgaccgaggaacaattagaggcctgcaaacttcttgagcttcagcctgaactattgagtgagcaatcacttcaagttgcttaccgaaaaaagatggcagatttccaccccgataaataccagaccttacccgagtcagtccgtcagttgattgagcaacaggcacaacaactcaatcaggccagaggcgtattaaaagcctatttgggagtgtag

SEQ ID NO: 46481 - DNA, 249 bp, Acinetobacter baumannii
atggagattaatccgcaacggctcaaacggcgctggaaatggtatgccgcttatataggtttttttattctgtcattcactttgttttatgcctatgaccatgctcaggatgaacaaaccgagcagatgctggaagacgttaaaagccaatcagttactgctgatgataacactgtaatcagtattcaaagtggagaggaagtccctgcttttaatcaagctaaccttaatcaggaaaaccataaataa

SEQ ID NO: 46482 - DNA, 615 bp, Acinetobacter baumannii
atgatgacaacacaaactaagaatatccagatttttattattggtgttttatctacactagttgtggtacttgcaggatgggtcggctatgacaagtttttaaagcctaaatcagaaaaaaaggtaatggcatctgtttctgaacccgctgcctctgaacctgtaattcaggctagcagtgaacctgtattagaaatacaggcaaaagaagcagatcctactcaaaaaacagaggagggttctaagggcaaatatctagggaatggactttatacctctgatatgaatagtggtaaatgtttggattctgccaaagtaacctgtggtttgtttgaagtgaaccaactccctaaagaatggcaagatactctggaaaaaacttgggagaataataccgactattggttctctattactgatggaaataaggtgacttcaattccatccaactggacaggttggcaagtaatgaaatatggtccagaacagaaatatgttttagcaatattctacagtgcgtatacgaatactggtgaatgtctactcatgcaaaacatgttcgatattaaaacgaaacagaccatcgacagtgttgaacttacctgtactttgtaa

SEQ ID NO: 46483 - DNA, 414 bp, Acinetobacter baumannii
atgaaaaaactatttctaggtataggtttagcattcgtaagtatttcaacttatgcattggatcttaaaccccatgaaatacctgcttatttaatagaacaggtgggttattctggaccagtgacgtgtacttataagactgttttagttaatggaacccgaagaacatttaaagcgtcaatgtttaatgagtgtgaacagattttagccataggtagtgtaggtacaagctcttacaacaccgtggcgcggattccctatacgacctcacgtacttttgtgactttcattggtgtaaaacctcgaaaaatgggacgtatttatatactcggtcgaagtgatccatgtgatccgggtttaaatcacgttccacaagctgttgctgactgtaaaaataaacagcgtggcaagtaa

SEQ ID NO: 46484 - DNA, 1791 bp, Acinetobacter baumannii
atgaatacggcaatacaagcagctctcgaccatgcagtgcaaacccttcagcaagaaggtgtgcttccttcggattggaataattcaagcaatttaacgcgcaccaaagaccgaagccatggcgactttgcttctaatattgccatgatcggctctaaagccgctggtatgaaaccacgcgatttagctgagaaaattctcgcagcgctaccagaagttgcagacatcagcaaagctgaaatcgcaggccctggttttatcaatttctttttaaatgcagatcaacgttttgcaattcttgaccagattcaggctcaaaaagaaagctttggtcgtagccaatcaaatgcagctaaaaagattcaagttgaattcgtttctgcaaacccgacgtctagcctacacgtaggtcatggccgtggtgctgcttatggtatgactgttgcaaacttgcttgaagcaacaggtgctaaagttgatcgcgaatattatgtaaatgatgctggccgtcaaatggatattttggcgacttctacttatttacgttatttggaattacttggacaaaaccttgtattccctaaaaatgcatatcaaggcgattacgttaaagaaatcgcacaaggcatcattgataaagatggcgatgcttacgttcgtgaagttgcgaatgtttataaagatgtaccagaagacgtgcaatatgctgaagagctagatagcgaaggcaacaaagtcgtattatctggcgacaaagaaaaacacattgacggtcttattgccaactcacaacaattattaggtgaaggctaccgcgtattccatcaagccgcactccatgccattttagatgatattaaagatgaccttgctgacttcggcgtaacctttaatcaatggtttagtgaagcatctcttagcgcaaaaattgacgaagcgttagaaacacttgatcaacgcggcttcttatatgaaaaagatggcaacatctggtttaaatcgactgaatttggtgatgaaaaagaccgtgttgtgaagcgccgtaatggtcaaacaacttactttgcatctgacattgcatatcacttaaataaactacaacgtggttatactgaccttgttgatatttggggttctgaccaccacggttatatctctcgcgtaaaagctgcgattgatgcaatgggttatgactcgaaaaaattaactgttcttttagttcagttcgtaagcttatggcgcggtggtgagatggttcaaatgtcatctcgttcaggtcagttcgtgactttacgtgacttgcgtaaagaagtcggcaatgatgcagctcgtttctactacgtgatgcgtaaaagtgaacaacacattgactttgaccttgaccttgctgtttcacaaagtaaagacaatgcggtgtattatattcaatacgctcatgcacgtatttgccgtatgctagaaaaagcagcaagcactggcttacaatttgaagtaagtgctgctcgttcacatgctgcacgtttatcacttgatgcagaaactgaaattcttgctaaactggctgcatatccagacgttgtgttacgtgctgctaatgcatatgaaccacaccaagtaggtaactacttaaaagaattagctgcgctattccacggttggtacaatgaacacaaagttttaagtgatgatgctgaacttacacaagcgcgcttattactttcaatcaatgtacagcaagtattgcgcaatggcttagaattactcggtgtttctgcacctgaagccatgtaa

SEQ ID NO: 46485 - DNA, 627 bp, Acinetobacter baumannii
atgtctttgcaagtttggtttgcttatatgttggcctgttgggtcattagtatttctccgggagcaggggcaattgcttctatgtcgagcggcttaaattatggctttagacatggctactggaatgcaatcggtttgcaaatcgccttgttaattcaaatcatgattgtagcggcgggtgtaggtgttctattcgcaacgacgccattagcctttcaggcggttaagtggtttggggtagcttatttattgtatttagcctatttgcagtggacagcaccagtaaaagacatagaaattcaacacgaaaaaaaggataaatctgtttctgctctgctgttcaatggatttgtagtcaatatcagtaaccctaaagccatcgtatttttattggcagttttgcctcagttcttagatttaagcaaaccccaatggatacaatatctgattatggcagccactatggttacgattgatttgattgtaatggctggatatacagggctagcttcaaaagttttaagattgctatgttctcctaagcaacaaaaatatttgaaccgtggttttgctgtcatgtttagttgtgcagcgttattgctaagtacggtccatcaagcagcctga

SEQ ID NO: 46486 - DNA, 324 bp, Acinetobacter baumannii
  misc_feature (304)..(313): n is a, c, g, or t
atgaaaaaaatagttctttctctttctatatgttttttttctacttctgctctagcagtaactaattgtggaccctataaagtaaaatctatccaaacacaagctaatgatgttttagttgaattccttagtagtgatggaaaatcttattttaaacagattggtctttggagtagtccttcaacgcgtccatttttagctactgctatgcaagcttttgctatgaataaacctgtttcaattagatatgcacaagataactacttatgtgcttctaccgaatatacagtaccaattattatgnnnnnnnnnnattatgattag

SEQ ID NO: 46487 - DNA, 330 bp, Acinetobacter baumannii
atgtatagaaaatttttgtgctttatattactaatagttgttggtggaagcgtatgggcaggaaatgctagagggaagataacaagtattattgtaagagactctgatggactggtgtatgtaaatgtagaaggtagagctaataaacctgattgtgcggttggtaactatatgatcattaaaaatgaaaattctgctacaggaaaaaggcagcttgcactattattaatggctcaagcagcaaataaagttatatctgtaacaggttatggtacttgtacacgatggcctgatggtgaagatataaattatattctagtcgaaaaatga

SEQ ID NO: 46488 - DNA, 360 bp, Acinetobacter baumannii
atgaaaaagcaaatgaaatttacactttcttttttttcctctcttttcatcttggctatctctacttcaacctttgcagccacgaattctgaccaaaatgtaattggtacaattgaaagaatttatctaagcggcgacacctacttttttcgactaaatggcaatgatacctgtgcaaaaaaaactaatggatataatgaatactatacttttaaagtaagtcagcctcattcaaagaactggtatgctctaattttaacagctgctcaaaccagaaaacctataactgttagagtaagtacagactgtaaaattgatgctcaaaaggaaattatgtatatttttcaagactacacttaa

SEQ ID NO: 46489 - DNA, 867 bp, Acinetobacter baumannii
atgcaacaacctctagtaaaagatttttttgatgaaaataccaatacttttagctatgttgttgcggatttagcgactcgtcaatgcgcaattattgatagtgtgcttgactatgatgctgcttcagccactacaaaaacaactaatgctgatctgatcgtcgattatgtcttggcgcaaaacttcaaagtacaatggattttagaaactcatgtacatgcggaccatatgactgcggcacaatatttaaaatctaaattgggcggtacaattgcaattagtcaaaaaatttcaatcgtccaagaaacattttctgctatctataattttgattttaagaaatttaatgaaaatcaaccttttgattatttatttgaagatcatgaacattttagaataggggagattgaagcctataacattcctacaccagggcatacacccgcttgcttgagctatgtgattgccgatgctgtttttgtgggagatactttatttatgcccgattatggctcagcgagatgcgattttcctaaaggaagtgcggctgcactttatgattcagtacaaaagctttatacacttcctgacgatatgcgtatgtttctatgccatgattataagcccgaaggccgtgacgaatatatctgtcaaacagatataaaaactcaaaagcaaagcaatatccatttaaatcgacgagtttccaaagaatcattcataaaaatgcgtcaagaaagagatgttactttggcaatgccaaaattaattctgccttcaattcaaattaatatgaacggtggaaattttccggaacctgaagcgaatggcatccgctatttaaaaatcccatttaattacttttag

SEQ ID NO: 46490 - DNA, 1020 bp, Acinetobacter baumannii
atgttaaaaaataaatttatgattttggccatccttccttttatgttgagtgcatgtggaggtggaggggcaagtgatagtaattcagcgaataacaatcaatctagtacatcccaagatactatcgcagatggtacccgttattattttatggattacaatcctgatcaaatagatgagttagatgaaaaaatagatgagctaaatattgcttattttgaaatatttaataagaaatcaacagatagttcttctaatcaagttttaggtgagtatctgctcacagagaagaaactctactcccctactgataaagcgattaatgtcatgaattttaattcattgacagattggagattagacctcattggagatgttaaagaggattggaaatttcaaagagttgatctgtctaataaaaatatgttcgatactgttttgccgggctatcgagcagtaggttttccagtggtagataagagtacggctaaaggacgtttatttcttaatacttacggacaaaataaatttcctgaaggaagtagttgttatcgattaatttcaaaaaaatctaatcaagagacatttatatttaatgtaaatcaaaatcacgaaattaatcaaagttttgaagattttgatgctgaaaatggcccgtatcttaattatttaaatcaaacgaatccatttggctttacttataaagcagttaaaggaacatggcaaaatattccttggactacaatttatgatactagtctaggttttgcggaaaatgacggtgttgcagtgcaatatcaaggcaaaacatatgccgcagattatacaagtaatattggttggacggctgagcaagagattaaacactgggaaatatacttgaaaaatatcgacaaccccgaacgtatgcgggttgctcagttaagaattgcacaattgaagtcaggttgttatagctataatgaaactgctgcaaatgcgcttgctgctttgtctgcattagattggaaaccatattaa

SEQ ID NO: 46491 - DNA, 1017 bp, Acinetobacter baumannii
atgtcctttgatctcaaagtgagcttgcagcaaaggtctgaaccatctgcacagcagaaaaaactgaatcgcctgattgataaaatagaacagcaaaaagttagcttgagcacatggcaaaatgcacaagctgagattcaacagcacatacgacaaaaactgatgcctgtgtataacgatttacatatagtgctatttcagcagttagagcaactttggaatatattgcatagccatgagttttctaaagcggatatacaacaattcgatgaaaaaattgctcagcttgcacaaatgttgaagcgctccaaaatgctatctgctgaacagttggagctagtgaagcagatcgatactttttatcagcagcatgcaggggaatcggtaaaaaagaataaaaaagctcagccaatagaatttgaatatgaagaaaatgctgataaaggttcagagtttgaagaagaatttgaaaagtacgctgctgagcaacaacaagcgcgggaacaagccaaacagcaaagacagcaacagaaacgtgaacaagccgagcaaatggcagcgcagtcacttaaaacagtctatttaaaaattgccgcgatgattcacccagaccgtgagcaagatgaaaccaaaaaagaagaaaaaactgagttgttccaacaagcaagtcaggcctacgaaaagcaggatttgttttacttactcaaactccagttacagcttgaacagaataaagggctaggcgctaaagaattatctgccgaacagttgcgattttataaacttgctttggatgcacaaagtcagcagcttgaaagccaaattactgagattttggattcttttcagttagccaaaaatgtaaaagcagagcatgtacatattagtgatgtctataaagctgtagatgctgactgtgctgagttaaagcagcaggtgaagtgggaaaaggaacgcttaaagcatatgaaaaaagagagtggggtagagatgttgttgggacatggggttctataa

SEQ ID NO: 46492 - DNA, 885 bp, Acinetobacter baumannii
atgacatttacccagcttgaaatttttgcactcattgctgaactaaaaagctttactgctacagcagaaaagctgggaatttcacagtcggcagtttcccatgcgcttaaatcattagaacaacaatggggcattaacctgatttcaagaactcaaagcgatattgagctgacgacgacaggtcagcagttattaacccatgtaaaagagctgttgagtatttccgataccttagaaaaagaagtggctgccatccacggtttaaatgaaggcacattacgtattggttcttttggagcttcatcctctatttatctattgcctgaaattttagaaacctttcggcaacgctaccctaaaatcgaaatttatatcgatgaaggtgaagataaagaagttgctcagtggttactagaaaggcgtatagaggttggttttttgattatgccagatgagcgattcgatacattccccttaattgaagatcgttttgtggccttaattccgagtggttacccgctcgcgcagcaactctatattgatccagcacatctagaaaactgcccttttattatgacaatggcgggtagtagacatcaggtcgaattaattttaaaaaactttaatgtgaaacccgacatcaaattttatgtttcacaaattctaagtattgtcagtatggtccataaccagttagggatttcgattgtctctgatatggtgctcaccaaagagttactctcactttatcccaacgtggttaaacgcccatttaaaccgaaccttaaacgttctattggtcttgcagtaaaaaataagaaacacatcagtccagccgtaaaagcatttattgaagttgctcaagaggtttggtccgatcattaa

SEQ ID NO: 46493 - DNA, 600 bp, Acinetobacter baumannii
atgtacctcatccaaccttggattgattcaacaggtcattttttcaatcgggacaattggtatcttgaaagacttaatcatgaaattgtaaaacaaatcatcaccgccgtttatgttatcttttttggtttatggcttgcgtcatttaaattaaaaaaattaaaaccttatcgctggcaatatggctatatgttttttgtcagtatgctcggtagcagtatagttggcctaataaagtcacaatctgctcacgcctgcccttggaatatggttcaccctaatactttaggaagctatatttgggactttagcgctaaacatggccattgttttccaggcggtcatgcaagtgcaggttttattttaatgacaggttattttgtttatcgtcttgaacaacctaaacgtgcttacttttatttattctccggtattttattaggtttcatgatgggttgggcgcaaatgatgcgaggagcacattttctaagccataacttatggacaggctgggtcgtttgggcaataaatattttattttatgcgatttgtattcatcgttttgagtttgaaaaacaagtgaaacaagaacttacgtaa

SEQ ID NO: 46494 - DNA, 1248 bp, Acinetobacter baumannii
atgttccgacagcaaaatctttatcttttgctcttttccttatattgggcacaaggtttgcctgtaggttttatgacgcatgccttacctgtcatattaagagctcaaggtgtatctcttgcccatattggtggttttgggctgctcatgttgccttggtcaatcaaaatattttgggcgccgtgggtagatcgacatgccatctcgcatttaggtcactatcgtagctggattttacctgctcagtttttgacggtgggtgtactttgtattttatcttttttccctatacaagttttagatcagcctctttatctctttatattttttattacgctgttatttatgaacttaacaggcgcaactcaagatatcgcgaccgatgctttggcggtcaatttattgcaacacgatcagcaacattggggaaatacttttcaggttgtaggttcacgacttggttttattgtaggcgggggagccgtgttatggtgcctagactggttatcatggcaaccgacttttctattattagccgctttagtctttattaataccttacctattttactatttaaagagccatctcatacttctcattcacctcatcaatatagccaaccaagtctagttacaaagattaaagcttacttggggtacttctctcaaaataaggaacttcgttcttggttaatcgtccttataacttttaaggttgcagatggtttagccgggccattacttaaacctttaatggtggatatggggttaagttttactcaaattggtatttacatcaccatgcttggggctgttgctgctttattgggggcacttagtgctggctggatgttaaaacatatttctaggtctacagcattaatgactttttcaatattaaaaattatgagtttaggtggctatgcgtatttggcttatgcttatgaacaaaaggtaaagataaatgtatggcttatctatgctgtaaatgccctggaagatgcctttgctgccatgctactggttgtgatgttaactttggttatgcattacagtcgaaaaaactatgcgggtaccgattttacttttcaggtttcagtcatggcgacagtcagtggtggtctttacagctttagtggagtcattgcagatgcgcttggttatttccattatttgatagctattgtcagtattgcggtactctttttaattcctatttacctatggaaagttgccaaaactgtataa

SEQ ID NO: 46495 - DNA, 462 bp, Acinetobacter baumannii
atggagtttgttgtagaaccttggcactggtttgtattgggtatcttacttattctttctgagctgattctccctgcctttgccgctctctggtttggtattgcagccataatggtttgctttctctattggttatttccagatatcagccttactactcaaatagtgctgtggattgtgttatcggtgctatgtacccttctctggtttaaatttattaagcctttatctattgataaaactaaagcaggtttacctcgagaagcgacgattgggcaaattggtatggtgattcagaccggacttgctcatgaccaaattattgttcgtttccctatgcctattttaggggccgatgaatggaactgccgaagcaccacccctgttaaggtcggtgatcgggttcgagtcattgatatttcgggtaatgacttaattgttcagccccacagcacgtcataa

SEQ ID NO: 46496 - DNA, 1221 bp, Acinetobacter baumannii
atgaaaattctaccttcatctgaatatgatcaaattctaaaatacagtgtctactggctcgtcatttcgattgtgattggagtcgttgcagggttagcatcgactttaatttttgtagcttttgatatttcaaataaagtaagaagtctgcatcactggcttatttatttcttgccttttgtgggttttggtattggttatctcattaaaaaatatggttcgcccattgaacgcggaactcatttactcatagatgaaattcaccaacccaagtcgtttattccaaaacgaatgagccccatcatttttatcacctcaattttaacgcagttgtttggtggttcggcagggcgtgaggcgccagcagttcagctttcaggtgctttaattgaccacctgagccatattttaaaaatctcggaagataaccgaaaaatttgcttaatcgccagtatcggcgcgggctttgctggggtgtttggcttgcctctggcaggtgcaatctatggtttagaaattactgccttaggtaatttaagatactcagccatttttccatgttttgtgtcggcgctgattgcttcggccatccctgagctattcgaaattgttcatccgcatgttttttatgtaattagcgagtttccagctattcattttggaacgctcatgagcctaattgcagcagggttgatctttggtttagtcgcgcgtttctttattgcagctattcattttgcgagtgacgtcttttataaatacgttcggtatttgcctttaagaacgatggcgggtggtattgtcattatgctacttactttgttcactgcgcatcagcaatacaatggtttgggtacagataaaatcatttcatctttttatgtgccgattgagttttacgacttttttaacaagaccatttttaccgctatcactttaggttcaggttttaaaggcggtgaaattacaccactgttttatgtgggtgcgacattaggtaatgctttaggcgcagttttaaatctgccaatttcattgcttgcaggcttaggtttggtcagtcttttttcaggcgcgagtaaggcaccgttaacctctattattttagctgttgagctatttggaatgaatgttgccacttatgcgattattacttgtttgttggcagcgctattttcaggggattgtgggttgtatcgccgtaaaaagttgatggattga

SEQ ID NO: 46497 - DNA, 312 bp, Acinetobacter baumannii
gtgctaatatttattctaatacttacgttttttgtaggtttacttgttgggcgatacactatatttttaattgaaaagtctttgtctgtttttttatatgctgttaataaatttttaaataaatatttagttcttttactttcaattgttttttgctttctctttttctctatctatttaacaggaggattgatgttgtggcacattcttagtgatggaataacagaactgggtaagcttgtatatctatctggatgggtagtcggagcaatattttttggatttcatccggaagataataattttaaatga

SEQ ID NO: 46498 - DNA, 300 bp, Acinetobacter baumannii
atgtctatattaggtttcgctattttttttatattcttatatggcattggctattttgtagttaaagcagggtggaagcttcgctatttagcgccaatatggtttttatcgttttttattatcactctatttgttttagcaattttatttcctaaagattggaccaatgcgcacttttttactatagatggtcctaatcacttagcacttctttctttattaatatcttcatttttaagttcacttattacgtttattttagttttggttgtgtgggctattcggcatgatgtcttttaa

SEQ ID NO: 46499 - DNA, 303 bp, Acinetobacter baumannii
atgacaacatatttttcaggtttcaaaataaaaggcttacggttaaaacataacctacaagctttagaagtagctacggctttagacatcacgcctacttacctttctctaattgaatcaggcaaaaaaaaaccatcttcaaaagtcttaaaaaaagctgctcaattgtttaatgttaccttagatgactttacagaatcagaagagttaataaatgattttgaagagctctcaaaaaaaattgatattgcaaatattattgccgtactagaaatgacccagaaaatgaaagaccagaagtag

SEQ ID NO: 46500 - DNA, 249 bp, Acinetobacter baumannii
atggtaatagtatcaactggattggaaattcttattccatacagcttaagagtagagagagctattagaactgctttgtcttctttaactagatatctatacatgcctatagaactgagcctagattttatacctctatttttatccaactatcctcaacatacccaatatttgatttgcatgtcagaaccaaatcaaagtagtgctcagatgtgggcttccctagttcactttaagtctcgttattaa

SEQ ID NO: 46501 - DNA, 243 bp, Acinetobacter baumannii
atgaatgttgaacaagaaacaatccttctagctgttaatgatttgaagaaaatagctgaggttttacggaaacataaagagtttcaacttgctgaaataattgatgaatatataaaaaattcatcagttttagaaagtccaagtaatcaagattttcctgttgacttacatacagttgttaatacgagttttaatcttttgaaacttatggaaattttagagaaaatttttaatgatttctaa

SEQ ID NO: 46502 - DNA, 561 bp, Acinetobacter baumannii
atgccaaatttagaagcttcatttagagcactcagagtgcttcatacagcaaaagatttatttaaccaatatggatttcataaagtcggtattgaccgaattattgccgaatctaaggtgaccaaagccacgttttataaccattttcattcaaaagaaaggctcattgaaatgtgcttaacctttcaaaaagatgggttaaaagaagaggtattttctattattcattcttatcgtgaacttatggtgtttgataagctgagaaaaatattttatctccatgccaacctcgaagggctgtaccgtttgccttttaaggccatttttgaaactgaaaagttttatcccactgcctataaagtggtggttgattatagaaactggttagtgactcaaatacatggcctacttttaaccgtcaaacccgcagctttaatggaagatgctcacatgtttttgtttgtgattgatggggcaatggttcagcttttaagtaaagaggaaacagatgaacgagataaattattagattattttttaagaaagctgtctgagtgttaa

SEQ ID NO: 46503 - DNA, 882 bp, Acinetobacter baumannii
atgaacgattcaacatttaacgcacatgaatactttcaaaaaatttatgaacgtcctgtgattttagaagccaaacaactgagccaagtctttaagcatggtcacaacgaacgcactgttttaaataagctcgatttaaaaattcataaaagagagtttatttgtgtgattggcccttctggctgcggtaaatcgacactaagccgtgttatcgcaggtttagacccataccatagtggagaagttttagtagacggcgaatgcattacgggtccatgccctgaacgcggcatggtgtttcagggctatacccttttcccgtggaaaactgtaaaagaaaatgtgatgtttggtccgcaaatgcgcggtgctagtcaaatgacagccgaagctcaagcacgcgaatggattaatattattggtttagaaaaatatgaaaatcagtatccacaccaactttctggtggtatgaaacagcgtgttgcgattgctagagctttggttaatcaacctaaaattttactcatggatgaaccttttggtgcgctcgacccacacacacgtcaaaaaatgcaaaagcacttgatggatttatggcaaaacattgatatcaccattatttttgtgacccatgacatggatgaagccattttacttgctgaccgaattgtggcactcaaagccaatcccggtgaaattaaagaaattattgaagttaatttacctcgcccacgctcactcgacttaatgagtgcacctgagttcaaacaacttcgttcacgggtagattatttagttcacgccgaagaagatgagcttgaccctgctttacaagacttaccaaaaataccgcgtatgactcaggtcagtacagaaaaataa

SEQ ID NO: 46504 - DNA, 1962 bp, Acinetobacter baumannii
atgactacccagttaactacaagtaatctgcaaggtagtccaacggggcctgaagtgactggtgttaacccaccagccaacttccctgatgagtccaccattgctcgacttgctaatgagtttttttcagcagtgccaagctcaagcagttcgacttcttcatcgggccttaacttggacttacctgtcggagcgccacctcacccaccgcaaccgggtgaaccattttctgcactcagtggtcgtgcgcccaatatcgcctttcagaaaagtctcaatccggaatatcctgagcatattccaaatttgccagactaccctgaacgtcgaattgtagcgtctgcgcctgtggtgggtggagctaatttgccacgcccaccatttgaaccacatttgccagaagctgctcatagtgaacccagtgtgccacgcattgaaccaagcttgcccactggtacaggtgaatcaccttattattttttaaatgatttctctgcccccaatgcaacagaaccatctgttaaaggggttgaagataattattcggttgcacagtcttttcagttgccacatggtgaccagctcaagtcattactgacggaagatcgttttgcaacgaacacacctacccaaagttcaacaagctctgcattttattttttagacttgcctcaaagtggacaaagttatagtcactatcaaccatcgcaacccacttttgtagcaagcagtgctcaaccactcgatgtacatgccatacgtcgcgattttccaattttacaggaacgcgtcaatggtcgacctctagtctggttggataatgctgcgaccacacaaaaaccgcagcgtgtgattgaccggattgcttatttttaccagcatgaaaactcaaatattcaccgtgctgcacatgagttagcggctcgtgcaactgatgcctatgagcatgcaagaaatgtagttgcccgatttattggtgcaccctcttctaaagaaattatctttgttcgaggaacaaccgaagggattaacctgattgcaaaaacatggggcgagcaaaatattggtgaaggtgatgaaattatcgtttctcacttagaacaccatgccaatattgtgccttggtatcaactcagtaaaaaaactggagctaaattaagagtcattcctgtagatgacacaggtcagattattttagaagagttaccaaaactgattaatgaacgcactaaactgctgtcgattactcaagtttcgaatgctttaggaacagtcacacctgttgctgaagtcattaaaattgcccatgccaaaggtgtacgcgttttagttgacggtgctcaatctgtttctcatatacccactgatgtacaagctcttgatacagacttttttgtgttttctggacataaagtgtttgggccaacgggaattggggcggtctatgcaaaaccagagttgctagaaagtatgcctgtttgggaaggcggcggtaacatgattcaggatgttaccttcgaacaagtagtttaccaacctgcaccaaacaagtttgaagccggaactggaaacattgccgatgctgttggcttaggtgctgcacttgaatatgtagaaagtctaggcattcataacattgctcgctatgaacatgatctactcgaatatggtcaaaatgcactgagcagtgtgtctggtttacgcttgatcggaacagcgcatcacaaagccagtgttatgtcctttactttacaaggctattcaactgaacaagttggtaaagcattgaatcagcatggtattgccgtacgttcaggtcatcactgtgctcagccgattttacgtcgctttggcgtcgaacagactgttcgtccatctttggctttttataatacgacagaagaaattgatttattggtgtcggtgttacatcaactgacgcgtaataggcgtaccagttaa

SEQ ID NO: 46505 - DNA, 672 bp, Acinetobacter baumannii
atgtcgcacttcaagttttactctgccgttttagatgtgcatacacgtgtagccgacctttacagcagcccacatgaccaaattaaagaacagcttcgcttaaccattgaaaccattaaagaacgtcaagaaagtgagcttatcaataaccctgaatacggtttactggcaagtgtgacagatgaccaacgtatttcgactttaaatggcccacctactccagatgatcttgatgatttgctacgtaaagtctggaaagaaccgggatttttcttagcacaccctgatgcgattgcagcatttggccgtgaatgtacacgccgtggtgtaccgcctccaacggttagtctgtttggttcgcaattcattacatggcgcggtattccacttattccatcaaataaaattcctgtagaagatggcaaaactaaaatcttgctgcttcgtgttggtgaaaagcgtcaagggattgttggtttgttccagccgggtcttgcgggtgaacagtcaccggggctttcagtacgttttatgggaatcaaccgtaacgcgattgcctcatatctaatctcattatattgctcacttgcagtattaacagacgatgctttggcagtgttagatgatgtggaggtggacaaatatcatgactacccagttaactacaagtaa

SEQ ID NO: 46506 - DNA, 1257 bp, Acinetobacter baumannii
atgaaatatttaaaaaccccatatttaaagttttctactcttttatttatctgtagtggtcattccttgttgtgggcagcagatacctctcaacaaagcgaagatgaatggaagttcacgctaaagaatgcctatatcaaccgtaattttgataatgatgcactcaaagacactggtagttggtctcaggcagcatcattattttataaatcgaaaatgcatgacacccctctgcaaattgcagataagcccattacgattggggccgatgcttctgtacaatacgccgttcgcttgagctcagacaaacatattgcggacacggtcttaccttttaataaggaaacacaatctcaggcatccgactttttaaaatatggtgccactttaaaacttggttatgacaaaaccttgctgagtgtcggtgaactctggttagacctgcctgtaactgccgtagatgctagtcgtcagttactcacttcgtattggggaactaatcttaagtcacaactttcagatcagctttatgctgaaattggccgagtggaaaaagtctctccacgtaatgaagaagactttaaaaagttttcgttcacttcaaatggcattaccaaagaatctgatggcttaaattacatagatctgcgctatcaatttacaccgtcactcaagggcgaatactactttggcaatttagaagacctctacaataagcactatgtaggacttgagcataattggaaacaacctaattttgcgcttacatctaagtttaaatacttcaatgcaaaagatgatggcaatacttttgatattgatgcacaaaatattggggtgctagaaacgctcaaagtaaaaaaccatacctttggcttgggctaccaacaaattatgggtgagtcggcttatccattaccagatggtttcttaccagagacgtatttcattaattggaacgcaactggattctttaaagaagacgaaaagtcttatcatgtgatgtatggctacgactttaaagattatgttccgggtttaaatgcaatggtgaaatatgtttacggccatgactttaaagcagccaatggtgaaaaaaactatgaaaccgaatcgaatgtgattttaaattatgcgtttcagcagcctttcttaaaaggcgtcgctcttcaatacattcgtattgattacaacgtaaaacatggcaatgactttggtgaagatcgtctatttgtcaactacaccaaaaagttttaa

SEQ ID NO: 46507 - DNA, 1344 bp, Acinetobacter baumannii
atgtctcaaaactctatagacgtacaaagtttcattgatgaaataccgctatcgtctttgcaaaaattaatcatgtggttgtgttttttaatcgttgcgattgatggttttgataccgcagcagttggatttattgcacctgctttaaaggcagaatgggggttgcaagcaaccgatttagcacctttatttggcgctggcttgtttggactgatggcaggtgcactcatttttgggccgttatccgataaattaggccgtaaaccgattttgattggttcagtcattatgtttggaattgctagtgtctttgcctctttttcagcagatttacaaactctgattatttggagatttctcactggattgggcttaggtggggctttacccaatgcaattactttgacctctgaatatgcgcctacatctcgccgttctaatttagtgaccatgatgttctgtggttttaccattggttctgctcttggtggcattttttcagctcagctacttcctcatattggttggcacggtattttgcttattgggggagtgttgcctttagcgactgtacctttcttatattttttattacctgaatccattcgatttttagtgcttaaaaaaaagagcacccagaaaattgaaaagattattcaccgtatcgcaccgcatttaaatagtacaccaactttggttccaacggtcaatgaagttgaaaaatcaagtttgaaagatttgtttaataaaggctttgctttgggtacttttttgatttggtttaccttttttatgagccttctcattatttatatgatttcaagttggatgcctactttactgaccaatgagggctttaatttatccaatgcgtcatggctgacttcaattttccaaatagggggaacgattggtgccattgtcttaggcctgctaatggataagatggatgcaaccaaaattttaagtacggcttatgtttttggtggtttttttctgatttgtttagggtttggaattgaacaggcaaatacggctttattgttgtttgccatgtttggggtaggtgccggaattagtggttcgcaagtgggagcaaacgcttttgcatctagtttttatccaacacattgccgtgcaacaggggtaagttgggccaatgcagtagggcgctcagggtcgattgtggggtcaattatgggcggctggttaatgtcattaaacctctccagttttgaaattttaagtattttagcgatacctgcattttgtgccgcggtctcgttgttactcattaaacgtttaaagaaaaatcggtctcaagttttagtcgcttcgaattga

SEQ ID NO: 46508 - DNA, 702 bp, Acinetobacter baumannii
atgtcatttatttttgaaccaatgaccactgcgggtctatttattcacggctcagagcataaatttccagtacgccgtgtgtattgtgtcggccgtaactatgctgctcatgcacgtgaaatgggttttgacccagaccgtgaaccaccatttttcttttgtaagccaaatgaccttgagtcggttgttccggtaaatacagatgcggttgatattccatatccatctgaaacttcaaattttcattatgaaatcgagttggttgttgcaattggtaaagatgccaaaaatgtctcggttgaggaggcagtgaactatatctatggctatgccgttggtttagatatgacacgccgtgatttacagatggcaatgcgtgaaaaaggtcgaccatgggaaatcggtaaggcttttgatttttctgcaccagttggcccaattcatccgattactcaaacgggtgaaatcaataatgccgatattcatttaacggtaaatggtaaaaccgaacagcacagcgatgtcagtcacctgatttggtctgtggccgaaacgattgccaatttatctacattatttgaactaaaagcaggtgatttgatttttacaggaactccagaaggcgtgggtgcggtagtgaaaggtgatgttatgcgtgcagacattactggactgactggaattacagtgaatgtgaaataa

SEQ ID NO: 46509 - DNA, 639 bp, Acinetobacter baumannii
atgaaactttatagctttttccgtagtggcacatcacatcgaacccgtattgtgttgaacctaaagggtttggcttatgaagcgacttatatctcgctcgctaaaaacgaacaccatcaagctgcttttaaagctttaaatccgcaagggtttgtacccgtacttgaaactgaatcgggaaacttgttgcaaagtccagccattatcgaatggctagaagaacaatatcccgaacctgctttattacctacagatgtattgggtcgtgaaaaagtccgtgccattgctgcattagttggatgcgatgttcatcccctaaataacaagcgtgttcttgaatatttacgccagaacttagggctggatgatacacaaatcaatgcatggtgtgccaagtggattcaagatggatttactgctttagagcatattttggaacaagaccagaatcgcgaaaagttctgctatggcaagcaaccgactattgcagatgcctatttggttccacaagtagtttctgctgagcgttttaaagtcgatttatcggtttatccaaacattaatgagatttaccaacattgcatgacgctagaagcatttcaaaaggcagcgcctgaacagcaggccgatgcattttga

SEQ ID NO: 46510 - DNA, 1221 bp, Acinetobacter baumannii
atgtcaaatactcaacaaccgatattaattgcgggtggcggcattggtgggtttgcagccgcactcgctttggcaaaacaaggctttaaggtacagatttttgaacaggcccctgaaattggtgagatcggagcaggaattcaactagggccgaacgcatttcatgcctttgatgcgctaggaattggtgaaattgctcgcagtaaagcggtctataccgattatatggtcatgcatgatgcgattgatgaatatcaggtcggcaaaattccaaccgatgaaaaattccgtgaacgtttcggtaacccatatgcggtgattcaccgtgccgatattcatggttcattggtcgaaggtgcaaaacaatacggcaacttggaaattatcactaattgtcatattcaaaaagttgaccaaaatgatgctggcgtaacaattaccgatcaaaacgggaaacaatatcatggtcaggcacttatcggtgctgacggtgttaaatccgttgtgcgtgatacctatgtgggtgatcctgcattggttacaggtcatgtggtttaccgtgctgttgtacctgaaagcgagtttcctgaagacttgaaatggaatgcagccagtatttgggtagggccaaattgccatcttgtgcattatccactgcgtggtggaaaggaatataacgttgtagtgacgtttcatagccgtgagcaagaacagtggggcgtaactgatggctccaaagaagaagtactgtcttattttcaagaaatttgccagaaagcacgtcaattgattgagttaccaaaaagctggcgccgctgggcaacagcagaccgtgaaccgattgaaacatggacttttgggcgtgtgacattacttggcgatgcggcacatccgaccacgcaatatatggcgcaaggtgcatgtatggcgatggaagatgccgtaactttaggggaagcgttacgtgttaccgaccataacattttaaaagcttttgatatttaccaaaaagcacgagtagcacgtacagcacgcattgttttgtcttcgcgtgaaatgggcaaaatttaccatgccaaaggtgtacaacgcttggttcgtaacgacttatggcgtggacgtcctactgaacgtttttatgatgcaatggaatggttatatggctggaatgtcaataactgccttgatgcagtgaaaaactatcaagggaatgtggcatga

SEQ ID NO: 46511 - DNA, 1038 bp, Acinetobacter baumannii
atggaacatttagcaacactagatgacttaccgaaacgttatcttggtcaacttgaagaatcaaatttagtccctttatggccaagtttacgcaatgtattacctccgcataaaccgatgccgcagaccatagcaactgcttggtattttcagaatattaaacctttattgcttgaagctggtgagttaacaccaattgaaaaagctgaacgccgtgtattggttttagccaatcccggacatggtctggaaaatatgaaagccagttcggtcatgtatcttggtatgcagcttttattaccaaaagagtgggcaccatcacatcgacataccccaaatgcagtgcgtctgattattgaaggtgaaggggcgtatacgactgttgaaggtcaaaaatgcatgatggagcatggggatttaatccttacaccatcaggtctttggcatgaacatggacatgatggcgatgagccagtgatctggttagatgtactggatttacctttagtttattacatggaagcttcttatgtacaaccgggtgaaatccaaaaagtaaccagtgccggaaatgctcatcattatggaactggcattgtaccaacagcacattttacccgtgaaaatacttcatatccgatcatgcgttactcttggaaagaaaccaaaaaagttttgcatgcgcttgcagatgataaaaaccatcaagctccaattcaggtgacatacatcaatccagaaactggtgatgattgtcaaaatattattggttactcagctttaatgctcagaccaaatgaaactttacagctccaaccgcgctctactgcccaaatttttcatgtgattgatggtcagctccaagtcaaaatcgatcagaaagatttcaatttaaataaagctgatacggtatgtgcgccatgtttttcacatattgatttaatcaatacctcagatcaaccatgttatttgtttattgcagatgaagcgcccttacaacggaaactgggtttgtactctgtgcgtgagcgccagtaa

SEQ ID NO: 46512 - DNA, 894 bp, Acinetobacter baumannii
gtgtttgatcttgatactcggcttttgcaaattttctttgaaatttataaacatagcagtgtgtctaaagctgccgaacagcttgaaattggacaaccaactttaagtattgcgttaaataaattacgtgagcattttcaggacccactttttgtccgtattgaaaataagatgcaacctactgagttatctaaacaaatatttccgctggttgtagaaattctgaaccgactgaaactggttcaaaactacaatattgaatttgatccaaagacttcaaattatcaatttaaaatcagcatgactgatattagccatctggttttattacctaaactgatcaattatttacgtgcacatgcacctaatattcgcttagaaattgtcccaattgatgccaatacaccagtcatgatgtcaaatggagatattgatttagccattggttttttgcctcagctcgaagcgggtttttatcagcaaacactttttcagcaacgttatatttgtattgccagtaaagaacacccaaggcttacaaggacaacactatcagatcaagaatttcgccaagagctgcatgtcgatattttcgcaactggtggacactatgttctggagcatgagttacaaaaacttggagtaaaccgaaatattctggttcgcctcccaagctatctaggcgttggattagttgttcaagacacagatgcgattgcgactattcctcattatttaagtcaggtgcttttagtcagaggtggcctaaaagtcttagaaccgccttatcattttccaacttatagcgtgaagcagcattggcatgcacgagttcatcaaacaccaagcaaccaatggttaagaagagtatgttttgaacttttttctgaatag

SEQ ID NO: 46513 - DNA, 1290 bp, Acinetobacter baumannii
atgactgcattgatgctgatggctttagccgtatcgataggtttaggttataaaacgaaaattaatatcggattttttacgatagcgtttgcctacctgattggttgctttgacatgggtcttaaaccttccgaagttattgaattatggcctgtcaaaattttctttattattttatccgttactttgttttataactttgctttggcaaatggtgctttagagaagcttgccagccatcttttatataaatgccgtaagtttcctcagtttttacctttagcgatttttttcgcagcaaccattattgctggcctaggtgctggtttttatacagtacttgcctttatggcaccgattacactgctgctgtgtaaaaaaaccaatatgaatatgattattggtgggatggctgcaaattacggcgctttagctggcgcaaattttatgacatcgcaaagtggcattattttccgaagcttaatggaaaatactggccttagctcacaaacagctttttcatatagcagtggcatttttatcttaactttaattattccaattgcggtgctgggaatttacaccctgtggaatagaaaaagtaattcaattgtaattgaagatcaaaagcctgagccattcgacaaaaaacagaaacaatctatcttccttattattttaatgatgtcgattgttttagtttttccaatcttgcatcttgtttttcccgatgtaaaaacgattagttttttaaactccaaaattgatattgccttccttgcgattaccttctcgctcattagtttacttatgaaacttgcggatgagaaaaaggtcattgcacttgtgccttggggaacactgatcatgatttgcggtgtcggtatgctcatcgcattaggtgtgaaacttggcattattactaccctatctgagtggttagcaaacaatgttcctgtgtgggtcattccagtacttttatgtctgatcagtgccattatgtctgtattttcaagcactctaggcgtggttgctcctaccttatttccaattgttccggcgcttgcacttacctctggcctaaacccactagtgctgttcatttgtattgtggttggcgctcagtctacagcgatttctcctttctcgtctggcggtagcctcattatggcttcagcaccagcagacatcgacaaaaccaaattctttaatcaactgttatttaaagcaattcctgtaggagtcattgccgctttaatcgctatttttgctttaaaatttgtaatgtga

SEQ ID NO: 46514 - DNA, 756 bp, Acinetobacter baumannii
atggattatatgaataaattgcataagaatgaatctccagaaatgattctagcttttgagagtgctataagtacatttaaatatttttggcgtgaactttattgggaatatcgacgaattgttcctgctttagaactggcttatgtgaagtgtgcatttatccaagaaaaccttgaagataaaaatgaacctttaattgagtatatgtggattgatcaagttgattttgatgggagtacaatttcaggaactttgttaaacgaaccttatattattgataatgtgcaatctggtgaaacagtaaggcttaaatttgagtctatagttgattggatgtttttatctaatggcactgttcatggtgcgtttacgattcaagaataccgtaagactttagatgaatcaggtcgtaaagaatatgacgaggcgtgggggattgattttggtaatcctgatgaaatttttctagtttatgaccagaaaaattgtcccgaaaatctagaagaacatcctatgtgtaagagtattttgaatcagttcataaatattataaatacagatcctacaatcattactgaaaaagatgaaagtggtaatcaattattacatcgtgaagttatagcgggtaattatttatttgttcaagagcttttaagattgaatacgaataagttggaaataaataaacaatcaatgactcctttagatttggctcataagttgggttggaacaatattgtaaatttacttaagtag

SEQ ID NO: 46515 - DNA, 312 bp, Acinetobacter baumannii
atgaataaatatcttatgctaactcttcttgcagcttctactctttctttgacaggttgcgcacaaatgtttccagctcaagctaccaaacttgaaaatggaaattatatgattcaaactacttccaatattttaggttctaatgaagcaatggaaaacaaagtaaacaaaaaggctgaaaccgtttgtgctggtaaaggctttagtgaaataaataataatcatcaaactcatagccaacagatttatacagctcaagtaattacaacaggtacctataagactttcaataagacgattaaatgtaattaa

SEQ ID NO: 46516 - DNA, 246 bp, Acinetobacter baumannii
atgcaatttcctgaaggtgatgatgactatgagggaaaattaattagctttggagctacacctagtgggaatttcatttgtttcgattacagatttccttggatcaaggatcaacctaagatcgtgcttgttttacacgatgaattctatgattttggaatgaacgagggtaaaagaaaggttctgtatctagcagataactttgcacattttataaattcattacatgaatttattgagtactga

SEQ ID NO: 46517 - DNA, 507 bp, Acinetobacter baumannii
atgaatttgtatccaatacctgctgattttattaatgaaaaggtgaacctttcatggtgtgatatcaaatggggctatgaaaacaatcttctcacttcagaaataccaataaaaaaagcagagaatagtttattaacggaaaactatactaacactgaacttgagttgtcattccttatcccgagtgaatcaaatgacatcactccttttattaatgaactatgtcctaactttaaagaagatgaatatgagaacattagtgaaaaatggttatatgtaattcttagctggctttgggctaatcgtgaaagctttgaagatccattagatgaggtggaaaatatttatacagtttttgattgtccagccgaaatggatagttttattaaatatatgcctcctactgatggatacgatccctcattgtattcttatgcagaaaatattaatcgcttaatgaagaattgggagagctatttacaaaagagtgctgaaaagtataagtga

SEQ ID NO: 46518 - DNA, 480 bp, Acinetobacter baumannii
atgagatctttacatcaggtagcagctagtgaaatagcagtaataccttattatctgaaagggtatcagcaacatggcttgcagtacggtataaacgaacatgaaagagctgaaccattaggtgcgcaatgtacaaattgccataccattctatggataacaggtcgtaatgatcctattttgaatgaagatgatagtaatatacctgacagtggaccagtttacagagagtactataaaaataaactaaaacggtttttaagttcattacctccctgcccaaattgtcatcaccagacatatgatttattcgttaataatacaacattaactagatttgaagatggtagcccagctccaaaatatccagaggaatattatggggttgatgaagaaatgtctgcactaatgaaagacaaagccgtgtggtggtatggcaatcaagctgaagctaaaagacttaatttgaaattgttataa

SEQ ID NO: 46519 - DNA, 705 bp, Acinetobacter baumannii
gtgcatgatgtgattgagctatcagttcttagaaccaaatctccattttttattattgctaaaaatttctttatttttggattactttggattttatctttattcttgtatggagttttttactatgattcatattattccatatttatttatctaattagtttctatgctacttatttttttggatatttaatatctaaacctattgttgcagaccttgactctaacactcttaatcaagttaagtttttaagccttatattttttactctttattatgtaatagtacctctacgctgctttctagttgaaattcatgatggtttatatggtcttagactgggttttggattcgtttttccgttctggaccctaactccaatttttatcactaatctgaaggataagttttatatttatttatgtgtcttgctatgtgctctagaagtaattttttggatattgttttctaaaatgagtggctctgaattttacaagagacctctatctgttgctatcttcgtaagttctcttatatttgtattaacgtttccttggtatttatcttggttgagagaaatagacatcaataaatgggttttaccattcttttttaaagaagatagatttatatctaaactaatatcatgggtagcaataggactcggtagttgctttatgtttttattctatcttttcttctaa

SEQ ID NO: 46520 - DNA, 516 bp, Acinetobacter baumannii
gtgcaaaatattaaaatgaaagatgactcatgtcatttttttactgaacaagatattacaagtaagcaagttattaaagtttgctttgacatatctgattttgaagaaattcaacaagtttatgatttttttggcgagaaaatatatggaaataatcgagagcatttaaatgacattcatccaaatacaaaacattttggaagtaatttgtctgcatttcatgactatttaagaggatatctgattggtattttttcagaaaaaagaaatgaaattttatcaataactataaccaataacaacaataaaaatgttgatgatgattggttggatttctttagtataattatgcaaacattttttgatgcacataaaaagataaaatatggaatttatatggacttgaatttttcaagaagcattatggctaatatgatggattattttagttttttaatttctgattatcataataggccaaaagacgagctggatgagaatggtaattatgtgtga

SEQ ID NO: 46521 - DNA, 276 bp, Acinetobacter baumannii
atgagtttgaatcaaaaagtggctgatactgcacaagcttttattgcactttatcaacaaaagaatgagccaaccaaggcagaacttttacaagttcttgctaatggaattagtcaaatcgatcctgacaagttggatacagaagatcgagaacaagtggcaactacatttgaaagttttctagatattgtaggcctagaaagttcagaaggtattttaaataaatgggtatacggtgaagaaattagtaagttattggagcaagataaacattaa

SEQ ID NO: 46522 - DNA, 225 bp, Acinetobacter baumannii
atgaaaaagcttttggttctagtcatggctgtcttaagttcacaagttggttgtgcccaaaaaactgagaataaaacagaaatgagtattcaaaattctaactctattgttattcaacaattagaaaagtttaaagctcaagatcattttgcgggagatggtcagctatatacagggggttcaaaattctgcattacgtatgagtttgaatcaaaaagtggctga

SEQ ID NO: 46523 - DNA, 315 bp, Acinetobacter baumannii
atgaaagataatatttctggctgtacagtcgaagaagccatgactgttttaggtggtcgttggcgcatgctcattatttcttttttattagaaagaacgatgcgttttaatgagttgcgcagagcaatccctaatatttcacaaagaatgctgactttagaactacgttttttagaagaagaaggatttattttaagagaagtctatgcagaagtgcctgttaaggttgaatattctttaactgaggaaggccggaaattagaaaaattagtagatgtattaaaagaaattggtggatggcttaaatcgagatag

SEQ ID NO: 46524 - DNA, 525 bp, Acinetobacter baumannii
atgaaatttttaacctatatatttttaatagttttactttgtgggtgtggttttaaacctcaatttagaccaactaagatgtattcaggaaatgaaaataaaaatgaatctgatttttcactaatttatatagattggatggaaacagcacaaacatatgaaaaagtagggcaaacagagattactgaaataaacaatataaaagtagctgaaagagtaccaaccatgggtagcaaatatatgcttcaagtattaccaggagagcaaaacgtttctatttttctattttttattaaagagtatataggtatggatatgtataaaacagaaagtgtaactttaaaattacccccatttaatacacaacctaataaaatttatgttttatgtcctcaaaaatctaacggtttaaactttaaagtgaaaatatatccatatactcgtcaagaaatcttggaaaagaaagggatgactgattttatagtacgtccgtgtagaacaatggataaactttccattcaataa

SEQ ID NO: 46525 - DNA, 834 bp, Acinetobacter baumannii
gtgcaaaatgacttagatttactttatagaaaatccaaaagttatgtatgggggaatagcaaccttagtgacgtgctgaatcaacccttatctttagcgtactgctcattgatatttattaagcaaggtagtgctgatattaatattttatttaaaaactaccacttaaaatcaggtgattttttatttttgtcggaagattcattggcaatactacaaaaacgatctgccgatttttcttgtgattattgtatttttaatcgtgactttgccgcagaagttgcatctgtcttaccaaattctttatttacttatctacatttattccctcatttttcaccagaaatgagctaccaatccttaattaaaacatggataaatcagaccacttttatcctacaatcaacctctgaatatcaacgcatcttactatgtaatcatcttcagaatttctttttggttctttctgaaacagtcaatcgtgaaaaacttttgtctaaaaatgaatatagtagaaaagaaaaaatttgctggcaattttgggaaatgatctcattacattgtaaagaacatcgtgatgtaaatttttacgccaaagctttaaatattactccctattatctatctaaattatcgaaacaattttttaacgataacgcaaaaactttaattgatcggcaagtaattcttaaattaaaagaattattacgcactccttcaaattctattcaaagtattgctgatcaactgaattttgaagatacctcctatatgtgccgttattttaaaaagcatactggttttaccttacttcaatatcgtaaaagcgcctaa

SEQ ID NO: 46526 - DNA, 543 bp, Acinetobacter baumannii
atgatactaacgactgaacgattaattctcagaccttggcaggacagtgatgcttcaagcttgtatgagtatgcaagtgatgatcgtgttggaccaactgctggatggcctgtacatgaaagcgaagcacaaagtttagaatatattcagaccgttttcgctaaagaagaagtatatgcagttgcaaaaaaggaagataaccgtgcgataggtatggttggtttactaattggtaaggagagtaattttaaaattgctgataatgaagcagaggtagcttattggatcggagtgccgttttggggacaagggctaataccagaagcagtaaaagccgtgatgaaacatgcgtatgaagatttaaaattgaaagctttatggtgtggctattttgctgacaatgaaaaatcatttaaagcacaggctaagtgtggatttaagcatcaccatactgaagaaagtaagttcaataaatttttaggcgactatcggacagagcatataagttatttatcatatgaagactggaagcgagaaatttag

SEQ ID NO: 46527 - DNA, 759 bp, Acinetobacter baumannii
atgcgccgagttttgattgcaattgcaagtctggttgttattacgagtattgttttttttacctatcaacatataaaacagcagcaagccaaggatagcagtcaaatgtttgatgtggtaatgactgaaaaaatgaatcagctttatgatcaggcccaagactggactaaacctgtacaacttgatattcacgataaacggctggcaggacactacaaacaagtctcagagtttcttttgagttattgggtccaaaatgtaaatgcacgtaatgaatatttaagagaattaaaagctgcgaaatgggatacgtttttaaatgttgaccgtttagatcatgataaaaaacaaaaatatgctgaaaccgaaaaaatgctagccgatgttcgcagagcttcagataagtatcaatccgaatatgaaaaaattcataaaaccttcttggcaaaaattcaggaactgtctgttgataaagagatgagacaaatcctcgaaataaaattaggagctcagcaaaaagccgatcaggaccatgcaatttttatgattgagctacaaattttagataaagcagaagaaatgtttaagcttttaaaaacttatccatggcaaaagaaagatcagatgatacttttccatgaaaatgctcaggtcaaaaagtttaatgcactgtatcaagacgttttaaaacttaatgcaaaaattgaaaaaattaagaaaaagaatgtagctgccttggaaggggagttaaaagaatag

SEQ ID NO: 46528 - DNA, 1140 bp, Acinetobacter baumannii
atgaaaacatttcacatcattacatatcggcagctttttgcccttttgaccttaggatttggttcagtatgtatggctcatgcagaagtaaattcttcctcaacccaacaagtaaacggtttgtcatctggagcacaagccgaagaaaataaagatgaaaatcttttagaccaaattccaagatggattgatgcaaccccaacgattttcccggagcagtccaacgaaccaattgttccaccaaccgagcaaaccgaagatcagacttggtttgaccgtaaacaaaagaaaatccgtaattgggccgatcgtacatctggaaaaattgataattggtttggtgaagttgatccacaaaaacccgcgtcagccaccattcgggtcatgatcgataactattggaatgaatatgataattatgaaatcaagcccagaattcgcggtaagattaaattacctactctagagaagcgtttaagtgtggtatttggtgatgactctttagatgacgaatttaataatagcccagccaatatcaatcaaaacccaaatcaagatccaaataaaaagttagatggtaaacgaactcgagatgacaacagctcaatcgcattacgttggtcaaatttctcgaaaaaactaccttttgaaacagacgctgatttaggtatccgttctggcgatgatatttatgtccgtttaaaagcatcgagagactggcagctccgtaatgattttaaattttatgcagaacaaatttatcgttatggcatagatagtgaaaactacttacgtactaatcttgaactcactcatgctcgtccaaatcagccgatcttatcaaaccagttcagcttaacttatgccgatgatcaagacgatgatttgacatgggaaaaccgtcttttccgagaacatagcttctttgcaaataaccgttttaactatggtatttatacaggtggctactacaatgacaacgatttacgtttaaacagttggggaccatttgtatcatggcgtcagcctgttttacgtgaatggttctttgtacaaggcgacctcaattactttaatgaccatcgtgaagatcgcagccattatgtgagcacattcttacgattagaagcccttttctaa

SEQ ID NO: 46529 - DNA, 306 bp, Acinetobacter baumannii
atgaagaaggcctataaaaatatagttttaaagtttaaaaaacttaaaaagcgtgaatttaaagaaatgcctgactatctattagttattttcggtgcttcagcctttttgatttcgagttattggggattcgttgtaaccgaagtgactccagactttattagagctgtgaacaagcaagcacatatagatatattgggtatctcagtcggaactattttattagctttggccgcagaggtatggttttttggtgcaatagcttttcgctgtaataatcttctttatgaaagatggtttaagtaa

SEQ ID NO: 46530 - DNA, 1827 bp, Acinetobacter baumannii
atgcaaacagaactacttaaagttcttatttctgaagtaattaagcaatttactttaccaatatataatggcttaaaaaaaattactaaagacgcttataatagaattcaagtttcctttgatctatgtttttctgagtatcttgaaagaaattatgaaagatattcaaagactaaaacacttttatatagagaagtacctgttaatattaaagatttttatgtaagaaccgatttaataattaacaaaaaaattgtggatgaaaagaaatttattaatgaagtaaagaaaaataaaagattaattattttggggagcgcaggttgtggaaagtctactttctgtaaaagtatttttatagaattaatagaacaacctgtaggtatttttcctatttttattgagttaagacatcttaataattcttctgataaatccatatataactttatattgaactcaatgacggctataagttcatcatttaaaaaagaacaattagattatgctcttaagcttggtaaggttttagtaattttagatggttttgatgaagtaaatagtgaagatagagaaaatatagagaaggaaatattgtatttgtcgaataactatcacggtgtaaaaatattattatccagtcgttttgatagtagattttcttcatgggaggagttttatcaatatggtattcttgaattagataaaaataaggccttaactctagtgcataaattagattatgatagacaggttaagaattcatttttaagggagttggataagaaattatatgaatcccactctagttttgcttcaaatccattgttattaacaatgatgcttctaacctatgagcaaattgcagaaataccaaataaaatacatttattttatgagcaggcttttttaactttatttaataagcatgattcattaaaaagtatgtataaaagaaaatcattttctcaacttcctttagatgactttaaacgttgtttagaagcattttgtatattaagttatagcggtcgctcatattcatttagtgaaaatgaaataaataaatatcttgataattctataaatatttctagggttactacaaattctaaattttttttaaatgatttgctagattctgtatgtatattgcaaagagatggtttaggttttaattttactcataggtcttttcaggagtatttttctgcacaatttttagtaaatataatcagtgctaataaatatgatttgtttgaaaaagtatttaatattagttcacaagataatgttattagtatggtttatgatataaatccatctttattggagaaagaatggattattaagaaaatcaataaaattaacatggatatttctagtctttatagttatgaaaattatgagttattgatttttcaaaaagtatactcatctatttctgtatattataattatgatattgataaggaaatgattatctttgatgctggtggggttgaaaaatataactacttttttagttttatacgtgatctctataatgaaagttatctagagtattctttgaataaaaaagttactactaataaagatgcagagtattttgaaaaagaacttattgattatattagatgtaatggtgatatagacttggagaatttaaatagaattgatccttatgcatatcaattaataaagaagtctcagttattcgaaggtgttgttgaacaaattgattttttaaaatatcagtctggtcttttgaaaaataatcattctaaacaagatgtagatattatgtctttaattctaggtaaataa

SEQ ID NO: 46531 - DNA, 2277 bp, Acinetobacter baumannii
atgctcagtcgtcaattagaagtatcattacgtttggctgttagcatggctcgtcaaaagagacatgagtttcttacagttgaacatttactattagccttactcgataacgattcggctgtgaatgcattaaaagcatgcggagctgatattgtttctttacgtaaagaattagaagaatatgtagaacaacatactcctaagcttggcgaaaatagcgagcaagctccacatccaacagaaagtttcgaccgcattttgcaacgtgcaattttccacgttcaatcgagtggtggtgaccgtactgttgaaggtgcggatgttttagtcgcaatgtattcagagcgtgattcttttgctgtttatctgcttaaacgtcatcaaattaatcgattgactttaactcaatacttgtctcatgggacacgtaaagacgaagttcaggttgaagaagaagttgaagacattgagggtgaaagcaattcaggcaatgccggaccattagaactttatacgctcaatttaaatgttgaagcgcaaaaaggtaaaactgatccactcattggtcgtgagaaagaaattgagcgtacagcacaaattctttgccgtcgtcgtaaaaacaatccattgttggtaggcgacccgggtgtaggtaaaacttcaattgcagaaggccttgcttggctcattgtaaatggtaaagcaccaaaaccgctaagccatgcagaaatttacagccttgatattggtgcattggttgcgggtacaaaatatcgtggtgactttgaaaaacgtttaaaacaattgttaaacgctttgaagaaaaatccgaatgcgattttattcattgatgaaattcatatgatcattggtgcaggctcaagtatgggcagtacgatggatgcttcgaatctcatcaaaccagctttagcaaatggtactttacgctgcattggatcaacaacgttccaagaatatcgtcaggtatttgaaaaggatcatgcgttatctcgtcgtttccaaaaaattgacgtaaatgaaccgagcatttctgaaactattgatattttacgtggcttgaaaacgaagtttgaagatttccaccatgtacagtatgacgacaaagctttggtttctgcggttgagctttctgcgaaatttattaatgatcgtttcttgccagataaagcgattgatgtcattgatgaagcaggtgcacagcgccgtttaaaagcagaaagtgaagacagcttaattactgtagagaacatcgaagatatcgtttctaagattgcgcgtattcctcctaaaactgtatctaaagatgataaatctgtacttgaaaatcttgagcgtgacctaaaacgtgttgtatttggtcaagatgaagcaattactgcactagcttctgcaatcaagttgtcacgtgctggtttgaaatcaccggataaacctgttggtagctttgtgtttgctggtcctaccggtgtaggtaaaactgaggttacgaagcaattagcaaaacttttaggtgtagagcttgttcgtttcgatatgtctgagtatatggaacgtcatgctgtttctcgcttaattggtgctcctccaggctatgtaggttatgaccaaggtggcttactcacagatgcgattcataaaaatccacactgtgtattgttactggatgaaattgagaaagcacatcctgatgtgtttaacctgttattacaaatcatggatcatggtgcattaacagacaataatggtcgtaagtcagactttagaaatgtcattattgtgttgacgacgaacattggtgcagaaagtatttctcgtgcaagcattggatttacagagcaagaccatagttcggacaaccaagaagccatgaaacgtgcattctcacctgaattccgtaatcgtctagatggtgttattcagttcaaagccttaccaaccacagtgattgaatctgtagttgataagttcttgacagaattgcaagcgcagctagatgaaaaacgcgtagttctagatgtcgatcaaagtgcgcgcgactggttagcgacaaatggttatgatcgtttaatgggtgctcgcccaatgcaacgactcattcaagaacacttgaagaaaccattagctgaaatgattctgtttggtgaacttgcagatcatggcggtaatgtggcggtatcagtgaagaaagaagatggtaaagcagtgggtctaaaacttgaagtgtttgaagatcaccatacggcagaaccagcttaa

SEQ ID NO: 46532 - DNA, 1050 bp, Acinetobacter baumannii
gtgatttctgtcggaattgttggtggaactggttatacaggcgttgaactattacgtattttattacgacatccaaaagcgcaggttcgagttctgacttcacgtacaaaagcgggcaaaccagttgctgatatgttcccaaacttacgtgggcatacagatcttcaattttcagatttaaacattgatgcattaaaagagtgtgatgttgtattttttgcaactcctcatggtgttgcgatgcaacatgcgaaagatttgattgcagcaggcaccaaagttattgatttagctgctgactttcgtttacagaatcttgagcaatttgaaaagtggtatggtatggagcatgcttgcccagatgtactaaaagattctgtttatggtttaaccgagttaaatcgtgaaaaaattaagcaagctcaagtcattggtaatccaggttgttacccaacaactgttcaactgggcttggctccacttttaaaatcggcacaagcattgattgaaacaaagaatattattattgatgcaaaatccggtgtttctggtgctggtcgtaaagcaagtttgggcatgatttacagtgaaaatgcggataactttaaagcttatggtgttgcaggccatcgccaccatccagagattgtagaggctttggaaaatattgcagctaagaaagatgtttttgagggtcttttatttgttccgcacctagtaccgatgattcgcggtatgttaagtacaatttatgtagacttgacagaagcaggtaaacaaacagacttgcaagctttgtatgaaaacttctatgcaaatgaaaaatttgtagatgtcatgcctgcaaatagttcacctgaaactcgcagcgtgcgtggagcaaatgaattacgtattgctttgtataaaccacaaccaaataaactcattattttggcggctcaagataaccttgtaaaaggtgcatctggccaggctgtacaaaatatgaaccttatgtttggctttaatgaagatgaaggcttacaagggattggtttattaccataa

SEQ ID NO: 46533 - DNA, 1521 bp, Acinetobacter baumannii
atgcttgatcaatcaaaagaaataaaagtgtgcacttatctcggcctcaccactttaattttaagtgtagcccttgtcgggtgtggtggtggtagcagtagcggaggttcatctaacacgcctaaaccgtctgaacccactcctgaagtcatgacggatattacgcttaaaacccctgtcgaaatgcgcaatgttcaactcaaggtatatgataataccgacaatagtattttgattgatacccaagttgccagtttaacgagttacgatattaaacttccaagcacaaaactaaatcgtctttatcgtgttgaagtcacgacccaaggctcatcacaagtatttgatccaaccaaatctgaatatcaaaatatttctggtgtttatcacgcttttattaccccaagctcgataagcaataaaacacaattgatcagcccaagttcagaagcaatttatcaacgtgctgtgattcgttcaggtcagttgcctaatgagacaattatcccaacccgtattgaacaattacatgttgacttagcctctcaagatgtctacagatctcttcttaatgcgtttaaagataccaatattccaagtttaagtccggcaagtacgcttacaattttaaatttattgaaatactcaaccacaaagccaagtacttatgtggatagttatctaagctttggttatcttcaatattggtcaagcatccataatacgaattcaccttatcaagatctcacccaaagtctcgctacagatttaaaagatggatatttagacggcaaaaaacttattggggacaaaacatcttttacccctatcttcacctcagcccctgataatattgatccagcaaaaaatacacttttagatatcgcagctaatcaaaaggtaacacgtgattattttgctaccaatctaagagcagccacctttaaactagcagatttgcaagatcaatcccatctagacccaataggttatgatctactggacaagaaacaatattcggggattatacctgctggtaatacgtctgaatttttccgtatagatggtgcgggagattaccgacgtgctgttggctttagtggcattacagcgacctgcaatggatcagcttacccttgtaaacaaggtttaactagcatcaatatttctgacccaaaactaccagctacagactatttagttggtcactatgaagacagtacaacaggctgccaacttaatttccgtgctaatggtcaaattgaattaattaaaagctctcaaagctatcgctctgccttaagcgcagatagtacagataacttactgcaaaccgacgctgcaagttatagttatttacttaactcaagttcatccgaacctaacaattcaacacagcaatataattttatacagctaaatattaaagcgaacaagattgttagtgctcaagcaggccttgatagccgcaaagcaccagatgtcttacaaacaacacaattagagtgtagctttagctaa

SEQ ID NO: 46534 - DNA, 681 bp, Acinetobacter baumannii
atgtctgtggaaatgccagaaattaaaattgttcgtcacgtaagggcaagaaaattgcgcttacgtgttgagcctgcgtctatacgacttactgtgccgttattttgtagtaagaaacaaattcagcagtttttagctcagtctgaacaatggttaatcgagacgtggaataaacagcaccacgttcaatctacctcgtttgaaattccttcagaaatttctttttttaatagagaacagccttttcaaattgttgtgcagaagcaacatcgcatttttcaatttgattgggaaaatagttatttatttattaaagatcaacaaccctatcaagctttacaaaacgctgttattgcttatgcaaaacaagagttaccagtacttttgtcagagcttagccaaaaaactcggctgagttatgcagagtgtgcaatccggcgtcctaaaactcgttggggaagttgcagtagtcaacataatattatgctgcatgcaggtctggttcttatgcctgctcaaattacccgttatatttgcattcatgaattagcacacaccaaacacttcgaccatagtcctgcattttgggccgaagttgcaaagttcgaccctaactatatgcagcatcgcagacaattaaaaggtaatccattgcctgcatggtggtatgttacaacttag

SEQ ID NO: 46535 - DNA, 1542 bp, Acinetobacter baumannii
atgctgtctcgtgtggtacgacaaattttacaagcaacggtttatgatgttgcaattgaaacacctctcgaagcagctccacgaattagtcaaaaattaaacaacacaattcgttttaagcgtgaagatttacaaccggttttttcttttaaattacgcggtgcctataaccgtattagccaattaccgaaagaacaacttgaacgtggcgtcatttgcgcatctgcaggcaaccatgcgcaaggtgtagcgttgtctggtcaacgtttaggtattcctgcaattattgttatgccaagtactacccctgacattaaagttcaggcagtgaagcgtttgggtggccaagttgtattgcatggcgatagttttgatattgcaaacaaatacgctcagcaacgtgccgaagctgaaggattagtttttattccaccttatgacgacgagttggttattgcgggccaaggcacaattgcgaatgaaattttacgccaatggcgtgatgtagaatatgttttcgttgctgttggtggtggcggcctaattgctggcgtagcagcttacttgggtgatgttgcaccgcatgtcaaagtcatcggtgttgaatatgaagagtcagcttgtttaaaagcagcgctagaagcaaatgaacgtgtagtcctaccccacgtaggcttatttgctgatggtacagcagttgctcaaattggtgccttaccttttgatatcgttcgtctacgcaaatcagataattctggaccaattgttgaaccagatattgttactgtaaatacagatgagatctgtgctgcaattaaagatacttttgatgaaaaccgcagcatcgttgaaccatctggtgcaatggccctagctggtatcaaaaaatatgttgccgagcataaaattagcggcaaaaacatggtctcgattgtttgcggcgccaacatgaactttgaccgcttacgttacattgcagagcgcaccgaattgggtgaacaacgtgaagccatttatgcagttactctttctgaagaaaaaggcgcattcttaggcttctgccgtgctctacagggccgtaacattaccgagtttaactaccgtgcaaataacacagaagaagcacaagtttttgtgggtattagcttaaaaggtggtgacactgaacgtcatgaaattttagaacaacttaaacagcaaaattatgttgtagatgatttatctgatgatgaagttgctaaattacacattcgttatttgattggtggtcatgccaatctggatgacgaaagattgttccgtgttgagtttccggaacgtccgggtgccttactcaccttcttaactcgtttaggtccaacccacaatattacgctgttccattatcgtaaccacggcgctgccgaaggtcgtgtactagttggcttacaagcaacagatgctaaacaaaacccagatggtttaattgaaactcttgagcaaattagctatccatatgcagaaattactgacaatgtgggctataaacgtttcttgaagtaa

SEQ ID NO: 46536 - DNA, 9261 bp, Acinetobacter baumannii
atggtacaagtatcattaatggcaaataatgcttcaaaaaataatacagttgatattaatattggccaaacaaaaaatattgtagtagatccgaaggtaatcgcaaaaattgatattaatccagaaaaaattgcttcaataacaagagatggtaatagtgcggttatccatttaaaagatgggactgaaattgttttagagaacttttttattagtgaaaatccacaaattcttttaaatgaggggcagacttattgggctgctaatttagctgaagatgctacaggacagaccactgttaattatttagaattaaaagagataccaaaatatataaatgcttcatcttctgtacctatctggtcttgggtggttagtgctttagctggtgcaggaacagttgcattattatcccagcaagacgccaaagataaaacacctccggaaccaggtaaattgtctttccaaaatcttttagattcaggggagttaacacaagatcagatcacgaatgataacaagtttaatttaaaactcagcggacaggaaaagggaagtagcataacgtatttaatctctaccgatgaaggaaaaacttggcaggaaaccacgatagcccaaaaagatttaactgatggtgtttaccaatataaagctgtagtgacagacgctgctggcaatacctcggaaacggctgtacaaaaagtggttgtggatactaccgcgccatactcaggtgaactgactttatctgacttgaatgatacgggcatttcagtaacagatcagatcacgcaagataaaaacttcaatttaaagcttgaaggacaggaaactggtagccgagtaacatatttagtttccactgatgaaggaaaaacttggcaggaaaccacggtagtccaaaaagatttggctgaaggtatttatcaatataaagctgtagtgacagacgctgccggcaatacctcggaaacggctgtacaaaaagtggttgtggatactaccacaccacaagcaggtgaactgactctatctgacttgaatgatacaggcgtttcagccacagatcagattacgcaagataatagttttactttaaagctagttcaaccgattgtgattggggagcaagccgctttactagaccactatgaagtttcaaaagatgaaggaaaaacttggcaagagacaacagctgatcaaaaagatttagctgatggtatttaccaatataaagctatagtgacagacctcgcaggcaatatctcagaatctgctatacaaaaagttgttgtagataattccttaaatgttgaatcaaccacagtgattgtaaagccgattactgaagacaatacaataagtctagttgaaaaagatcaagttatttctataagacttgaaatagctaatttacccacagatttaaatagctcactgacatcagtaaatacgacattagacaatgttacttataactttcattttgatgaagtcacgcaagaatgggttaccgaaattccagcagagtttctttggtcagtagagccgcaaaccaatatatcaattgatattagtcttactgatcaagctggcaatacagccattatcacacatacccaaaattgtaatgtggatcctactccgaattcaccaaccctagattcattgactttcaacaatatagatggagctatcatttcaggtagtgcatataaaggaagtaaggtcgatatctacaataaaaatggtgattggcttgcaagtacaataactaatgaagaaggtaaatttactttacaagatctttcaattaactcaaatcaagaagtttacgcagtcgctacttataatggttatagcagtgaaaattcatcaattgggttagttactgaagttccagctattagtattacacgaattagtccagaaggcgtgattagtggttatgcgactgaaggtagtcattttattgtaaaagatcagaatggaaatattttacaagaatttaattctaatgtatttgatagctctggtattacaccatttagtgtaatggcattaggcgaagtaagaccatttattttgtccctcgatcagcctttagaggaaggggctcaaattattatctctacagataaagataatatttcaggccatccacaatatattactgcagactatactccagcagtatttttagaaactccacaatttgatattagtggtgaaactttatcagtacatgttaatgaacctaacagctttattcgtgcattttctggagaaggcaatttaattgctacaggttttaccgatgagcaaggctttgcaagtttacaggtgttccaatttttaaaagaaggcgaaacggttactgtacaagtagtagataaaaatcaaaatacgagtgaaaccctaatcgaggttccaaactttgcttatattccacatgttgaacgtattacacaagaaggcttaatttctggagttgctgaagataatagtacggtaattgtacgtgatgctgatggcaatgaattaggaaaggttacattaggtgatgaaaatagttggagtgactttagtcattttagcttgaatgtaaaccgccctttaattgatggagagaaaatttccgttcaaattattgataataaagggttaatgagtcctgaacaaaatatcatcgtagatctgactcctccatctgctccaacggagttaaatttcaatgatgctggtgatttagtttatggtcatgcagaacctttctctgaaattttagttaaagatgggcaaggaaatattcttaataaatggttttggaataactggaccgatgagagtggaagtttctcaatagaactaggtacatttttaaccaatgctgagacagtttatgtcacggctaccgatgtaaatggaaatgtaagtttagcagctcagatacaggcgcctaactatgcttttgccccccatgtagatagctttacttcggatggcgtgataagtgggcaagctgaaaataatagtactctcactgttaaagatgccaaaggtgacgttgtagctgaaattaaagttggtgaagataacagttggaatggatcaagttattttaaactccagcttgatcgtcctcttgtcgatggtgagcagtttttcttatcaattaaggatgcacgtgggcaagtaagtgctgatactgtaattaccgctgatacggttgctcctacaccagccagcaatttagttttctcagaagatggttcatatcttacgggtgtagcagaactgaatactacgattcaggtttttgatcataatggtcagctagtgaatatatggaataacatcattaactctgacggtacatttactatttacttaggtagtaacaatttacatggagaagcattcacagtcactgttaaagaccaagccggaaatgtgagtgaggctatttcaataaacgcgccacttgacgatattgcaccgaatccaattaaaaatattttacttgatgcaaatggccaaaactttacagcacaagcagaagcaaatagtcagatcgaagtttttgattcattgggtaatcagacaggttggggttctacagatagtgcaggtaatgcttctggttctttcaatcaaacttatttacacggtgaggaactcacttttgttgttatagatcgagcaggtaatcgcagtatcgaatttaagcaaaatgctttaattgataccattgcaccaaatccgattgaaaatatcatcttcaacgaaaatggccaaagttttacagctcaggcagaagccggaagttctattgatgtattagatcagactggaaataagattggttttggttacaccgatagctcaggtaatgtatctggttattttcaacaagtttacttacacggtgaggaacttacttttgtcgtgatcgatcgagcaggtaaccgcagtgcagaggtcaagcagagtgctttgaatgatgacgtcgcaccaaatccgattgaaaatattgtattagacctcaatggccagaactttacagctcaggcagaagcaaatagccaaattgaaatcaaaaataataacggtgacgtcgtaggttatggatcagcagatagtgcaggtaatgtttcaggatatttgtatcaagtgcatttacatggcgaagagctcacttttattgtagttgaccgagcgggtaaccgcagtacagaggttaagcagaatgccttgattgatgatattgcgccaaatccgattgaaaatattgtattagatatcaatggtcaaaactttacagcgcaagcagaagcaaatactcaaattgaagttaaaaatgctgttggtgagattgtaggttcaggttatgtggatggcgctggtaacgtgtcaggttatttatatcaagtctatttacatggagaagagctcacttttgttgtcgttgaccgagctggtaaccgcagtacagaggtcaagcagaatgctttgattgatgatatcgcaccaaatccgattgagaatattttacttgatgcaaacggacagaactttacagctcaggcagaagcaaacactcaaattgaagtcaaaaatgctgctagtgaagtcataggatctggttcaaccgatagtataggtaatgtttctggttacttctatcaggtctatttacatggtgaagaactcacttttgttgtagttgatcgagctggtaaccgcagtacagaggtcaagcagaatgccttgattgatgacattgcaccgaatgcgattgaaaacattatctttaatgaaaatggtcaaaactttacagcgcaagcagaagcaaatagcaaagttgaagttaaaaatgctgcgggtgaggttgtaggttctggttatgtggatagtgctggtaatgtgtcaggttacttgaatcaagtttatttaaaaggtgaggagctcacttttgttgtgattgatcaagctggtaatcgtagcattgaagtaaaacaaacagcctttcttgataatacagcaccggaaaatgcgactaatttagtatttagtgaagatggctcatatctaagtggtatggctgagccaaatgcgacgattcaaatatttgatcagtatggtcaattattaagtcagtggaataataatgttaattgggatggaacatttaacatctatttaaacagtaactacatgcatggagaagtatttaaagtagttgtagttgatcaggctggtaatttgagtggtgaggttactgtaaaagcaccgcttgatgatattgctcctgtagctgcaagtgatctggtctttaatgaagatggttcatccctttctggtgtagctgagccaaataccttcatccagatttttgatcaaaatggtcagcagatgaatacgtggagtcagagtgtaaatgctgatggtacatttactatttttttcggtacttacaatttacatggtgaagagtttacagtcattgttaaagaccttgctggaaatgtgagtgaagctgtttcagttaaggcgccgcttgatgatattgccccaaaaccgattaaaaatattgtatttgatgcaaatggccaaagctttacggcacaagcagaagcaaatagtcagattgaaatttttgactcatttggtagtcagataggttggggctctaccgatagcactggtagtgtgacgggttacttctatcaagtgtatttacatggagaagaattaacgttcgttgttatagaccgagtaggtaaccgtagtgatgaaatgaagttaaatgctttgatggataccattgcaccaaagccgattgaaaacatcatctttaatgaaaatgggcaaaattttacagcacaagcagaagccaatagttttattagtgtcaaaaatgctgcgggtgagcttgttggctatggttatgtcgatagtactggtaatgtgtccggtcacttcaatcaggtttacttaaaaggtgaggaactcacttttattgttatagataaagcaggtaatcaaagtattgaatataagcaaaatgctttaactgatgatattgcaccaaatccgattgaaaacatcgtcttaaataaaaatggacaaaactttacagcgcaagcggaagccgatagccaaatcgaagttaaaaatactgcggatgaggtcgtaggttctggttatgtagatagtattggtaatgtgtcaggttcttttaatcaagtctatttacatggagaagagcttacttttgttgtagttgaccgagcaggtaaccgcagtatagaggtcaagcagaatgctttgattgatgatatcgcacctaatcaaattgagaatattgtttttgatgtaaatggtcagtactttacggggcgtgctgaagcagatactcgaattgaagtactagatcaatttggcaaccgcgctggttggggatatgttgatagccaaggtaacgtgataggttatttcaatcaggtttatttacatggagaggaattaactttcatcgttgtagatatagctggtaaccgaagtgttgaagttaagcaaaatgctttaattgataatgtcgcaccgccagcagcagcaaatattacattaacctcagacggattgctttttggtgaggcggagccaaactcaactgttgaaattattgatcaatatggtgcagttatcacaacaacttatgtttggtacgatggcacatttaatcaatggattaatctgagtcaataccagacacaaaatttaagtattgttgtcaaagatcaagcaggtaaccgcagtgaagttgtacatgaattagtaccagtatttaccaactcaccaattgctgcaacagagctaaaactggatatagatggtcatattctgacaggtaaggcgacagtaggaatgtcggttgttgttacatctactgatggtcagaccattaacggagggtggaataatgctgtgaatgaagatggtagttttgctattcagttaaatgattactatctacagggacagacattacaagttcgagtttatgatcagaatacgaatcaatatagcctaatctctgaaattattgcgcctttagacaatattgctccagtaattaatgaagtggtaattaacaatgatggttatggtattactgggcaaactgattcaaaagcaatcattcaggtaatggatgcggatggagatttacgagcagaatttcaagcggatgagactggatattttaacgctagtatttatccacctatattacgtggagagcagttattcatcactgcgatagatttagctaaaaatataagtaagccatttaatattacttttaatgcagatactaatgcaccgccatcagcagagcatattgtggtatctgaaaatggtttttttattgagggaaccgctgtagcaattagtactgtgcatatttttgatgtgcatagtaaccatgttgccactaatgttgcagatgaagctggaaactttaatattcagttgtatccacctctagcgagtggacaaattttacgcattgttgtggaatacaatgggtatcaaagtgcttacaccgaaattacggcacctatagacactgtcgcaccaaatgcagcaactcagcttctcttagaagatggaaatgtactttcaggacaagcggaagcatattcaattgttaatatttttgatgctaataataatttggttggtcagactaatgttggaagtgatggtgctttcttaacacacctatggtatgagtattggcatggcgaaacattaacggtaaaagtagttgatgccaatcaaaatgtgagtgtggggacaacgattgttgctataaatgatacggtagttccagatgtagttacgcagcttgctatagatgaatggggttcgctcacagggagggtagaaagttatgctactgttgagcttacctatcattttactgaccaaccgctttctgtaacgagcactacagcattggcaaatggaatgttctttatctatctggatagaaatgcaacttcacttgaccttactgttattgatcgtgctggaaaccgtagtgaaaccattagccaaataattagtgatttaccgactgttattattgatcactttaaaggtgatgctacagataatacttataacattgatactatagatgattttgttcaagaatatattgttgagccgtatgcaatatataaagacgtctggattgataatagctatatgtattcagattgggtcattgaaggccattatgaacagatatggtttgttgatggatattatgaatcgcaatgggccacaagtggttattcaactgtacaaaatatttatcaaaatcaaaatggtataacttatattgataatggcacggcagatagcgattatagtcgatatgaacaacaatattatgatttcgtgaatggccaatggcaagaaggctatgaattaacttatatacgttcagaagaaggatgggttgatacaagtcattatgaagatgtttatattgatacaagtcattatgaagaggtttgggtagatactagccactatcaagatatttgggtagaaaatagttattgggagagtcaacttgttgaatctggccgtagagatgtggatttaggcgggcatgataaaattatcagttctgttaattatagtttggttggtttatatcaaacagtaaatgatccaacgactgtagattcgtttttggaaagtggtcgttatgtagaagacttggagctggttggttctgctcatctaaatgcaacaggcaatgctttagataatcttttaacaggtaactctggtaataacgttttgaatgggcgtgaaggtaacgatacctatatcactaatgaaggtactgataccattgtgttccaattgctaaatagccaagatgcaactggcgggaatggacatgacacggtgttagattttactttaggtgatataagaactaaccttcaagctgacaaaatcgatttaagtgaactattaattgactattctaaagatgtaagcgcattagctaaatttattactgtagagcaagatgctgggaacacgactattagtcttgaccgagatggcgaaggtacaatgtttaatagtgtgtcactgttaactctaaatcaagtaaatacaacattagacgaattactaaacaaccagcaaattattgtttaa

SEQ ID NO: 46537 - DNA, 195 bp, Acinetobacter baumannii
atgtcgcaagtcatgatcatggtttcggaagcgggcagaatggaaaatacttgcaatctacccgctgatctcgataagaacgggaatgttctaaaaatctatgactactcattaaaagagttgccgattaatttagatggcactgtgacttacaatggcaaaagatggacctttgataagaaacagaactattag

SEQ ID NO: 46538 - DNA, 741 bp, Acinetobacter baumannii
atgtctaatcttcttaatatttgtggaattgtaatcgcctctagccaatatccagatgccacattacaacaattctatcgacaatattatcattgcgaaattaaagctgagcaaataaaagccgagattcaaagtcctagtgatctttccatgtttttcccttaccaagatacatggtggcctgtctttacgattgatcagattagctctgaaagtttccaaaagtttatccataacggaattagacccggcattatattgccagacgaagtatttggttttccacactatttcttgttaaaagaagcagtaagccaaggtgctattcctattgtgctttttaaaactgaacaacctcaatattttgccgcaaaagcaactttttcgaccgctattggtttacgcccaatggctgcttttgtgagtacgggatgggatgaaaatttaatttctcaaccagcgggtagttatattatccagctaaattcagcaaatttaccattaccctcaagagaagtcagacaaggccaacatttattttactcggccaagggttttgacggtcatgtttcaggttatgaaattattattaatccccctgccgatttacccctatctaatattcgatatcctcaactcggcatttcttggaactttaataatattgattatgagagtactcctgaacatgtaagtacgaatcttataggttatatctctgtacacgataaaaatagataa

SEQ ID NO: 46539 - DNA, 1287 bp, Acinetobacter baumannii
atgacccaaaacttacatcatattgttattgtcggtggtggcgctggtggtttagaactcgccacgcaacttggtgaaacttttgggaaaaatggtaaagccaaaattacattggttgaccaaaatttaactcatatctggaaaccattacttcatgaaattgcggcgggttctttaaatcctcacgaagagcaaaccaattattttgcccatgcagagaaacaccactatgaatttgtgttgggaacattaacagcagtaaataaagataagaaaataattgatttaattccccctcaagtctctaaagaacaaaatacccatattcaacaactcagttacgatacactggttttagcgcttggttcagtatcaaatgatttcaatacacccggtgttcgtgaaaactgccatttcctcgatagccgtaaacaggcggatattttccagcaagatcttttacacttatatatcgaagcgcaaaatcaacccgatcaacgtacattaaatattggaattattggtgcgggggcaacaggtgtcgaacttgcggctgaactgattgaaacgaccaaaaacttttatcgctatggtttgaaaaagatccatccgaatcaagtcaaaattacactcattgaggcctcagaacgcatcctccctgccctaagtgaaaaaacagctgaacatagcgcaaaacagcttcaaaaaatgggtgttgaaattttaactaaacaccgtgttgaaaaaattgatgaacaccatatctattttagtaatggtaaccagctcaacagtgatattacggtatgggcagctggggtaaaagcaccaaaagtacttgaaagtcttagcgatttcgaacgtgacaatattaaccgcttaatggtctatgcaacgctgcagacctattccgatcctaatgtatttgcatttggtgattgtgcgcattgccaacttgatgcaagacacccgcctctcggaccacgcgctcaagttgctagtcaacaagcaagctttttagtcgatgctatggctgctagactaaatggtcgatcacaaccgatgtttacttttaacgacaaaggttcacttgtgtctttaagtcgtaataaagcggttggagaattactgggggatgtcagtgtccaaggatatattgccaaaacgatgtatgtatctttatatcgtttacatcaagcaacaattcacggatacactcaagctggactactcacaatgaaagatttacttacaagacgagtacgaccaaaaattaagctgtattga

SEQ ID NO: 46540 - DNA, 345 bp, Acinetobacter baumannii
gtgaaattcttcctatctctttttacgctgtttagtattttctgtactactcttaccaatgctgctctacttaatattgctcctgaaagtgttgaagccgctgcatggacaattgtagatacccaatctggtcaaattattgctgagcataatagtcatgtacaacgtgcgccagcctctttaaccaaaatgatggtggcctacattgcattaaaagagattaaggctggaaagttaaaactgaacgaagtcattactgcaacaccagtcgtaagcgtggtgcagtgggatgaatcacaaatgtacctcaaagcgggcgagcaaatttcagttgatcagctctaa

SEQ ID NO: 46541 - DNA, 1257 bp, Acinetobacter baumannii
atgggttatcagaagatcgtggttcctgccgacggtgataaaattacagtaaaagcagacctgtcactgaatgtaccaaatcatccaattattcctttcattgagggtgacggtattggtgtagatattacaccggcaatgaaaaaagttgttgatgcggcaattttaaaagcctatggcggcaaacgctctattgaatggatggaagtgtattgcggtgaaaaggccaataaaatttacggtacctatatgccggaagaaacctttgaagcgctgcgtgaatttgtagtttctattaaaggccctttaactacaccagtcggtggcggcattcgttcactcaacgttgcactacgccaagaactggatttgtatgtatgtgtacgtcctgtgcgttggttccaaggcgtcccttcacccgttcaacatcctgagttaactgacatggtaattttccgtgaaaactcggaagatatttatgcgggtattgaatggaaagcagattctgaagaagctaaaaaagtcattaaattccttcaagaagaaatgggggtcacaaaaattcgtttccctgaaggatgtggtattggtattaaacctgtttctaaagaaggaacacagcgcttagttcgtaaggctattcagtttgcaatagataatgacaaaccttcggtgactcttgttcataaaggcaacattatgaaatataccgaaggtgcctttaaagaatgggggtatgagttagcgctagatcgtttcggtggtgaattaatcgatggtggcccatgggttaaaattaagaaccctaaaaatggtaaagacatcattattaaagacgtgattgcagatgctttcttgcaacaaatcttgatgcgtcctgctgactactctgtaattgcaacccttaatttaaatggtgactatatttcagatgctttagcagcagaagtagggggaatcgggattgcgccaggtgcgaatattggtggagctattgcagtgtatgaagcaacgcatggcactgcacctaaatatgctgggcaagataaagtcaacccgggttcaattattctctctgctgaaatgatgctccgtgatatggggtggatagaagcagcggacctgattattaaaggtatttcaggagcgattgcagctaaaaccgtaacttacgattttgagcgtttaatgccgggagcgaccttgttacgttgctcagaatttggcgatgccataattcagcacatggaagattaa

SEQ ID NO: 46542 - DNA, 504 bp, Acinetobacter baumannii
atgacacagcgattagaactacatcaggtagagcagttaacagcttgtaagatatcactattacttggattaaatgccgagcagaattatattgagcaatttttccggtttagtcttcgcctgttgaagtgtcaaaaagctttgcttacttttaatcaggaaccttatttttggcatcattgcccagatggcatgactgcaatttcctttaaaccttcaagacacctaaaacaatgttttgctaaacaacaggtgattcatcacaatcatccttcttatcaaaatttaatcaactatttaaaagagctaaatattgaatgtgggcgtgccttagctgtccatttggtgcagcctgaccagacatctatgggatttgcagttttcttcgatgacgatgaaaattgttttgaagatgatcaaattcagttgcttctcgattactgttctagttttatgcggctttgttgcacaaacctatctgtaaagggtttttcagcgatataa

SEQ ID NO: 46543 - DNA, 3237 bp, Acinetobacter baumannii
atggataataagaaaagtaactttattgaggatagtcgtattcttgcattttggcgtgatttagaaatatttactataccttctgctccaacttcaaaagataataataaattcataaaaataataactttaagatttggtgagaaactaccttgggaaatgatggaatatcagccaacattaaaggatatgtatatccatacagtttatattggtgtagcagatcaagaagaattgactagacttgttttgcgtaagattgtaagcaaagagttgagtgataaagaacgtgaacgtatttcgggtactgggtggttagcgtcttttactgtaaacgaaaatggatgtttaagtgcagatagctatgcaccagccagttatgtatatggtacccaggctttaagtcacggagagccccttattgacttaaatgcaagacttactagagctaaggaggagtttgctcagcgttgtcatcgcttagttcaattgaaagaggattatcgatgttcatggaaggatttgcaaagtgaaacggatttaattagatctatttttgctcatgatgagcagattggattagattggcgagtcgtagttgctacaaagcgattacctagaaaaaaagcgttagaggatattgaacaagaggttaattatctgaactcattttatttagatgatttagataaaatgctgaaacaaagttcattaagtcaaccatttggccaagcgttatctacatatctcggggcttcaattattcatgataagcgaatagatattttaaaaaatcatgaaattatgggaaaacttgtctgtgcagccaatttacctattgcgcgttggcctaacgcaccagatagacctttagtgttggcacagcaggcggtagttgctcatatagaaaactcattgaaaaatcaagatggtattctcggtgtaaatggaccgccaggtactgggaagacaactttactgtgcgatgttattgcgacggttattactgacagggctaagcgaatttctgcactttctacacctgaagctatatttaaacagcctattcagcttatgggacgaagattttcacccattgttgaggagttggtgcgagatagctcaatagttgtcagtagcaacaataacaatgctgtaaaaaatatttcacaggagttgcctgctactagtaaattagacaagcggtatgaaacagattctttatatttctctgaagtcataagtggagtttttgatagtcaacgagttcaggatgaaaatcaaaaaacaattcctgcatggggtttaattgctgcggctttaggtaacagtacgaatcggagatcttttgctcgtgctttttttaaagaggatcatattgctgagaatgatgaggaggagagcaaaaattcatttatatcgatgaaacaaatacttgaggatgcaattcctcatattagtgcttattgtcggaaatggcacacagtcaaaagtgaattaattgaattaattgaagaattagagaaaaagcgttcagttttaataaaagcagagcaggcttcacttgttatttcagaatgtatggagaggaagaaagaattatcggaaacgattacgctcaaaaatgaagaattaaataagcatcaagatttatatcgtcaaatacagggagagttacaagaccaggctattttaatacaatctaaacagcaaatattagggcaaattcagatatcacatggacctcggttatgggatcgtctatgtgcattatttggttaccggactcaccgtacagaagtctatgataagcgaattagtgaagcaactttatcattacaagaaactaccgctcgctatgaaaagctcatcaatgataagacatcaagccataaaattataaaaatttgcgagcaggagttattgaaattaaatgatgagcttcttgtaataaggcaaaaatgcgacaagttgatttccgatttacaggcggtacacgctttaggggtaagacatgtcattgggcctgatttttggaaattatcgtttgaagaattgcataggacttcagtaaatacttcagaaattatcgatgatattcgtgcccgtatttttattaaatcgatacagctacacagactaacgattttatctaatgccaaaagatttttaagtaatttgagaatggtcgggcaaatgctttcaggaaataccaaaggtctttcccttcatgatcgtcctgtaatttgggacagcctgttttttgtggttcctgttgtttccacaactttagcttcatttagtcggctttttgcaggcatgggacaagatagtttagggtggttattaattgatgaggcaggccaggctacacctcaatctgcagcaggtgcaatctggcgtagtaaaagggctattttaattggtgaccctttgcaggttgaaccggtatttacactaccagatagtgtagttgagattctacgcaaacaaaatgatgtggatttatcttggtctcctgtcttcgaatctgtacaaacaattgctgacagaataacgccatttggttcatggattgatgatggtagtggagataatcaatcaagaatctggactggtatgcccttaagaacacatcgtcgttgtgatgaccctatgttttctattgcaaacagtattgcttatgggggtcaaatggttcaggggcgtgttgatcgcgaaggaaagcctacaccagcaaatatagcttatgatattggtgtgagtacatggatgcatgtagattcaatagattttgctcatcctgttaattctgaagaacttgatgtattgattgattctttaagaaagcttgaagaaaagcgaaaaactacaattaatagttcaaaaattaaaatatatgtcatttcaccttttagaaaagttattcaagcgtgtaaaagcagtattgaagaggcaggaataaaaggcattgaatgtggcactgtacatacttttcagggtaaagaggcggatatcgtatttttagtattaggtacagcgaaggatcgtaccggggaaggagctagagcttgggcttcctcaagtccaaatttattaaatgttgctgtgacacgagccaagagtcgtttgtatgtgatcggtaatgtggatacttggtctaaaatggactatttttcaacactcgttaatatacttccagtgaaaacggtaaatatatctaagacttatacttaa

SEQ ID NO: 46544 - DNA, 441 bp, Acinetobacter baumannii
atgaagttaaataagttgagtttggttgtttttatactttttatatttactgggtgtggtgaaatttattctcaaccttctgataaatatccatttgaagtgaaaatgaaagctttattaggggataaccttaaaattgtgaactcaatacgtaaagcagaagttcaaatttcttcttttagatttgaaaaagatcctaataaattgaaaaaagtaatcaaccaattagaagaagatgggtgggtgttaaaaggcaaaggacaaggagttgatacttattgtttagggagaaataatagaattaatgttgtgagccctactatgataggtgtttttgattaccaaggtgggaaactcaatataacagattataattctgacgctatatcttatagctataacaaatggggagatgatatgtgtgagcaatctgaggagtaa

SEQ ID NO: 46545 - DNA, 213 bp, Acinetobacter baumannii
atgattaaaattaattgtttaatgttgattacaggtcttagtcttttattatcaggatgcaaaaaagatgttgaaataaaacctcaatttaaaagttcgaatgaagctactccacatgattatagcagtgtccctgcagaacaatttaaagggaaattaagttttttaaagaataattggataaaatctttactaatcaaaagattattttga

SEQ ID NO: 46546 - DNA, 246 bp, Acinetobacter baumannii
atgattataatgagattaaaaaacaaactattaagtggaaaatgggattttgttgattcatacgataattattataatttttgtaaaactaataattattctatagatatattaaatcctattcatgatagaaattatacaagagagagtgatgaagttgattttaaaagcaaagattattggtattttgcattatacaatgataaattaggtgttaataattgtatggaatattatggtaagtaa

SEQ ID NO: 46547 - DNA, 258 bp, Acinetobacter baumannii
atgattgtgagaaaattcatattttctttattcatttttagtctctattgctccctaatagcatgtagtactaacccaactagcttacaagagctttctaaggagttgttcagtgaatatctatatgaagttgatactgatagaaataaaagctctactcaattaattgtgataaaaataaataaagaaaatttttcgattaatgattataatgagattaaaaaacaaactattaagtggaaaatgggattttgttga

SEQ ID NO: 46548 - DNA, 492 bp, Acinetobacter baumannii
atgcaaacatggaataaagccttttttaaatttatgactattattttaatgggtacttgctgtattgcatgcgatcttagaaaaaaaaatgaagtaacagttgttgaaaataagaatataataattaaaaaatttgaaagtgatgctgaatatatttttggtaatcaaattttaggtaaaaaaatattttcttcctataatgcagaacgattaatatttcaagtgaaagatctagagcaaaatagtgataattttatagataaaatagatggtaggctgaataagaggggttggaactataaagaaaaatacaaagaagcttacatttattgtgatagagatatgaatcaacttgagttagttcctcctataaagataggtacagttatgcaatcaggagaaggacagtcattgaatcagttagtagattattggaatataggttttatccattctagacataaacgttatgtatgtaatatgaatagttga

SEQ ID NO: 46549 - DNA, 906 bp, Acinetobacter baumannii
atgaaaaaacagataccaattaaaataactgcttttattattttaattatatgtagtgtggtgggttatgcggggttgttcaaaaatcatgggcaacctcccattattgagggtatcttctggcaacctgacaatgatactactcctcctaaaggaaactggcattacttaggaataaatacttttgttccccaatggtcagtcgttgaatctaaatcttggtggaaaaactccaatcttcctcaatgggaaaaagccgttgatttacaaaaaattaaacagcaaccttgggctaaaaatcttatattggggctagcaggtgaatataatgaacacgaagcgcgtgctaatgtcattgctttgggagaaaaatctgcacaaattattcaagaacaaaatgatgcttctttaaaaggctattattttccagtagaagccgacccaacatggctaagagtaagtaccttaggacatgttttggaaaaattaccctcacctatttgggtcagtgtttatagtggtgaaagtgaacccgaaaactacgatttatgggttaaaagctggcttcctcaacaagcaggcgtttttttccaagatggtgtaggtgtcggagtaagaactcccgaacaagctagacgcattttagatcaacttgagcagacacttggaaaagataaaacggttattgttttagaagcatttcgaaccaagaaaaatggtcaatttcgtgcagcctatccttgggaaattatttctcaaattaaggcgtatgaagggaaaaaaatttatatttttgatggcccccactatatgggccgatggtccgtttatattgtcggtctatggtatcgactcgtttatggcagcacacccgccaccataaacgaacccaaaaactcaaaataa

SEQ ID NO: 46550 - DNA, 1251 bp, Acinetobacter baumannii
atggctccaattgatatcctgtttttatttggctttttaggtatttggattccacaagcattttgggcatggttaagctatcaagcgtggaagtattccaaaacggctgaaaaagagctgcaaaacttaccaataccagaaagatggccagtcttaagtgttttgatccctgcttataatgaaggcgttgtgattgaggacactttgcatgccattgctcaacaggattatccggcagagtcttatgaagtcttactgatcaatgatggctccaaagacaacacccttgaaatcgcagaaaacctcgcaaaaatttatccttgcataaaaattgtcaatgtacccaaaggtatgggtggtaaaggtaaatcaagaacgcttaataatggccttccccatgccaaaggtgagttaattgttgtttacgacgccgatagtacccctgaacccgattgcgtccgattacttgcccaaaccttgttagccgataaaaagctagtcgcggtaaatggcaaagtcagaacccgtaactggcaggatagtattttgactcgttttattgcgattgaattcatctttttccaatggatctttcaaggtggacgctggcaacgttttgaactatcaacattaatgggaacaaattatgtcatctggcgcgatgctctagagactttgggcggttttgatgaaaaatcactagtcgatgatacagaaatgagtttccgaatttttatcggacaaaaacgaattaaatgggttccctatgcaattggttggcaacaggaccctccttcgttaagcgtattcgttaaacagcgctcacgctggactcaaggtaatttttatgtgacacgcaaatatttacccgtagcactaagaaccccattcccaatcggaattgaaattctaaataacattatgtgctatatcctttttgtaccggctttattctggagtcatattaccttaacgcttggcttacttgatattgcaggtatttcagttcctggtccatttacactactgtggggactctcattttgtctctatgtagcacaaatgtggtttacgctttctttagaaaaagttaaaccagaactctatttttattctgtcttatcttacgtaagttactcacaaatcttcttatttattgtgtttaaagccgcattcgacatgctaaaaaataaaatacagggcaactcccttcaatggtacaaaacggaacgtagcaaggagaaaaaataa

SEQ ID NO: 46551 - DNA, 708 bp, Acinetobacter baumannii
gtgaaatttgtcgtgtacagagaaaaatttagtaaaacgccaagtatcgaagcgattttagataaataccgtcaagcagtaaccacaatttctggacgtgttgttggaacttctactgccgttgtgagccgtacacaagtcgaaagtggtgaaagcccactaggtgatatgattgctgatgcacagcaagctgccgctcttcaagcaagtaatcaaggttcggattttacgttaatgaacccgggcggtgtacgtgctgacctactgattaacagcaataaccagattacgtttggtgatatttttgcagttcaacctttcggtaactcgattgtgactttgagcttaaccggtaaacagattagagatgtgcttgaacagcaatggtctggtgcaaatgcaaattcgcctagaattttacagccgtctaaagagttgagttaccaatatgcggcaaatacttctgtttcaccgcgagcaaataacatcatggttgctggttcaccattagttgacactaaagtataccgtgtgacggtaaatagtttcttggcagatggtggtgacaactttacggtattaaaagaaggccaaaaccgtgtcggtggtggtcaagatattgatgcgcttgaaaactatgttgcacaaaactctaaagattcaccgttaattattccggctacgactcgtattaaagtcattaaataa

SEQ ID NO: 46552 - DNA, 402 bp, Acinetobacter baumannii
atgacgacaatatcaaaatcattattaaatggattaccgataaaaaaatcgagggtacaagtttttgagattttaaatcagaacccacaaggcttaagcgcggtaagtatctatgcgcaaattaaaaatgaacataaaattaccttaggtaccatttatcgaattttatctgagtttgaaaaccgtaaaatcatcaaaagggtgtttttaggaaaaagcaaaagtatttataagcttagaaaagacaagatgagctgtaacctcatttcgctcaaaacctctgaagccttgaactttgaaaatgagaaagttaaagaattacttcatgaggttacggatattatttttgcaaacaccggagtcgacattagtagtgttgaactcaatctttatactgaataa

SEQ ID NO: 46553 - DNA, 771 bp, Acinetobacter baumannii
atgcgctctaccatcgtggtcacaggtgctgcaagagggataggagcagctatcgccaagcaactattagatcagggctatcatgttattggtattgactgtcaaaaaaatcctgaacaatgggatatcagtaaaataatgacgtcagatcaattttcacaatggcaaggcatctcacaagacattacccatcaacaagaaacacaaactttaatttcagagcttttagaaagatacgaaattacggggttagtaaatgcagcaggagtattaattatgcgctccatgcttgaagcaaaaacggaagattgggaaacactttttgcggtcaatgtcatggcgcctatcgcgatcagtcaacaagttgctaaacatttttgtgcaaaaaagcagggcagtattgtcactattagttcaaatagtgcgcgtatgccgcgtatgcaacttggtatgtatgccaccactaaggccgcactgagtcatttttgtcgcaatctagcacttgaaatcgcaccttatcaagtcaggctgaatatcgtttcacctggatctactctcactcaaatgcagcaacaactctggacagataatgcacctccacctgcagtaattgatggtgatttaagccagtaccgaacaggaattccattaagaaaactcgcgcaaccagatgatattgctaataccgtgagctttttactttcggaccgagcggcccaaattactatgcaagaaatagtggtagatggaggagctacacttggggtttaa

SEQ ID NO: 46554 - DNA, 693 bp, Acinetobacter baumannii
atgtataaaacattgaccacttgcctactagtaacttgtcttggcttaagtggatgtgcaacttctattttatcgactgcccttccgaatgagacgactgaggtccaaacaactattttaaagacagatcaaattattgtactggggcaagccattaaaaaccagcaagaacaaggcgtcgtatttataggacaagactttaattatttaatgacggaaggaagttcggaatttttaaatatcattaaaaatattcctgtaaatcaaagaactttaattattccatctcctctgctacttgaaatggatgaccctacgcattttcatggtgaactcaagtttcaatacaatattcccgcttcaaaactttctgatcaacagaaagaaaatttaaaaaatttagggtttaaaaatcattttatggttatggagaaccaaacacagcttttatatccctacgctattattcgttttaaaggccaaatttatcaaaccagtcctactttaaaagttcaacaaacgattccaactccatatccaatcgccttacaacaaaaagatgaaataaccaagaaacatccgtttaaacgtgtaacgcgtatggcgctttatcctttagcgatggcatttgatatagtgacggtagctccttctctcatcttgtcagatttacgaggtgactttactaaataa

SEQ ID NO: 46555 - DNA, 1662 bp, Acinetobacter baumannii
gtggcccaatatatttatacgatgaaccgagtgtctaagatggttccgccaaagcgcgaaatcttaaaagacatctctttatcatttttcccgggtgccaaaattggtgttctcggtttgaacggtgcgggtaagtctaccttgcttcgtattatggctggcgtagataaagatttctctggtgaagctcgtgcacaacctggaattaaaatcggctatttagagcaagaaccgccacttgatccgactaaagacgttcgtggtaacgttgaagatggtgtgcgtgaagctttagatgctttagagcgtcttgatcaggtatttgcagaatatgcagacccagatgctgattttgatgcgcttgcaaaagagcaggaaaaattagaatcaattatccatgcttgggatgcacataacctaaacaaccagcttgaaatcgcggcagatgccttgaaccttccagcttgggatgcagatgtaactaagctttctggtggtgaacgccgtcgtgtagcactttgccgtttattgctctctaaaccagatatgttgcttcttgacgaaccaacgaaccatttggatgccgagtctgtatcttggttagagcgtttcttaaaagatttccctggcacaatcgtggcgattacgcacgaccgttatttcttagataatgttgccgagtggatcttggagcttgaccgtggacacggtattccttatcaaggtaactatacttcttggttggagcaaaaaaatgctcgtttagaacaagagcagaaacaagaagaatcttttgctaaagcattgaaaaaagaacttgaatgggttcgtcaaaatgcgaaaggtcagcaaaagaaaaacaaagcgcgtatggagcgttttgaagagcttaactcacgcgaattccaacagcgtaatgagacctctgaaatctatattccacctggtccacgtttaggtaacaaagttgttgaagtagaaaatatcagcaagtcatttggtgatcgtttactttacgaaaacttgtcatttaccgtaccaccagcagcgattgtaggtattgttggtcctaacggtgccggtaaaacgactttattccgtatgatgacaggtgagcaaaaacctgacactggtactgtaacacttggtgattcggttaaagttgcttatgttggtcagattcgtgacactttagatgataacaaaacggtttgggaagaagtttctggcggtttagacatcttgaaagtgggcgattatgaaattgcatcacgtgcttatattggtcgttttaactttaaaggccaagatcagcaaaaacgcgtaggtgaattgtcaggtggtgagcgtaaccgtttacaacttgcgaaaattttacagcaaggtgcaaacgttatcttactggatgagccatcaaacgacttggacgtagaaactttacgtgcacttgaagatgcaattttggtattcccgggtacagtaatggttgtatcgcatgaccgttggttccttgaccgtattgcgactcatatcttgtcatttgaagatgaacaaccagagttctatacaggtaactataccgagtttgaagcttatcgccgtgctaagctaggtgatgacgctcagcctcatcgcaagaaatacaaaaaaattagcggttaa

SEQ ID NO: 46556 - DNA, 1278 bp, Acinetobacter baumannii
atgacttataaagatgaaaccttagccattcacgcaggctacactcctgaagcaactactaaagctgttgcagtccctatctatcaaacaacttcgtatgcatttgataacacacaacacggtgctgaccttttcgatttaaaagttcaaggcaatatctatacccgtattatgaatccaaccacagccgtacttgagcagcgccttgctgcgttagaaggcggtattggtgctttagccttggcttctggaatggcagcgattacctatgctgtccaaacgattacagaagctggagataatattgcctcagtctcaactttatatggtggaacgtacaacttatttgctcataccctgccaaaacaaggcattgaagttcgcttttttgattatcaaaagcctgaaagcttacgtaacttaattgatgataaaactaaacttgtttttgttgagtcaatcggcaatccgctcggaaatatcatcgatctagaagaaatttcgaaaatcgcccatgaatatggcgtacctgtcgttgttgataatacagtcgctacccctgctttattaaaaccattccaatatggcgccgatatcgtcatacattctttgactaaatatattggtggacatggcaatagtattggtggtgcgattatcgatagcggtaagtttccttggggtaaatatccggagcgttttaaagtattgaacacgccagacccaagctatcatggtgtgaactatgtagaggcattaggtgaagctgcctatatagcaagggctcgcgttgtaccattacgtaatacaggcgcagctattagcccgctcagtgttttcttaattttacagggtctagaaacgcttaatttacggatggaacgccatactgaaaatgcacaaagaattgcggaatatttgcaaaatcatccgaaagtaaaatgggtcaattacgcaggcttaaaagatcatccacaacatcaacttgcgcaaaaatatgtaaaaggtaaaccttctgcaattttatcttttggggttcaagatggccgtgaaggcggtactcgcttcattgatgcccttcagctatttacccgtcttgtgaatattggtgatgcgaaaagtctggcgtgtcaccctgcaaccacaactcaccgccaactcaacgaacaagaactaaaagctgctggtgtaagtgaagatatggtacgtctttcaattggtatcgagcatgttgatgacctcattgccgatttagaacaagcactttcatccgtataa

SEQ ID NO: 46557 - DNA, 1935 bp, Acinetobacter baumannii
ttggctggttttagtcatgaagactatccggacgttgaaagtcaattagacgcaatccagcatattctgattgatgactgggcacaaaacattcctcttactacagaattaaaagcaacttttgcaaaaacagcagtattaaaaagtactgttgcatctgaagagaagaaagaagtgggcaaaaagttccgcgattactttgaattctcggaaggcctaaacaaattaccatcacatcgtttattggcgatgttacgtggccgccaagaaaacgtacttggtttaaaagttgatggcgaagatgatgcaccattggctcgtattgaaactgaatacaaccttgatcaggttcagccacaaacacgtcaagatttcttaaaacaaactgcaaaattattttggttaggtaaagttcgtcctcaaatcgagcattcattacttacagaaaaacgtcttgctgctgaagcagaagcaatgcaggtgtttgctgaaaatcttcgtcacttattgttatcagcgccagctggtagccgtacgactttgggtgttgaccctggtattcgtactggtgtgaaactagccgtagtaagcgaagctggtgatgtacttgcacatagcacgatttatccatttgcgcctaaagaagataaagaaggttcaattgctgaacttgcacgtctatgccgtgaatacaatgtcgagcttattgctattggcaatggtactgcaagccgtgaaacagaagctgttgtagctgaaatgatggctgcaaatacagatcttaaattaactcgtgtaactgtaagcgaagcaggtgcctctgtttactctgcaagtgaacttgctgcggcggaacttccagagcttgatgtttcaatccgtggggcagtttctattgcgcgccgtttacaagacccgttggctgagcttgttaaaattgatccgaagtcgattggcgtaggtcaatatcaacacgatgtgaaccaaactggtttagcaaaaacgcttgatgcggttgtagaagactgtgtgaatgctgtcggggtagatgtaaatactgcttcaccagcaatcttggcttatattgcaggtttaaacaaagcaattgcacagcaaattgttgaataccgtaaagagcatggccgttttgacacacgtcaggcacttaaaaatgtaccgcgtcttggcgaacgtacttttgaacaggcagctggtttcttgcgtatccaaaatggttcagagccattagatgcatctgctgttcaccctgaaagttatggtcttgttgagaaaattgttgcagcaaaagcgacaacggtaaaagacattattggtaataccgaaattattcgtcaggtaaaagcagaagagtttgttgatgacaaattcggtttgccaaccattcaagacgttttagcagaacttgaaaaaccgggccgtgaccctcgtccagaattccgcacagctaaattccgtgaagacattactgaagttgctcagttgactgaaggtatgcagcttgaaggtgttgtgacgaacgtgacgaattttggtgcttttgttgatattggtgtgcatcaagatggtttggttcatatctctgaattagccaatgagttcgtttctgacccgcataaagtggtaaaaccaggtcagatcgtacaagtgcgtgttatgcaggttgatgttgaacgtaaccgtgtgaacttgagtatgcgtgcagaaggtgcggcacctgtgaaagcacagcgaccaccacgtcgtgaacaaaataacgaacagcgttctgagcgtaaaccacaaggtaaacgtccacaaccgcgtaaagatcaagttgaacgtccgcagcgtagtaagcaagaaaaaccacaagagcaaaaaattggtggttttggtgcattattattgcaagcaggaattaagggttctaaataa

SEQ ID NO: 46558 - DNA, 2715 bp, Acinetobacter baumannii
atgaaaaaaaaatacaatgttcgatctcaggcaacccccaagattggcaaaacaattcttaaattaagcacccttagtttaagcatgatgtgtcttaccatggcacaagcagcagaaactgaacaatcaagtaccgatgaaaaaccaacaaaagtcgtaaaagttgccgttacaggttcttcaattaaaggggttgcggcacaaagtgcttcccccattactgtggtgaaagttgatgaaattttaaaacaaggggtgacaacaaccgaagaagccttagcaaaaatcagtgcaaatcaatcaagttttgttactgcgcaaaatgtaggcgctagcggaactgtaggttcagcagcagatctccgaggaattggtgccaataaaaccttaatcttacttaatggtcgtcgtttagctgctaatgcttatgatagtggtgtcactaatttaaatattattccactcgccatgttagatcgcattgaggtcttacgagatggagcatcagcaatttatggtacagatgcgattggtggtgtaatcaacttcattactaaaaaacaatttactggtttaaacatcagtggaggtttgacacaaccagagcaaaatgggggggatacacaagatgtaagtgtatttggtggttatggtgatcttgatgaaaatggcttcaatatctttggtgtcgttgattatcgacatggcaacgatgttatggctaaagatcgtaaagttagtaaacgcggaggattattaccagagttaggtattacaaaaggtagcagtggtagttttcctgctaacttttatgacacaaaaactggaaccgaaggaaacccatatgcagcaactggatgcgggaataacccgctcgtgtacgctcaaggtggattctgccgttataacagtcaagcagtgattggaattgttccaaaaactgaagatatctcagcattggggcgtgctacttttaagctaaatgacaatataaatgctgtagcagaatatgtttacgcacgtaatgaaattactacttctgtcgctccggacgttttcttcgatttaacattgaatccagatagtaaatattatccaggtaatggaattacacctgctatgaataaagtcagtggcccacttgaactttatattcgttctcaagctggtaatcgtgttagttctagtattaatgagtcacatcgaatattcggtggtttagaaggcgaagcttatggttgggatatcaataccggtattacttatgctcatagcgaagcagaagaccggctaaacagtggatatcttaactacaaaaaaactcaagaagctttaaataatgggattttaaacccttttggtccacaagcaccagaagatgcgggtttatgggatacactgggcgtaactggtacttatttaaaagcagatgttgattcaactactgttgatttcactgctagtcgacctatatttacattaccagcaggtgacgttggttttgcaataggagctagctatcgccatgatgaatggacctcaaacgtggtgtctgaagtggctagtcaagcaccaagtacaggggttgatcctgatgaacctacaaataaaggaaaaagagatattaaagcagtctttactgaactgcatattccattacataaaacattagaagctcaacttgcagcccgttacgatgattatagtgatttcggagatacgtttaatcctaaattcgcacttcgctgggaaccaattaaacaattaatgtttcgtacctcttatagcacaggatttagagcaccaactttatgggaagtaaatgctcctaactctataacaaatacttcagcctaccataatgaccctgtactttgtccgaatggtcctcctaaaaaaccaggagatactcttccacctggcggtgttgctagtcgtgattgcgaaacccaatttgaccgcaaaaatggagggaataaagatctcgatcctgaggaatcaaaatcatttactgccggtctagttttagaaccaattaaaaatttagttctaactttagactactttaatattgaagttgaaaatcaaattgcggcattacctgaaggtgatatttttaacaatccaacaaaatatgccgacaagttcgtacgcaacccagatggaacgcttaaccatatcattactactcaagacaatatgggtgatttaaaaacttctggtgtcgatgtaagtctaaattatataaccccaatgacagcaacaggtcgatttggttttggaattgatggaacttatgtcattaaatataaatatcaaaatgaaaaagatggagaatggattagtagtttaggcacatatgttggagatgctccaattattcgttggaaacatactgctaatttatactggaattatcaaaactggggtgtaaatttccaacaacaattcactcgtggttatgatgaccaaaactcgagctccactgtcaaggtagggtatcaagaccataaagtgagtgactatacaatttataatatttcaggcacatacaaaggctttaaaaatctagaagttacagcaggtattaagaatatctttgatgaagaccctcctgcttcaaatgttggtgacaacttccaaatgggatatgacccacgttacgcagatcctttaggacgtacttactttgtacgaggtacatataagttctaa

SEQ ID NO: 46559 - DNA, 357 bp, Acinetobacter baumannii
ttgccgttacaagagctagttccagctgaaacagatacacttaaacgtttagaaaagtttgtagataatctcgctgctcgttatccagcattagaaaaccctcttgcttatgacattgcacagcaattaggtgaggagctaaagtatcaatctccaaaaggacctaaaaacttttggatatcgattcaagaaagcggagcagtttctgtacagcaatattcactacaccacacaccagttaatgttgtgcaattgcgtgaacgctttaatcaattgtgggattttcttcataaagatgaggtgcttgaacttgggaaggttttaaaacgctttcctttcgaacctgtgaatcgataa

SEQ ID NO: 46560 - DNA, 708 bp, Acinetobacter baumannii
atgacaacaacagcttatgatactcatttcatggcttccgacatagcctttacagtaaatcgtacagaagttactctaaatattccttttaggaaagtgaaacgtttgggcgatattgtatttggtatggctggatgtttattttgtatgagagattttagcgaggcccttattgattttatcttacaaaataaaacacaatttgagcttccgagatctatacttgaaaaaacaaatagtgattttattgcactaatctatttaagtggttcttgccttaaagtttctaaaatggtaaatgacactgagtttacaatagaaaacattactaatgttcctactgtaattggatcggggagttttcatactcagcatattattcatgattgtcctaatgcgatagctgttgtcctagaagctattaaatacgatcaatatactgcaggggaagtaaaatattgcagtattaaacgagaagaagttcataatttggaagcgcctatcatgtctacaactcttaataatcaaatacaaatgttgcaaacagagattgctgaaacaaatcatcttgttggaaatggcaacacatatcacgctaacactgaaacatatcaccatggtgaacctgtcaaaatttctactgaattaggtttacaaatgtttcaacatagtttaacgaacgtccgaaataaattaacttctaattaa

SEQ ID NO: 46561 - DNA, 1308 bp, Acinetobacter baumannii
atgaagcaaaagaaattgctcaagtatattgtagttgctattttactaggagtattgacgggttggatctgtcatcacttctttaatgaaagcgagcaactgaagcaaatcgcttcttatttcaacatcgtcacagatatctttttacgtctcatcaaaatgattattgccccattggtatttgctacaattgtgtgtggcattgtgtcaatgggcaaatcaacttcaattggtagcattacacttaagtcaatgacttggtttattaccgcttcgtttgtctcacttgccatcggtatgggtttagcaaactttttccaacctggcgcggcgctagacctagcattaccaacagctcaacaacttagtagttcttctctcccaacaactactggttttaccttgcaatcattcttgagtcacgtgttcccacgcagcattgcagaagcaatggcgaacaatgatattttacaagtccttgttttctctattttctttggttcagctcttgcttttgtaaatcagggcaaagaaaaagactcagttatcattcgcttaactgatgaactcagtaaaatcatgttccgcattactgactacgtaatgatgttcgcaccttttgcagtatttgctgcaatcgcttcagcaattacagtacaaggcttaggcttaattgttgattatggcattttaatcgcagaattctacttcggtctgctattactttggatcattttgttctctgttggcgcaatcgtacttaaaaaagatatcttccgtttaggtaaattgattcgtgaacctgtaacacttgcctttgctacagcttcaagtgaatcagcctatcctaaagttatggatgctttaaataagttcggcgtgcctaaaaaagtaactagcttcgttttacctttgggttattcatttaaccttgatggttcgatgatgtacaccacctttgcggtactctttatcgcccaagcttacaatattgatctgagcttcactcaacaaatcttgattttgttaacgcttatggtgacaagtaaaggtattgcgggtgtttcaagagcttctattgtggttatctcggcaacactcacaatgttccatttgcctgaagccggcattctattattgcttggtattgatcagttccttgatatgggccgtactgcaacaaacgtagtaggtaatagtattgcgactgcagttgttgccaaacttgaaggcgataaattagctgatactgaagaattaccagagcctgtattaattaaatcaactcaagaacaaacaatcgcttaa

SEQ ID NO: 46562 - DNA, 708 bp, Acinetobacter baumannii
atggatgaccgaatattggacctaatttatattacccgattaaaagaaaacacatggtttagtgtgcttccggaagcattccaaaattttattttagaacatggcaagcaaatcacctttgagaaaaatagctacgttttccacgctcaagatgagtttgatggtatttataccgtccttgaaggctcaattagcttaggttatgtcgatgtaaatggtaatgaagcactttctgcaattgctgagccgattatgtggttcggtgaaatatctttaattgatcatgagccacggtcacacgacgcgattgctttgaaaaaaagtatagttctgcatattcctgcaaaaccattaaatgtgctactaaaagaacatccatattattggtattattttgcacgtttaactagccaaaaactcaggtacgttttcttagaacagattgcgatacaaacacgcagtatttctcaaaggcttgcacaacgtcttctgttcattttagaaggatacggtaaccatattcttattcaagatcatcacattcagatttctcaagaccaattagccaacatgctaactacatctaggcagacgatcaaccatgaattgagcctacttgaaaaacaaaatattattaaaattgcttttagaaaaattgagattttagatattgaaaaattaaaagtaattgctcaagttcattcataa

SEQ ID NO: 46563 - DNA, 1092 bp, Acinetobacter baumannii
atgggttttaattgcggtattgttggtctgccaaatgtagggaaatctacccttttcaatgcattaactaaagcagcgattgcagcggaaaacttcccgttctgtaccattgagccaaacacaggtattgttcctgttccagatccacgtttagataaacttgctgcgattgttaaccctcagcgtgttttaccaaccactatggaatttgtggatattgcaggtcttgttgctggtgcatcaaaaggtgaaggtttgggtaaccagttccttgctaacattcgtgaaactgatgcaatcgctcatgtggtgcgttgtttcgaagacgaaaacgtcatccacgtaaatggtaaaattgatccattagatgacattgcaactatcaatactgaacttgcacttgcagaccttgagactgttgctaaagcaattttacgtttaactaaagttgctaaaggcggtgacaaagaagctgtagcgactaaagcagttttagaaaaaatccaaccattacttgacgaaggtaaaccagctcgcgcggctgatttgtctgatgacgaacgcaaattaatccgtggttttggtttaatgactttgaaaccaaccatgtacattgcaaacgttgcagaagacggttttgaaaacaacccacatttagaagctgttaaaaaacttgctgccgaagaaaacgcaattgttgtgccgctttgcaaccaaatcgaagctgaaatttcattattagaagatgaagatcgtgctgagttcctagaagcaatgggcatggaagaaccgggcttaaacgtagttattcgtgcaggctataaacttttaggtttacaaacttatttcactgctggtgtacaagaagttcgtgcatggacagtaaaagttggtgcaacggctcctcaagcagctggtgttatccatactgatttcgaaaaaggctttatccgtgctgaagttgttgcatatgatgacttcgtacaatacaacggtgaaaacggcgctaaagaagcaggtaaatggcgtttagaaggtaaaacttacgttgttcaagacggcgatgtaatgcacttccgttttaacgtttaa

SEQ ID NO: 46564 - DNA, 834 bp, Acinetobacter baumannii
atggcgattcagttcaaacagcataagccttggttactcggaattacgattttaatcgtagttctgggccttgtcggttaccgttatattaaaaataaacaagccgatgatgttttaacgattggcattagcccgccttatgctgagctattacaaagcgttgccaatgaagtagaaaagcaaggcgttcatgtcaaactcgttgaattttctgattggcgagcacccaatgttgccgtacaaaacggtgatattgatgcaaactttttccaacaaagcgtatttctacgtaatgctgttaaagaaacgggttatgacttacatgcatttggtgtgggttcaggaagtcatgtgggtttatattcaaaaaaatataaatcacttgaagaacttccttcaaatgcacgtgtagctattccaaatgatccggttaatttagcccgtgctttaattttattgcaccgtgcaggtttaattcagcttaaagatataaataatgagctttcaacaacccaagacattatagctaatcctaaacagctgagcttcgttgaagttgaaggccctcaaaccgcacatgcatataatgatgtcgatttaattttcggcttccctcactacttaaaaatggcaaaggtaaccgacccgcatagcgcattatttttagatccaatcgataaaaaatacgcaattttgtttgtgacccgtcgtgattaccaggataaaaaccaaaaacttgcaacctttgttaaagcattccagaactcaaaacaagcacaagacattctggataaagactttggtaaaggtatgtggtttcaaggctggaaataa

SEQ ID NO: 46565 - DNA, 957 bp, Acinetobacter baumannii
ttgaaacttaactactttacttattgttttgaaagatttgatgataaaactcaatttagaatggatatcaatgatttcattaaatcttcgacttcaaatgaggctctaccatttgctaaacaaaatagacattcaggagaaaatctttatttacttccagtcttaaacggtttttacttgtttgtacagactaaagatcgagaaattattaaaagaattgagaaaaaagatgatgaaattaaggcttatgagatccagtctttattaagtaaagatgaaagcttaggattcgcatcttatgtatattttcatccaacattaagagtatttggatttgcatcaagagtactttctccaaagtttacagcatttcagatgtatataaacaacttacttcttatgcttaaaattcaagatattagtttcttagttcatcctttaaaaactgaaattacaaagactcaagcaatgacactaccatttattgggactacaagatttttagtccgtaaagatagtaatcttggagaatcatttaaggaattttttttaggatcgactaatcctaacgatttagaagtgattgaaagtttcgaaatagtcattaagccagcgccaagaaaatctctaactgacactattaaaaagacattgatatctatggaagatgagggtattaaagggattattttgcgaggtaaacaaagtcttgaggataatgtaaaagatttttatatccacagtgctggtgcgctatacgatgaaattaaaaatactgaggaaaataaggttttcgacgagataaaggaaaaaattgagaataatgcagagctaaaagataaggtcaaagagtatgaacaagaaatcccagaacaaatggatgatcgtattgcttatctttacagccccgctaattgggcttctgatagagtgtgcctatttccactatctcaataa

SEQ ID NO: 46566 - DNA, 246 bp, Acinetobacter baumannii
atgacagtacaaaatactatacctattctagattgggaaattcaacactactttaagatagctgaagctatgcgtttagctgctaaagaactcaaaattaatatcatttggggtggtgcatgggggagatatctaaactactatgtaacttcaaatgatgcttatcaagcgtatattgcagatagaaaaaaagtaggtaaaaaaccttttattgatgctgtacattttgaattagaagtactataa

SEQ ID NO: 46567 - DNA, 417 bp, Acinetobacter baumannii
atgaagaaagtcgcagcatttataacagcactaattcttagcacatcatcaattgctgctgaatgggttgagctatttaatgaaggtgaattcaaaatattacttgatgttgggtcagtaaaagacgttcctaataatccatataactataaacaagcttggttaaaaaatattgtagtgaatgacacaactaaagatggattaacagttaatgactttgttatgacacttgtatatgttgattgcgaatctctgaaatacggctttaaagctgcttacgcatataaaaatctcaagcaaataagcaatgaaactagggctatacctataatggaagatgttattcctgaaacaaaagcatctactattgtagactcagtttgttacgcttataaaaaactaaatgaaaaccaatag

SEQ ID NO: 46568 - DNA, 318 bp, Acinetobacter baumannii
atgtatacgatatgcgaaacgcctttatttactaaacttgcacctgattattggacagatgaagagtacaaccagtttaaaacttatctatctatcaatcctgaagttggtgatgttgagccgggaacaggaggtattaggaagattcggtggtcaactggtcacaaaggtaaacgtggtggtgtaagagttatttactacaacagattagcaaatggtcaaatatggctacttaccatttacggaaagagtgctactgaccagctacctaaaactgtattgaagcaaattgtggaggcactaaatggtactttctga

SEQ ID NO: 46569 - DNA, 309 bp, Acinetobacter baumannii
atggtactttctgaacgtgaattagagctacgtgatgcaaagcgtgatataggtgcagaaatcttgcaaggtattgcagatatgaaagccaataatgctgctaaacgtacagtagttaaagaaacagacgtttcattagctagacgtaaatcaaagctaaatcaagctgaatttgcaaagatgctcaacatccctaaacggaccttagaagcttgggaacaaggcaaaagaagaccttcaggagcagcacaaacacttattaagttatgtctacaagatcctgagcgtatcaaagagatgttagtataa

SEQ ID NO: 46570 - DNA, 1113 bp, Acinetobacter baumannii
atggctacagattataacagtcgtatagatagattgaaaactagaagacgagggttagataagacaataccttcaatggaaagttatgcatatgattctgttttacaagaatcctttagagaaattgagcagctgaagtttaaaagtgaatcgtgggaaactagatcaactacaccaattgttaattatgttttaggagcaatggcagaagttgatgctaaatatactgaaattagtgtaaaaacggctgaaagaattgaaaatcaactttatgacagattaaaagataaaggaatttatactcgatatcgtttacaaggttctgtacctttaaacattcatattaaaggtattagtgatgttgatcttttagtaatagataattctattttcacttatgatagatatggacctaaagtatctacttatactgctgctagtagcacaactaaagatgtattaaaaacactaagagcagaatcaatccgatcattaagtgacgcttttcctaaagttaatgtagatacgtctggagctaagtctattaagttaactggtggttctttagctcgagatgttgatgttgtaccttcaacttggaataatacatataattaccaagttactgataatgaagaagatcgtggtatcaatatttatgatagtgtaaaggaagaaattaactttaatttgccttttaaacatatttccttaattaaatctaagtgtatgcgtaatagaggcagcttaagaaaatcaattaggttatgtaaaactttgaaagctgacttaattgaagaaggaagaaagattcatttaagtagttatgatctagcagcattaatgtatcacgttaaagacaatgatctattcgatgcgagtaaaaatgatttacttgtactttatatgacgcaacagcacttcgatgaactttatcgtaataaagagacaaccttaagtttggacactcctgatagcacaaggaaaataattgataaagacgaaaaatttacgtcattattatatttatcttgtgctttggatgatttggtttcttcagtttgtgaaagtcttggtgtctcaaaagaaaatcttagatatctttcggtctga

SEQ ID NO: 46571 - DNA, 285 bp, Acinetobacter baumannii
atgaatcaacaacagtttcaagaatgcatgaaaatttggataaaaccagagacatggcatacaaatcatccttgtgataccaaaaggtttaatcaagctattcagcagttaatggctataaatggagccaaacttcttcatccagaggatttttctaaacaactttatatagcattagctaatgaatatccgaaactgagccaaaaatttattagtgagcaggtagaagatgctagtcaaaaatatgatgttattagtagctatttatatgatataagaaattga

SEQ ID NO: 46572 - DNA, 495 bp, Acinetobacter baumannii
ttgaatgatagctttgcctgtcctcaaaatcccgatgttgaaagctttttactaaataaaggcaaagggatacgctttgaaaattcttctatttcgcgcacttatctaattctagatggggataatggggatatacttgcctatttctcaatctcattcaaagaaattacaattaatacagaaagcctctcaggaacagctgttaaaaaactgaatggcatgagtaaaacggctaatacattaaaagtatatctgatcggtcagatcggtaagaatagtttggttaagcctaatccaattaagctagatgtgattctaagtgaaatttacaatgtgatttcccaagcccaagctctcattggtggacgggtaattatcttagaatgtgagaatcagccaaaactcatagcattgtatgagcgtcatggatttaaattaattgagacaatgaatgggtctgattctcttctaaccatgtatacatctattatctaa

SEQ ID NO: 46573 - DNA, 177 bp, Acinetobacter baumannii
atggctactgtctcgtttaataaaagctttgtaattgaaagccctacagcaattaatgctataatcaatgatctagaaaatcctcgcaaggttgaggtttctgctcgtgattacaatgccgagaatgcaaagggtattaagctattaaaacaacgattgtccaactcgaagcgttaa

SEQ ID NO: 46574 - DNA, 213 bp, Acinetobacter baumannii
atgaaaatagaggaactggatgatccggaattatatgagctagcacagtctgttattggctgccggattagcctaagaagttcaggaagggttcctgaagatgatcgagaggagctcgcgatgcaactacaatcattgttcgagttgaatagagctgagttaattcaaattattctgcatcatagggatagatataaaagagaaaattcataa

SEQ ID NO: 46575 - DNA, 2877 bp, Acinetobacter baumannii
atggcgaactatcatttatcagttaaaaccggtaaaaatgtaggttcttcgggaagtcgaggggcaagccattacgcctatattaatcgtgaaggtaagtataaaagagacgatatcgagcaaatcgaatcaggtaacttgccatcatgggcagtagacgcccagcatttttggaaagcagcagataaatatgagcgtgccaatggccgagtctatactgaattagaaatctctttgcccagagaattaaaccaagaacagagacaagagctagttcaacaatttgtagaaaagactttaggcaaaaactttacatattcctatgcgattcatacacctttagccagtgatggtgaacaaaatccacatgtacacctgatgttctgtgaacgaaaattggatggtattgatcgtacagaacagcaatttttcagacggtacaatcctaagaatcctgaattaggtggtgcaggtaaagaccgctacttctcagcaagaatattcgtttcggatgtccggatggaatgggcaaaccatgccaacgactatatggaaaaattgggattagatgcccgaatcgaccaccgcagttatcaagctattggtaccgagatccagagccaaaacttcagggctgattacgttagtcatgatcaatacagtattaacgaaaacattaaaaacattaagcatcaaaatggtgaaaccattattgagaaaccgagtgaagtgttgaaagtgctcacggccactcagtctgtttttaccatgcgtgaactcgatagattcttggttaatcatactgatggtgaggaacaatatttaaaagcccgtgaagctgttttgacatgtcctgaaatggcagttttatatggtaaggacagtgttgttttatcttcaaatgaactggttggaattgaggaatctatatcaacactgatctacaatgcgaaccaagatagccggatacaaaaaccaagaacaatcattgacaaattgccattaaatgcagttcatgttgctgagacacgaacgtttaatccagagcaggaaaaagcattttatacactaacttcgacagaccggatcagtttattgaatgggtcagcaggtacaggaaaatcctatgtattgagtgctgtatctgaagcttataaggattctgattatcaggtttatggtattgcacttcaggccatcacagcaaaagcgattgcttcagattgtgatattccgagcagtacgattgccagcttcttggctcgatatgaaagtggaaatctagcaattaatgataagactgtattgatactggatgaagccggtatggttggttccagagatatgcaaaaactcttgatgattactgaacagcacaacgcacaacttaaattagtgggtgatagctaccagttaaatgcagttctggccggttcagcgtttaatcatatccagaaaaacctagactataaaaatatagcgaccctagagaatattcagcgtcaaaaaaccactgaaatgcgtaaagcttcagaatatttatctaagcatgatgttgataaagctttagatatttatcaggctttaggcaaggtcaaagcatgtgaatcccatgaggttgccttagccaaaacaattcattcatggtcccttgatcacagtgaaagtaagctgatacttgctcactcaaatcgggacgtagacgaattaaacagaatggcccgttccgtcctgatcaagcaaggtaaactccctgcagaaagccaaaaagtgaatacttataagggtgaaatcgaccttgcggctggagacaagatcgtattcaaacagaataaccatgccttaaacatttccaatggtgaaacagctagaattattggctttgagcgtaattcccaacagcagattaagggcctgatggttgaatcagatcggggcggccagatcaagaagattgatttagatagctatcagcattttaagcatggttatgcgaataccatccattcctcacaaggaatgaccgtagagagtgcctatattcttgccagtgagaatatgaatgccaatctgacctatgtagctttgacccgtcataaaggcaatgtggaactgaattacagcgcgactagattcaatcaggaagaaaaaatctgggttagaaagcctgatggccaatatcacgaaaaagaactgtcagcattcgataacctgaagcgaacattaggccgtacagaagttaaaaatttctctactgattattctgtggttcaggctaaagatgaattaattaaaaactatcttcaggaacaccggcacagcatttcagagaagcgtgaaatctataatctcaatagcacgtttaaggcaatgactatgccagatcagcatttcagcaaacaagagattattgaggaagtccgaaatagcctaagaagcaaggccattttaggggatgaaattgttaaatttaatggtcaaatgaatattgccaaaggtgaacagctccagttagaccaggaactcattttaaagactggtttattcaaaaaagagcactttgagaaagatacttcgcttcaggtcgtagatgcctatagggttaaagacgaaccaattatgaaagctcgaattaagggagatatttacgaaatcccgtttaataagctgcatattcgttattcagacaaatatttgacagagttcaggcaagatacgtcagcacgttttgataaacgctttaagagcgaattacacagcaagtttaaccaagagctacagcagcaaagacagaatcagcccacacaaaacctaaatgccccaaacagtgagctgaagaatgccccacgtatgaaaaatggcccaaggatgagttaa

SEQ ID NO: 46576 - DNA, 474 bp, Acinetobacter baumannii
atgagtaatacacaaacctatagaaataatagcggtattgaattattgctacttattatcgggatatttattacagcttgtctttttatgatatggaaagcaactaagtctttaggcctagatttttggtcaggtatgtacaccgttcttttcttaattggatggtgcatttgtgcagttggtgcttacaaaattccgcataacattcctaatatttttgtgattcctgcattttcaatgcttttcctcctctgcttctttcctgttttaaatgactatgctctacaggcttctactccaaatttccatatggtgccacagctttcttatcttcctgaaaaatctgaaaagatggaatttggggccactgaaattactgtctggtggggcatgtggtatgcaaaagctgtttatattgcaatagccggattaattggtgttggaatacaaaaagcattttttaatgataattaa

SEQ ID NO: 46577 - DNA, 1062 bp, Acinetobacter baumannii
atgaaaaagtttatctacatttttctgatcttctttagttttctagatattagctccgcttatgcagttgaaaattatacaccagggcaagaccttggaaatcctgatggttctataacaattccgaatgctgcaactggtgatacaggaaagaacaaagtatcgaaagagattggtaatgttacccagcaaggtatgggcacattagataaattaatggaggcaatacaaagtaatttagagcagagtctgaagtctagcctgcaaaattattatcaaaaaattaccgcaccactcatctatgtctttagtggcttcattttgatctggatgacttttcaaggtttcaaaatgatgcttggaatggctgttgattttcagtccgttgtttcaaactttatcatcatgatgatcatatggtcgattgtcttcagttgggatgcattctatccatacattgcggaagtatttcttgaagacattccaaacctaattagtgaaatgacagggcacgatactcaatctacatttacgacttttgtgacaattgtatttgatgtcgtgacagagtcttttaaaaatgtagatatgggaattaccaatgtcgtatctggatttttctttgttttggtctatcttgttctacttcttgaagccgtcatcttatgtgtaattttctttttaatctggacattatgcaaaatggttattgctattttggttgtagtcgcaccaatttttattgctgctgccatgttccctgcaactaggaaatatgcaacgaattggcttcaagctgtacttactcctaatgccattattttactaacaattgtcacatgtgatttgtttttatctggagttataacagcatacgataatgttgttggggaaaatggcggatctaattttgttgtcgcttttgttttaatgattacaattggcctagtcattggaatgttttatttaattccccgaattgccatctctcttgtgggaagtggattcgaagcatctagttctggtacacaaggtgttatgggggggttaagtctggaatga

SEQ ID NO: 46578 - DNA, 408 bp, Acinetobacter baumannii
atgaaaaatttaataaaacggattgccctgactacttttgctgtattgcttacagcttgttctaaacctgatatttcaggtgtttggattcctgaaaaagtggctaaagatgaggttttttttgattactacataattgaaaagaaaaaagactctaatagatatttacttaaaaatgtgacttatcgaatcaaaggaggaaactcttatcgaccaatgaaattacctaaattgattggtggtcaacctgaaaaagttctagaacttattaaagacaatacctactgcgtagaaggttcactacaaacggaatgtgtggtttatacggacggaaaactagatttctataatcagggcagattcgttaaatcaaaaaaaaatccacctgaaattccagtaaatcagtag

SEQ ID NO: 46579 - DNA, 162 bp, Acinetobacter baumannii
atggccgagaaaattacacaaattggaattttagttgaagaaagtttgaaaaaagacttccaagcaatctgtaaagctcaggacaagaatgcaagccaagagatccgagcactaatgcgcgaatacgttaagaaacatcgtattaagaatgaggaaaactaa

SEQ ID NO: 46580 - DNA, 828 bp, Acinetobacter baumannii
atgaaaaaaaataagcttttattaataactctagtagttggtattattgccttaggtattgcattttttattaaatcccaagcagttacagagacaaaaaggctagggaacggtgataatactaaccagagagaaaaaactgcatctgaaccagcaactcagaaaaccatttcatcaactgaactatcccataagaatatagcttcatcaaccaaaagtcagaatgatagttcattgatacttaactctgatctaaaagcattaagggaaaaatatcctgatggtgttttatacaccaaattgtctgaatcaaaactgaccaaagcacaacgtgatgctttagcaaaagaattcgataatttaaatcgttatggaagctttagtggtgggaaaattactaatgaattttctaatttagataaaaaaagggctgcattacaggaagaaaaacctttagattttaagccaaccaatacagatagtttggtgccagatctaaaactatcaggaaaatggtattcaggtgcaataaatgaaggaaaatataattctctatatcgtttatatgaaaatcaagatggcagtactaaatttgaaattactgaaatgtatttaaatccaaataacagtgccattgtagaagtttttcaagagagtttaaatcataatgtaaacaatgtaccaatgacctttgaaacattgagaactgaaaatggtaaagatatttacaatgtgcatttcaattataatgatagatattactcattatctacggaaaatatgactcgggcacaagtagaaaatattctcaatcaaataactaagtaa

SEQ ID NO: 46581 - DNA, 402 bp, Acinetobacter baumannii
atgaaatctaaaatttttcttgggttagtaagctttatttctttttcaacttatgctgctactgttcctgctgaggcttttagtcgtgctaattgtaaattctatgtcccaggatttggatatggttggtataacgaatctatttcttatgatgctttaactggtgtacataaaaatatgtatgcaaaaacagatcaaaaagctacgaatggaaaccaacgaacagataattcgagtaacccaagtggatatcgtgttcgagcaggatttgttgatcctacaagtgatacaagattttggaatgtatcaggtactcactatgaaactttagatagtgggagagctgtttctcaatattcatcagcaaaagattgcaatggaaaaattgggcaattcttataa

SEQ ID NO: 46582 - DNA, 939 bp, Acinetobacter baumannii
atgagtgatctaatagttaaagataatgctttaatcagtgctagttataatttggatgtcattgagcagagaattattttactttcgattattaaagctcgggaaactggtacaggaatagatgcaaatacatctttagaaattcatgcaagtgattatgtaaagcacttcaaagtagaaagacaaacagcttatgaagccttaaaaacagctgtaaacaatttattcaatagacagtttagttatacacaaccatttcagaatacagaaagagtggaatatgtaaaatctagatgggttagccgaatatcgtatgttgatgagtctgcgatattaaatattacatttgctccagacattgttcctttgataaccaaattagaaaagcattttacaagttatcaattaaaacgtgttgcacaacttaccagcaagtatgcgatacgcttatatgaattactgatccaatggcgtgaagttggaaagactccaatattagagattaatgattttcgctttaaattaggtatcgaaaagcatgaatataaacagatggggcatttcaagagtagagtacttgatcctgctatacagcagattaatgagttcacagatattaaaactgaatatgtgcagcataagtctggtcgagtaataactggtttcgaatttaaatttgccttaaaagattcttcctttagagaagaaaaaccgaacaataaaaatattctcaataaggaagtggtaagtatgtctgatcgacagattttactttttgcaaataagctagcttatgatgaggaatttgctagtcgtatagcagaaataggggaaagttatgaagatctagaaaagagattagtaaaaatgctaactaaaaaagaaaatttagttaaatgggctaaggatcttcagcgtataggtttcaaagctaattag

SEQ ID NO: 46583 - DNA, 642 bp, Acinetobacter baumannii
atgattatcttggttggtggtgaaaaaggaggttctgggaaaagctgtttagcacaaaatttagctgtttatcttcaatataagaacagagatattttgttgttggatgctgatccacaaggaacaacgacagattgggttaaagaaagagatgaaaattcagtcctaaaaaatatcccttcagtacaagctgcagggaatattcggcaagttttagatgacttatctaagcgttatcaagatattattattgatgctggtggacaagattccgaagcattacgttctgctatgactatagctacacatatgttgctcccttttcgtccaaaacgccgagatttaaaaacattagttcatgttgaacagcttataaaactagctaaagcagtaaaccccgaattaataacgaaagcagttattactcagtgcccgacattacccagtcaattccaacgtattttagatgcgaaagaagcatgtgaatcctttggtctatctgctttaaatcaatttactacaaatcgtaatgtgtatgatgatgctgatgaaaatggtttatctgtttttgaagttgattctgattctaaagctaaggcagagatagaaagcttggcattagaatttttaggagatttctaa

SEQ ID NO: 46584 - DNA, 291 bp, Acinetobacter baumannii
atggctctcaaaggattaaaaaaatctgatcaaaatgataagcagcaagaaattgatacttttattaatggagcttcaaagcgtattaaagatatctcccaatctcaacaaaagtatcgtcgtttgaccttttcattaactgaagaagttgataaggaaattgataatttacttctaaattgtcgagttgctagagctaatcgttcaataatagttaaagctgctattcactttttaagcagtattcctgaggatgagttaaatcagatagtttcaaaagaattattttaa

SEQ ID NO: 46585 - DNA, 390 bp, Acinetobacter baumannii
atgcgacttgtatgtgaaaaaaattacagaaaaccagtaattaaaccttgtctagaatgtaaaaaaaacgttgatactgtagttcatcattcaagatcttttaaaggacatttaatgcatattagatgtaccgacaatctcttcagtacattgtttttagtctcttcattaacagaaagtgcttctttaaaaaagagttccagagatatcataaaaattcataagtgtcttatatgtaatgaaccgtcttcaggagcaaaaggatttaagcatagaattgtttacagggggaaagagttagaattaaaaatacacagaacttgtttttttaatagatttaatttgaaatatgatgaagctactaaagaaattcataaagtagatcaatag

SEQ ID NO: 46586 - DNA, 276 bp, Acinetobacter baumannii
atgattgtaactttggtatatggcctatctaaaccaggagttaataactaccgtcgaaagtttggagtagcttttgcttgcttatgggtgtcatgtcttatttatctatctttagcaggctttctatctatacttggatttgctaaaacagaagctattcacctatcaatcttattaaagtttttcgtaggattatttattgcaagtttcttacaatctgttttaactatatttgttggtatcaatgtgttggtaaacagcaataaagttgcatag

SEQ ID NO: 46587 - DNA, 1380 bp, Acinetobacter baumannii
gtgtttattagtgtatttgatctttttaaaattggcatcggcccatctagctcccatacagttggaccaatgcgtgcggcatacagttttgtggaagatttattgaagcaaaacgatttacaagcaacggttagagttcaggtgaagttatacggttcgctgtcggcaaccggtgttggtcatgcgacagataaggctgttctgttaggtttaatgggttttgatcctgaacatattgatacccaagtaagtacaagcttgattgaagatgttcttgaaaataaagccatccagcttaatcagcaaaagactatttcttttgactataagcatgatgtgctttttttagatgaatctttgccttatcaccccaatgcaatggaactgattgcgtataacggggctcaagaaattttatatgcagaaacttactattcggttggtggcggttttattgttagccaaaggcaattagcaacaactcaaactgaaactaacgacgttaaggttccatatccgtttcacagtgcggctgaacttttaagcttatgtagaactcatcatttatcagtgagtgagttaatgcttgaaaatgaaaaaagctggcgtagtgaagctgagattcgtagcaagattatggaaatctggaaagtgatgcagcaatgtattcacaacggattaattaatgaaggcatattaccgggcggattaaacgtaaaacgtcgggctaaaaaaattcacgataagttattaaataagaaaaacttaaacctgattgtgacgacttttcatgcgatggaatgggtcaatttatttgccttagcggtaaatgaagaaaatgctgctggcggtcgagtagtgacggcacctacaaatggggccgcaggaattattccggcggttttatattactacgtgactttctctaaagacttttccgaagataaagtggttcgcttttttttaagtgcggcagccgttggcattttatgtaaactcaatgcttctatttctggtgcagaagtagggtgtcagggcgaagtcggctcggcgtgtgcgatggcttcggcgggtttagccgagattttaggagcatcacctgagcaagtggagcatgcggctgaaattgggcttgaacataatttagggttaacgtgtgacccgattggtggtttggttcaggtgccttgcattgaacgaaatgcaattgcagccgtaaaagccattaatgcagcccaaatggcacttcatgatgacgatgaacactttgtcacactagataaagtcattcagactatgaaggaaacaggtaaagatatgtctgagaaatataaagagacttcaaaaggcggtctcgctgttaacgccattgagtgttaa

SEQ ID NO: 46588 - DNA, 1866 bp, Acinetobacter baumannii
atggataatttaaataacgcaaaaaaagataatttttcacggaagaccatattagtaacaggtgcagcaggttttattggcagcagattgatcgttgaacttctgcgtgaaggtcatcaggtgattgctgcgctgcgtaatgccgcaaccaagaaagataagctattaggtttcattgcaacccaagggctggttgatccatctatatcttttgttgaatatgatttaagccgcgattttaagctggactctctattatcggacgctcagacaaaaattcatgtaatttatcatctcgcagcatcatttaattggggcattagcaaagctgaagctgagcgtaccaatattaagtcagggctggcgttaattgaatgggctgcaacattgaagcagcttgagcgatttatctggattggcgggtatcgtgtggctgcgccgccgcaagaatcggctgatgagttgtattgcaaacatggtggttatgaggcttcaaaaattttagggcatcaagctttcattgaggtctgtaagcgtttaaatgtgccatggactgcaataaatccagccacagtcattgatggtttttataattatggcgatatgcaatatattggtattgcggacatgattgataagctctatcagggacgtttactggcattaccaggtggtcgtgacacattcctacctctatgcaatatgcagtatatcgtgagctttttgatccgaacgatgtcttatcctgaaactattgctcaggaatatatgctgcttgatcctgcgacacccaaatttcatcgcctagtttacctagctgctgagcatttgggagttagctcaccacatttacaaatacctaaagttttgctcgagaaattaccagaggtattacttgacggttctaaagagcaactttctttcatttctaccgagcactaccatgttgctggggcagaggcgatggcggcgaagatgggtatcgcagacctgatcagtatcatgccttatttttctcgctggattgatcgcttggtgtttacacgttttggtcgtatgcaagtaccaacacctaattcttttagctatcagaaccgctattggacagaaatctatactaaacagccagttggatcagaaaaagcttctgcattatttttacacggcattccatttgatagtgcatgttggtctccaatcatcaataaaattacttatgatcaggtcgctatgatggacttaccgggacttgggcgttcaggtagttatgaaatgatggaagataataaccatcaatttattgatactgcggcagagcttttggcaccaaatagtgtggtgattgcccactcattaggatgtctttttgcattaaatcttgcaaagaaatatccagataaagttgcacgccttatccttatatcgccttattttgttcaggcacaggctgcaaaaatgtttcagatacaagcgatatctaaactcattttccgttttgtgccgaaaaatgtgattgctaaagatttacatccagaggggcaacaaaatctgtcagtgagatatgcgatggattcactacgccgcatgtcagtgtctaagcatattagtgagtacatgcaccacattaatttgccgcagcagcgcgcagcacagacagctttgctttctgagcttcgatctaaaatcgagattattgtgggagagaaagatccaattgttactccaatcagtcctgagattcctgtacatatcatcgctggcgcaggtcataatccacacgttacccatgtagaagcggtttatgattaccttacaccggttctgacaaagtacatcagcactacagcacagcttagtgatgtctga

SEQ ID NO: 46589 - DNA, 1392 bp, Acinetobacter baumannii
atgaatgccacgccaacccatcaagccttgcaacccgaatatcgcctattggttcttttggtttccattggcttttttatgcaggcattagatacaacaattgtaaatactgccattcctgcaatggcacatcatttaaatgaagatccattacgtatgcatagcgtagtggtggcttatgttttatctgtagcggcctgtattcctttaagtggatggttggccgaccgctttggtgttagaaatacgtttttatcagcaatcattattttcacacttgcttccttaggctgtggcctttctcaaagcctaaatcaacttttatttttccgtgtcattcagggtgttgggggtgcgttattactccccgttggtcgtttatcacttttaaaaattattccccgaactcaatttttggcagccatgagcctcatgagtttggcaggtttactaggccctttagctggtccaacactcggtggttggctcgttgaagttgcaacctggcattggatctttcttattaatattccaatgggagtattaggtatattaatgacattaaaggtcatgccaaatgtaaaagagcctaccgttaaaacatttgaccttattgggtttgtgctcttagtcgtcgcaatgattggctggtctttgggtattgaacatcttgcctcacctgagtattccaaatggtttagtatttctttattagtggtcggggtagtcgcaaccctttggtatgcctaccattcacatacccatcaaaatgcattgttccgtagccgactctttagaaacaagatttacgcgattggtattttaggtaatttctttgcccgctttggtggtaatgccttaccttttgttttaccactcatgctacaagtcgcttttggttttgagccattcattgcgggattaatgatgattccgctagtgttagggtcgcttttctccaagccgattgttagaccgattattcagaaaatgggttatcgccgctttctgttaattaacacaactttagttggtctatgtattgcttcttttgccattatgactgtcgacaccccaacttggtttagagccttacactttttcttattcggtacattaaactcattacaatttgtgggaatgaatacacttaccttaaaagatttgcctcaacaagatgcaagtagcggtaatagtttcttatcaatgattatgatgctttcaatgagtattggtgttgcactggcaggtacactcattaatgtatttaccgattactatggtacagcacatgtgacaactgccttccatgtcaccctcatttgtttaggttgtattaatatcattaccgcactgatcttttggcaaattcccaaaaatacgcctgtgtaa

SEQ ID NO: 46590 - DNA, 213 bp, Acinetobacter baumannii
atgaaaacaatcggtttactcggcggcatgagctgggagtctacatcactttactatcaacaaattaatagaatggttcagaacaagttagggaaactacattcagccaaaatcattctaaatagtgtcgattttgaagaaatagcagccttacaatcgaaaggtttatggcaagaagctggcgcctacttagctgagcaagcacaaaattag

SEQ ID NO: 46591 - DNA, 1074 bp, Acinetobacter baumannii
atgcgcacatctgaaaaacaagtaaaacctattgagattgatgatatcaatatcatcgagaacgaaaaaaccaaaaaagcgattactgcagctgcattaggtaatgcaattgaatggtttgatttcggagtttatggttatgtggcatacgttctcggtaaagtatttttcccagatgcttcaccaagcgtgcaaatgattgccgcgcttgctacattttcagtaccttttattttccgtccattaggtggtcttttctttggacatttaggtgacaaatacggacgtcaaaaagttctggccattactgtcattattatgtccatcagtacctttggtattggccttattccatcttatgaaacaatcggtttatgggcacctattcttttactcatcgtaaaaattgtacaaggcttctccattggtggtgaatactcaggtgctgcgatttttgtagctgaatattctccagaccgaaaacgtggctttatgggaagctggcttgattttggatcgatagccggctttgtatttggggctgcaactgtcgccttgatcacacacgccgtgggtgaggcacgttttgccgagtggggttggcgtattccattctttctcgctctaccactgggcataatcggtttatatttacgaaaccgccttgaagaaacccctgtatatcaacagcattcagagcaacaagcacaaaaaagcaaacctcaaaaatttagtttcaaagaaatttttgttaaacataagcgtagtttattggtgtgcattggcctcgtaatcagcactaacgttacttactacatgttgctaacttatttaccaagctatttttcgcataacttaggctattcagaagcacatggtgcagttattatcattgcggttatggttggcatgttatttgtacaacctgtgattggttatttgagtgataagttcggacgtcgcccatttatttttattggaagcttttctcttattttcttgtcctatcctgcctttgtattacttaactctggagtaaattatcaaatttttctctgtacacgacaaaaatag

SEQ ID NO: 46592 - DNA, 1635 bp, Acinetobacter baumannii
atgtttgaagattctgaaaatggtttaacttcagctcacacttcaaaaggtttaacgattttattaaaagatattaaagaaccaaatgacgaaatgttggaaaaagcacatttttattatgatcagatgtatgactttttaaccgatctcgaccaatttatccctgttatggacatgccggaaatgcaggaatcttttccgcaaagtctgaatcagcttactgttgggatacatggtttcggtgctattggcggtggttatatagcgcagatcttgtcacattgggatggatatacaaaaccaaagagaattattgcttctacaagaaatagtctttttcgcgaagcagtgaatgcgtttggaacttatagtattcgctatgggcaattttcttatgatgaacgtattgagaatatgaccattgttgattctgaaaatgaacaacaaatgttggagatgtatacccattcaagtttgatcgcactttgtttacccgaacaggccatcgaagttgaagcaaaaataattgcaaaagggctatatgcacgttttaactcaccacttgaagcatgtattgaaccactaacttttctaattattttaaataaagtcggtgcgaaatatttggttatgaagcatcttaaagaagctctactagagttaaccaacgatgaagatgtaacggagcatattttaaaagagcattacttttgcgacaccgtagttaatcgcatggtttcaaaactttctaatcagaatttatatcgtcaacttcgtattaagcataattttcttgaacagcatttagaagatgtggagcaagaagaccaaatcgaaattgaagattgtaataaactgaatcaagatcaactaaatcaggcttctatctatgttgataacatgcgccgtaatttccagccgggacatatcttacaaagcatggatttaatcttgttccatagtgaaactgatatgccaatctatgtagagaaaggcagtcctttacttgaaaagttgcgtcaggtggtattggttgaccaaattactgacattcaactcattaaaaatcgtttatggaatggtgtacatgcgatgcttgcttggtatgcatctttaatgggttatgaatctattggtgttgccatgggcgatcattcagttaaagcatttgcagagaacttaattgcagaagtgaagcaaggacttgcaattgtattacctaactatgcaaaagatctggatcgaatgtcacaaagttttctagactcatgtgaatatgcatttaaagatccttgtcaacgcgtagctagagatccactacgcaaactcaatcataatgaacgtgtcatggcatcaattgctgtgaatatttgtcatgctttgccttataaaaatttattaaaaggcgctgctttaggttatgcctatgcgattcaatttttagaaattgaagagactaaagctgttgaacatctgcagcaacaaattcagaacctagacttgagtacaactcaaagaagacagcttgaagctgaattggttcaacttatccaatatttgttttctgaacaaggtaaacaacctttggacattaagctgaacaataccaaaactacatcaaatcaatatgtttga

SEQ ID NO: 46593 - DNA, 693 bp, Acinetobacter baumannii
atgtctaaacgcatattacatgtcgtgaccaatgtttcacgctataagaatgtcaatgaaccaacagggctgtggttaggggagctcactcatgcttatgatgagtttgaaaagcaaggttatgtgcaagatattgtcagcccaaatggtggaaaaactccaattgaaccaaaatcgcttgtgcctttggtggcggataaatctgttaaagaccgagaaaaagatcaagcttttattacgctgctggcaaatacttttaagccttccgacattaattggcaagactatgacgtgatctactatacgggtggtcatggtgtaatgtgggattttctagataaccctgaactgcaagaaatcaccaaaaatatttatgaaaaaggcggtattgtttcgagtgtttgtcatggctattgtggcttgctcaatgtcagactttccaatggcgaaagacttataaaaggcaaaaagttaacaggctttgcatggagtgaagaagttttggcaggggtggcaaaaaaagtgccatataatgccgaagagttagcgaaagaatatggtgctcgttatgaaaaggcttttattccttttgcaccatacgtggttcaagacggtaagttaattacggggcaaaacccgttttcagctaaaaagacagctttagcgataatagaagagctagaaaagtcataa

SEQ ID NO: 46594 - DNA, 408 bp, Acinetobacter baumannii
atgattgatctaaataaaaaaagagaagcttttgaaagatttcatgccaaaaaatgtaattgcagttatgaaagtttaaaacgtcaactagatagacaagaggcactaacaggacacagatatttaccaactagtcctcgtcatgaagcttggttgatttgggatgccgcatggaatgacgccagtgctcaggtgttgccgacttggatcagcgtggatgatgaatggccgccaactgacataatggtacttatttgttgggctgatgcacctgatgttacccccgaacaagactatatgactattgatgaagatttaaatagtgtatgggcaaattatcataatgatgcgccttcacactggatgcattttcatagtgtgccaaacgtatcgggagctgaaggatga

SEQ ID NO: 46595 - DNA, 396 bp, Acinetobacter baumannii
atgagtgaatcaactttatgggcagttgcaatgcgacctgaaggcgatagcccttttaaacaaaccccagcagcctcaaaagagatagcggagcgagctgttgatcgttatagaaaaatgcatgaaaaggaaggcaacaactttttcttagaaattttcgatgatgttatcaaagtccagaaatggcacggcacccgtaaggatcatattaaaaaactattttatgtagaaagctggttcaaccaagcaatgtatcaatgctttgatttgaagactgctgaacgtgtttttaaatttgatgaaattgtaatttgctacaagaaaggttctgctccccttgtaaccaaaagctttgatgaggcaaaacaattttacggatatggagctgaggaatga

SEQ ID NO: 46596 - DNA, 336 bp, Acinetobacter baumannii
atgaaatatcaaatacaaccaacacaagtaccggatgatttaaatagctgctggttccatcctgatatagagctacatgacacaattggagagcatgctgagttttatacaaaagaacaatgggcacaactgcaaaagaaccttggtgtttctataaaaatcgaaaaccttgactattgggatattgaagagattccagaagataatcttagtgattggtccaactggaagccgcagccaccacaagaaggcttatttctaatagcagcatttgattcagaaaatggccctgttctttggtgggcaaaccctaaagcggaaagtaaggaggagtaa

SEQ ID NO: 46597 - DNA, 270 bp, Acinetobacter baumannii
atgggacaaatagttaaaatagaggctagcattctagaaaagattgttgctgtagctgaacgtattgctcagtcaaaagaagaacgccgagttggtcgtgaagaatttgcacacatgctcaatatcgaacctgaaactctagacgctcggattcgtgaaggcagataccaaaggccatacaaggatgggcgaaaaagtttttggttattgtcctacgtgcaatctgtcgttacagacacaaaagaatctggtaaagtagccacctattga

SEQ ID NO: 46598 - DNA, 435 bp, Acinetobacter baumannii; identical to SEQ ID NO: 26756

SEQ ID NO: 46599 - DNA, 1569 bp, Acinetobacter baumannii
atgaatattttatttaaaacaactgtgcttgcagcatcattattgctcgcggcttgtaataacaatgatgatcaagaagctcaaactgcaccatctacaaacccatcaaaatattatcaaacgaaaacgccttaccaacctcaacaagacttaaaaagctatgaacaagcgccgactgggttccagccagtttttacagagttagtggcacgtcacggttcgagaggtttatcaagtctgaaatatgatttggcactttataatttatggaaacaggcgaaagctgaaaatgcattaacgccactaggtgagcaattaggtgctgatttagaagcaatgatgaaagcgaatattttgttaggttatggtgttgaagggatccgtcagtacggttatggaaatgaaaccatgactggtattttagaacaccgcggtattgctgatcgattattacagcgcttaccaactcttttaaatacgcaggcgtctatattggtacaaagttctggagtagaccgtgcggtagacagtgctaaatttttcactgctgaactcattaaacaacaaccccaactgaaagataaaattgttccattgtcttataccaatttatcgagtggaagtgttccaagtgttgaagatggtggcgttgatcgttttaaactttattttcatagcttgaatgcagacgaagacttagctcaaccactgagtgttagccaacaaaaaatttatgatgcaagtcaggcttatcaagattttgaagaaaataataaagatttagctcaaaagttagatgagttatctaaaaatactcaggctgaaaaaactgcccaaatggtactcagcccgatttttaaagctgacttcattaaaaagctcggtaccactggttatagctttagcaataccggatcctttacagtaacttcgcctaaaggtgagcaaattacagaaaaaggtaaggggaaaaatacaattgccagcgcagttgatgcagcggcctatatttatgaactcgattcaatttctggtggtatgaaagatgagttaaaaggtattgattttgataaatatatgcctttggaagccgcaaaattttatgctgaatttaatgacgccaatgatttttacgaaaaaggcccaagctttacagaatcaaatcaagtcaccagtgaaatcgctcaaggacttaaacaggatctgttccaacaagttgacgccgtagtgaataaagctcaaccttacaaagcagttttacgttttgcccatgctgaaattattattcctttagcaactagcttagatttgcataatatgatgcagccgttaccactacgtcagacttataattactcgacaagcgcatggcgtggtgaagtagtttcacctatggcggcaaatttacaatgggatatttaccaaaataaccaaggctctactttggtaaaaatgctttataacgaaaaagaaactttatttaaacctgcatgtaattatgcacgttatacaccaaccagtttttactatgactacatcaaattgaaacagtgctatcaaatgcaatag

SEQ ID NO: 46600 - DNA, 1557 bp, Acinetobacter baumannii
atgcataaaggtatacgtcaatctatggcatggctgcactcgtggactggtttaatttttggatggctcatatttgctattttttttatgggaagtttgtcttattaccgccatgaaattaatttgtggatgcaaccaccccttgcacaatttgaaataaaacaagatgtggcaattaaaacggcatatcaatacttacaagaacacgcttcagatgctaaatcttggtatttaactgttgctacacctgaaagtccggtaaatacgatgtattgggaaaaaccagatggtagttatggaaatgcaaccctcgatgcaaacactggtcaagaattaaaactttctgcgactgaaggcggtgactttttctaccgtttccattatcaactttttggtgtcccgatattaattgggcggttggtcgtatctttagcagcttttattatgttgattgcgttaatctcaggcattattactcataaaaaaatcttcaccgatttttttaccttgcgtacctttaaatcgcagcgctcatggttagattttcataatgtttcatctgttattgcactgcccttctttttaacagttacttttactggcttggctattttcttctatttatatttaccttggggaatgcaaaaactctatccagagaatccatatcaatatttcaatgatatacgtacaaacacagtcacagaaagtacaacaccgcatcctgcacagaatttaccagttgaaaagctattagctcaacttaaacagcgttggggaaatcaaactttagcaactatgagtgttaaaaatccaaatacgaatcaggctcaaattacgtttattcagcaagaagaccattctattacccgtaatcaagcccaaatcacattagatgctacaaatgctaaagtcttgggtgatacacgtaatcatagtcctattgccacactttatgcaggagtatatggcctccatatggcaacttttgctcagcctctacttcgtttaggattgtttttctctggcattttaggctgtgtaatgattgcctctggcttgttgctttggagccttaaacgccaacttcaaaataaaaatagtaagtttcatttcgggcactatttagttgaccgtttaaatgttgctacctttgtaggtttgccttgtgcaactcttgcttatttgtatgcgaatcgattgtttactgtcacggcccccactgttaattatgaaatttatagtttcttcttcgtgtggctcataagctttattattgcgctcatcactaaaaaacaatatttatggcaaactcagctaggtatttttattctgcttagtattgcactccctgtcttgaatataagttatttactaaaaaacaattatattcaaaattttagtagttattgggattttgcacgtatagatatatttttctggttatttgcagctttagccttttttatatttcttaaaattaagcctattcaatataaagcttcagataaaattcaaaaaaagctgagtaagttaaatattgaggtgaattcatga

SEQ ID NO: 46601 - DNA, 963 bp, Acinetobacter baumannii
atgaatatcccacctcgaccatttaagttgtctgtaatcgcctgcgcgatttgttatgccaatctcacctatgcccaagatgcacaggtacaagctttgcaaacaattcaagtcaaagcatcaaatgcagagcagtcttctgaacagaccaaggcatataatgttaaaaactcaagtagtgcaaccaagcttaatattgaggctaaggaaacaccccaaaccattaatgtcgttactcgtcagcaaattgaagattttggccttaccagtactcgtgatgttttaagtaatacaccaggtgtgacagtaactggattagaaacaaaccgaacaacttatactgctcgtggttttgatatttcaaatattttggttgacggaatcggtatccctcaagttgatagctacaattataataatagtgatgcagatagctatttctatgatcgcattgaaattgtaaaaggtgctgatgctctaacaaatgctctaggtgatcctggggctacaattaactatatccgtaaacgccctaccaaagaatttcaagcaaatgctggggtgagctatggttcatgggatacgcagcgctatgaagctgatatctcaggttctcttacacaagatgggcgagtacgaggacgtctcgtaggttatgagaaagtcggagattcttatcttgaccgctattcagaagaaaaaaacggatttcaaggaattttagaagctgacgttacagacactacaaatatttcagcaggatattcaaaaactcgtcaatacgctaatggttcgcaatggggtgcactacccttagttaactcaaaaggagaaccattaaattattcacgcaactataattatgcaccatcatggacatactacgattgggaaattgataattattttgccaatattgaacaaaatttatgggggagactggaagctaaggttaggttataa

SEQ ID NO: 46602 - DNA, 1176 bp, Acinetobacter baumannii
ttggcaaaccaaaaacttaaaataggcattgtagttggagaagtttctggagatacgctcggcgtaaaactcatgcgtagttttcgcgagcagggaatcgatgctgaatttgagggaatcggtggccctcaaatgattgcggaaggttttaacagttattacccaatggaaactctgtctgtgatgggcattgttgaggtattaaaagacttaaaaaaactattcgccgtacgtgatggcttaattaatcaatggactcagcatccagttgatatttttattggtattgatgcaccagactttaacctcagactttcgaaaagtatcaaagaaaagaatcttccaataaaaacagttcaatatgtgagtccatcagtttgggcatggcgccaagggcgagtacatggcatcaaacaaagtatagatttagtactttgcttatttccttttgaaaaagttttttatgaacaatatgaagttccagcggcatttgtaggccatccattagctaaacaattaccgcttgagaaccctattcaaattgctaaacaagaattgggtgttgatgaaaatcaaaaacatattgctttgttgcccggtagccgcaagggtgaagtagaaaggcttcttcctatgctattgggggcagccaatattttgcatacaaaatatccagatattcagtttttaattccggcaattaatgatgcgcgcaaacagcagattgagcagggggttgaacaattagcaccgcagttaaaagcaaaaattcatattttagaaaatacggatagtgaatcgaaaattggtcgtatggtcatgaacgcgagtgacattattgctttagcgtctggaacggcgacattagaagccatgctcatgcatagaccaatggtcactttctataaactgcattggctaacttatttaattgctaaattcttggtgaaaataccttattattctttgccaaatatcatcgcgggtaaaaaagtaattgaagagctgattcaggcagatgcaacacctgaaaatttagcggctgaaatagaaaaactaatgaatgttgaaaccgctcaaattcaagtaatgcaacatttaactatgcataaacagcttatttatggaaatacagaagatccggttcaagccatcctaaatgtgcttgaaaaataa

SEQ ID NO: 46603 - DNA, 2115 bp, Acinetobacter baumannii
atgtcttatattcaaaacttggtatttacatttagatcaaaggtcccagtaatcctacaaacggaaagcagtgaatgtggcttagcttgtttagcaatgatttcaagctattatggccattatgaaacaatctttaccttaaggcaaaaatattccgtttcaataaaagggagtagtttaagtgatttaattaaaattgctggaaaaataaacttaaattcaaggcctttaagattagagatggatgaactctctaagcttagacttccatgtattattcatattaacatggatcattttgttgtattagtttctgttaataaaaaaattgaagtgattgatccttctttggggaaaaggttttattcaattgatgaattttctgatatctttacgggtattgctttagaaatctggccaaattcaaaatttgagaagaatgaaaaaaaagaaatatttaattttttccacctattacatgatttaaaaagcttattatcttcatttagttacatattaatactggcagttgttttagagattttaggtttagtttcacctctatatatgcaatttgttctagataatgttattccggaaggtgatagacagttattgttaactctgacaatagctttttttatgttaatgatttttaatataattattaccacaacacaaacactaataggtatgtttgtttcttccacattaaatgtacagtggaaatcaaatgtacttaatcatttagttaatattcctaatgaatacttttttaaaaggcacttaggggacattattagtcgatttaattcaattgatcctatacaatctactctaacttcaacttttataataacacttttaaatgcttgtttagcgatatttacactttgcttaatgttttattttagtgctcaattagcactaataactttaattgcaatggtactttatctattattaaaaataatcacatacttacctttgcgaagtttggctgaaaaaggaattattctgggtgcttcacaaaatagttatttaatggaaactatacgtggaatcagggcaataaagcaatataataaacaagatgaacgatctaataattggcttagtttgtttgttaatcagacaaataactccttatcaagccaaaaattaagtgtaataatttcaataattaataaatttatatttggtgtagagaatttattaattatatggtttggtgcaaatcttgtaattgataaaacatttactattggttttcttacggcatttattgcatataaaactcaattttcaattaggttttcaagccttattgatagttattttcagataaaaatgttgagtcttcatggggagagattaagtgatattgttttaactgatcaagaagatgtaacagcttttgaattaacgccaaatgtaaaacaggaaattaaaggtcagattaaagctgaaaatattagttttaaatatggggatttcgaagccgaaattattcaaggtttgaatttaacaattgaagcaggtcagagtattgctcttacaggaccaagcggatgtggtaaaacgacatttttaaatttacttaatgcatctttaaaaccaacttctggtgaaatttttcttgataatattccattttcacaattaggtacaaaaaacttacggtcattaatagcctgtgtagaccaaaatgataccttatttgctggaaatattattgagaatattagtttttttgattctaatgtaaaacttgaatgggttgaacgatgtgctgaaatggcgggtatccataatgaaataattaaaatgcctatgggttattggagtttggtgggtgatatgggaagtagtttatcgggcggtcagaaacaaagaatactaatcgcacgtgctctttatcaaaaacctaaaatactttttatggatgaagccacaagtcatttagatatacgaaaagaaaaagaaattaaccaaatgatttctgatttaaaaattaccagagttattattgctcatagaaaagaaacaattatgtcagcagatcgtgtcatttcacttaaggagggaaaaatatgctttgataagatcaaatga

SEQ ID NO: 46604 - DNA, 1275 bp, Acinetobacter baumannii
atgcttaaaaataatggacttttccgaaaagaggtctttgagtcacggaaaaacagattcgttgggaatgtaattgtttcagttccaatcacatttaagatgttagcacttatttttggtttaatggggcttgctttgctcatttttattttttcaggtgaatttactaaaaaagttagagtttcaggccaaattatgccgaatgatgggtttgtaaaaatatatagtacaagaactagtattgtgaaggatatttatgtcaaagaaaatgattttgtaaaagttgggcagaatcttttacatataaataattcatttttcttagaagataataaagacttgtatgattcaattagttacgaatctaatcagcgaatagagttgttttcaaaggaaattgctaaagagaaaacaatttatgaaaataaaaaacaaaattcgattaaggaactagattatataaataaagaaataagtaatgcaaatcaacttttttatactacaaaatataagttgagtgtagctaatgatgtatacgcacgttataaaatagcccatagaaataatgcggctagtttggatgaagtccaaataaaagaaagtcaaactttggatctcaagaatcaacttaaacaaattgagagtgaactagacagtttaaaagaaaatttaagaaataaaaaatttgaaatcttatctttagaacaagaacatcttaaacatttgacacaattgaaaagagaagaatctgaaattaatcaagaaaaaattcagagtcagtcgaatagcgatcaaatattaaagagcccaatcgatggaaaaatttcaattattaatatagagaagggacaaacgattgaactcaataaaatactgatgtctatagtaccaacgaacactaagttagtatgctttttatatgttccatctaatgctataggttttataaaacctaacacagaagtttcaattagatattttgcatttccataccaaaaattcggattagctaaagcaaaagtattgagcatatctgaaaccccaattccttatcaggatttaaattcattaggactgatacctatgcaaggcattacctcaaatgaacctgtatatattataaaagcctcattagataagcagactattaccgcttatggagaagaagtaaacttaaaagtaggaatgttacttgaagcagatataaagcttgagaaaagaaaaatttatgaatggatacttgaacctttgtatacagtaactggtaatatttaa

SEQ ID NO: 46605 - DNA, 558 bp, Acinetobacter baumannii
atgttaaatattaagaatattcaacaaacggttaaagtagcgactacagtggcagctttgatgtgcttttcttcactggcacaagcatatcaatatgagcaaaccgcgcgtttaattaacgaacgtttatcttatatgaaagatgttgcaggctataaggcagagcagcatttaccgattgaagatttaacacaagaaaagaaagtactcgatcaatcgctttctgaagctgacgcttttgggcttaacagcgaaacagtaaagccatttatagtggcgcaaatggatgtggctaaagcaatccagtaccgttatcgcgccgactggttgtcgagtccggaaaccaactggaagcctcaagacttaagtgaagtacgcttaaaaattagcgctttaaacacggagcttctaaaaaatatcgcctatgaacttaagaaaaataataacaaagcgcctcatggctgtagctatatgtggcctgttcagcatcctcaacttaaagaagctgacaagagggctttatgtgtaacattgaataaaatcaaattaaaacaatga

SEQ ID NO: 46606 - DNA, 183 bp, Acinetobacter baumannii
atgaaaatttgtattgtaggaccttctggcgctggaaaaacaacactcagtaagaaattagaaaaagagctaaatatctcagcttatgcatttgatggaatttactggaatttaagtggcactgtgtttataaaaaattctgaggaaattatttcttatggaattaaacaaatttctttttaa

SEQ ID NO: 46607 - DNA, 2238 bp, Acinetobacter baumannii
atgggaaataagataaaaagtaataaactttttactaggaagtctgaagcaaaaaatatcattccacttctatcacttggtggagccatctttctctcaaactcggcctttgcagcctcgccttctgagacaacagatgctgaaaaaaagcctgaagcactccctacaattacaatcaccgcttcacgtgcagatgaactttctacatctgccaaacaagtgacgaagctagatgaaaaacaaattgaacttttaagaaatggttcatctgggaatattgcaactgttttagctaaagccgtaccgggcctttccgactcaagccgaaccattaccgattatggtcaaactttacgaggccgtaatgccctcatcttggtcgatggtgttccaatgaacctgacacgtgacacatcaagaggtctttcagctatcgaccctgaaagtattgctaacattgaagtcattcgcggtagtaacgcaatttatggcggtggcgcttctggcggtattatttcaattaccacaaaagcggctggtggcgaacctacagctaaaacagtcgttggacttcaaacacctttaacaaatttccgttctaatgctttaagtggcgatattcatcaatatttcacaggcagctttaacgcttttgactatgcactcgactttggttatcagcgtattggtagcccgtacgatgcaagtggcgaccgtgttgctccagaaccaagtcagggcgatttatatgattctgacggctatagcatcggcggtaagcttggttatcatattgatgacaaccaatatgtccagtttgctgcaaactactataatgccgagcaagattcagattatgcatctgacccaagtgtgaagaatgcccctgccggaaccgtaccagccaaagccattaaaggcttaaagctcaaagaccaaaataaaaacgaaaaccagatctacaatttaacctataaccataaagacttttttggcaataaggttgatgctcaaatttattaccgcgacttctttacccgtttttcaccatttgatgcacgaaaaaatccgaatcggggtggaaacgtagaccagatctatcaagaaaataatgtactcggtagccgcttaactgtgactacaccacttgagtttttaggtgacacctcattggtttggggtggtgactttagccgcgaaaagagcgaaatgcctttagatatttttgatcaaaaaatttatgaccaatctggtggcttagagtttgtaaaaattggcaaacttatttatttacctgaactcaccacacaaagtattggtggttttttacagttaaagcatcgctttaatgaccaatggtcggcagaagctggtactcgttatgaagacagctatgcccaaattgatagctttgttccattatcacaattaggcaaaactaacccttacaccgttcagggcggaaaagtgaaagctgatgcatggttgtacaatgctaatgtgactttctctccaaatgaccaacactcgatttatgcatcgtttaaccaaggttttcaattacctgatgtaggtttgattattcgtaatgctggtgaaggttttaaccttggttcatcattcttagaacctgtaaaagtcgataattatgagttaggctggaaaggaaatttcaataatttttcttcaagcttagcggtcttccactctacttctgaccttggtgctgtacaatcattcaataatggtttagtcctcgctagaactaaagaaaaagtcactggtgttgaagcaacttttgactatctggacgatgccaatgtttggggaactggtggtagtgttacatggatgaaaggccgtgaaaaaccgcaaaacggtgctgagcaagacatgacaggcttccgtattccgccattaaaactcacaggttatatttcttatagcccaacagaaacttggacaaaccgtttacaagctacttacttcggttcagaagattaccgcctaaacggcaagaatagttttggtcgctacgatgtaaaatcttatacaacagcagatttaatcagtagctttgcacttaataaaaaagacaccatgacgattggtttagagaatatgtttaaccgcaagtactatcctctatatagccaattattaagaacaagcgataacactagccatttagtagcaaatggtgcaacgcttaaagtttcttatagccataagtggtaa

SEQ ID NO: 46608 - DNA, 744 bp, Acinetobacter baumannii
atgtttgatcattctttttcttttgattgccaagataaagttattcttgtggtagaagatgactacgatattggcgacattattgaaaattatttaaaacgtgaaggcatgagtgttattcgggccatgaatggaaagcaagcaattgaattgcacgctagccaacccatcgatttaatcttacttgatattaaattacccgaattaaacggttgggaagtgttaaataaaatacgccaaaaagctcagactcccgtgatcatgttgacggcgctagatcaagatattgataaagttatggcattacgcataggtgcagatgactttgtggtgaagccttttaacccaaatgaagtcatcgctagagttcaggcagtcttaagacgtactcagtttgcaaacaaagcaactaataagaataaaatctataaaaatattgaaattgataccgacactcatagcgtttatatacactctgagaataagaaaatcttgcttaatctgacgctaactgaatataagattatttcattcatgattgaccaacctcataaagtttttacgcgcggagaacttatgaatcactgcatgaatgatagcgatgcactagagcgaaccgtagatagccatgtaagtaagctgagaaaaaaactagaagaacaaggcatatttcaaatgttaattaatgtgcgtggcgtgggatataggctagataatcccctagctgtaaaagatgacgcctaa

SEQ ID NO: 46609 - DNA, 1074 bp, Acinetobacter baumannii
atgaaaagtaagttaggaattagtaagcaactttttattgccttaactattgtaaatttaagcgttacgctattttctgtagtactgggttatgtcatttataactatgcgattgaaaaaggctggattagtttaagctcatttcaacaagaagattggaccagttttcattttgtagactggatctggttagccactgttatcttttgcggctgtattatttcgttagtgattggcatgcgccttgcaaagcgttttattgtgccaattaacttcttagccgaagcagcaaaaaaaattagtcacggcgacctctctgctagagcttacgataaccgaattcactccgccgaaatgtcggagcttttatataaatttaatgatatggctcaaaagctagaggtttccgtcaaaaatgcgcaggtttggaatgcagccatcgcacatgagttaagaacgcctataacgatcttacaaggccgtttacaaggcatcatcgacggcgtttttaaacctgatgaagttctatttaaaagtcttttaaatcaagttgaaggtttatctcacttagtcgaagacttacggactttaagcttagtagagaaccagcaactccggttaaattatgaattgtttgactttaaggcggtagttgaaaaagttcttaaagcatttgaagatcgtttggatcaagctaagctagtaccagaacttgacctaacgtccactcctgtatattgcgaccgccgtcgtattgagcaagttttaattgctttaattgataatgctatacgctattcaaatgcaggcaaacttaaaatttcctcggaagtggtatcacaaaactggatattaaaaattgaggatgaaggccccggcattgcaaccgagttccaagacgatttatttaagcctttctttagattagaagaatcaaggaataaagaatttggcggcacaggtttaggtcttgctgttgtacatgcaattgttgtggcactgaaaagtactattcaatatagcaatcaaggctcgaaaagtattttcaccataaaaatttctatgaataactaa

SEQ ID NO: 46610 - DNA, 924 bp, Acinetobacter baumannii
atgatgaataaaaatttaaagaatgtgccacaaacgccactagatattcagtttgattcaaatggcgtgaaatgcagtgcctatttatatcgtcctacgaccgaggccgctactccaatgattgtgatggcgcatggtttgggtggtactcgaagaatgcgtttaacagcttttgcagaccgttttgtggcagagggttatgcttgtttagtgtttgattatcgctattttggggatagcgaaggtcaacctcgacaattactagatataaaaagtcagctcgaagactggaaagccgctattgcatatgctcgtagcctatcaaatattgataaaaacaagattattttatggggaagttctttttctggcggacatgtgttggctactgccgctcaggatgccaacatttgcgcagtagtttcacaatgtccatttaccgatggcctttcttctagtttagccatgagtcctataacttcagtaaaacttacggctttggctgtgcgtgaccgtataggggctgcgctgaataaagaaccacttatggttaaacttgcaggactagagcatgaaacggcgttaatgactgctccagatgcctattcgggaattatgtccataattaaagatgaacctaactacaaaaactacgtggcagcacggtttgcattggacattatccgttattatccgggacgtaagactccaaaaattaaagctccagttctattttgtatctgtgaaacggatactgttgctcctgcaaaagccacgctgcgtcatgccaagcgtacccctcataaagaaataaaaacctattcatacggtcattttgacatttacacaggtcaagcctttgaacatgtggtgaaagatcaaattgattttcttaaacgtactgttccagtagctcaagcttaa

SEQ ID NO: 46611 - DNA, 843 bp, Acinetobacter baumannii
atggcgaagtatgaattaaaagataaagttgtggtaattacaggctcaacgggtggcctaggtcttgcgattggtcaggcattacaggccaaaggtgcaaaactcgcactactagatttagacctgagcaaagttgaaagtcaggcaaaacagctaggtggaaaaagcattgccgcaggttgggtaaccgatgtccgttctttggaaagcctagaaactgctatggcaaatgcagctcaacacttcggtaaaattgatgtggtaattgcaaatgcaggcataggctcaacggaagcactagaacatatggctcctgaaacctttgagcgaaccatcgatattaacctgactggagtatttcgtactttccgcgcagctataccgtatgtaaaacaaactcaggggtatttactggcagtatcttcaatggcggctttcgtccactccccgttaaacactcactatacttcgagtaaagcaggcgtttgggctttatgtgatagccttcgtctagaattaaaatatttaaatataggcgttggtagccttcatccgaccttctttaagaccccaatgatggacagtattcaaaatgacccagcaggtaaagctgtgtggaaaggcaactcgggtatttggaaatatataactattgatgaagttgtctcgggtgtagttgaaagtatagaacggcgtaaagatatgactgttgtacctaaaataaataccccgattgcgaaagcacccgcattgtttagaaatgtgattgagtttctaggttttaatcgtaaacagcttaaacaaaccatgctcttggcagagaaaaagcatcattcattttag

SEQ ID NO: 46612 - DNA, 900 bp, Acinetobacter baumannii
atgaaagaaaatttaaatgatttacacacttttatggtcgttgctcaagaacggagctttacccgcgcagccgcaaaactcagaacttcacagtcagccattagtcaaacactccgtaatttagaagaccgaattggcataaaactattatcaagaacaacacgaagtgtggcacctacagaagcaggcgaatatctattaaatttgcttcaacctgcaatagaagaaatagaaaatggcataaatcaaattagtgctttaaaaaatgatccagcaggaacactacgtatcagtgccgatgaatatggaatacaaagtgttttatggccagcagttgaaaaagtcatacaacaatttccaaaaatttcagtagagatcatatctgattatggtcttgttgatattgtagaagggcgttttgatgcaggacttcgaagaggcggtttagtttctaaagacatgatcgctttacaggtgagtaagccaatacaaatgctaacggttgcaaccaaagagtttttagctcgttatggtcacccaaagcatccaaaagatctagtggaataccagtgtattaatttaagattacccacacatggtgaactctaccgttggcaatttaccaaacaaggtaagacacaaataattactgttaatgctaaaatcgtttttacaaccttatctccagtgcttcaagccgcaaggagcggtgtaggaatcgcttatctacctattgatatggttcagccttatattgaaagtggtgaactggaagaaacgttgaaggactggcgacacagttatgaaccttatcacctgtattatccccatagacgagaacaagcacctttattaaatatcttaattgatgcgttaaaagaaaattttaataaaaagtag

SEQ ID NO: 46613 - DNA, 927 bp, Acinetobacter baumannii
atgatgaaaactgtaactttcaaaaataaaaacatcgatgtttctgcaactattcgttttccaaaagattttgatgaaaacaaaacatatgcagccattgtatgtgcgcatccaattagtagctgtaaagaacaaactgccggcgcaatctatggtgaaaaactcactgaagctgggtttattactttagcatttgatgcatcgtatcaaggtgctagcggtggagaacctcgctttcttgaagaccctgcaacacgtgtagaagatttccgctgtgcagccgactatttaacaacgcttagttatgttgatgaaaaccgtattggtgtattaggcgtatgtggtggcggtggttatgctgttaatgctgctatgactgaacgccgttttaaagcagtcgcaactgtggttgcggcaaactatggccgtttaatgcgtgaaggtgaccaaacacctgaagctgccattaaaactttagaagccattgcagcacagcgtactgccgaagcgcgtggtgctgaaccatttattacccagtatattccaaactcacagcaagagcgtgaacaagctggaatcaatgatattgatatcaaagaagcgattgattactacaaaaccccgcgcggtcaggcagaaggttcaccaaataaacttcgcttttcaggtttagccgctgctgttgggttcgatgcatttcatttggcagaacacttgctcactcaacccttacaaattgtgattggtgatatagcgggtggattcggttcttatcgcgatggttatgagttatatagcaaagctgcttctaaagataagaacctttttgtggttaaaggcgctagccactatgacttatatgaccaacctgagtctgttgctcaagctttagaaaaaattattccgttctttcaaaaacatctttaa

SEQ ID NO: 46614 - DNA, 675 bp, Acinetobacter baumannii
atgaataaattattaacgattctattattaagtgccttggttgctgcatgtaataaccctaatagcacaaccaaaatcacccaagtgcagagtgaacaatctaataaccaaaaagaagcgttaaaatcacttgtggcagagttcaatgaaattatgaactctcttcagacagaagctgacattacatccacacaagcaaagttggaaaaacttttaaagaaatttccaaatgacaatgattcaagcatagaagtgcaaaagttgaaattaaaagtactactgcaactaggttatttaaatgaagccgatattttggcaacaaaaattcttgctttagatagcacagcaagcattcaagaaacccaatgtttaattcaaagaaaattacaaaagccaaccaaccaaattaatagctgttatgaaaaagcagctaagttatatcaggcacaatacgaaaaattaagtaatgataatccacaaaagcaatatgctctctggtcgagttacgctgccatgtaccaagctggtcatactgaatataagcaaaagttgaaagctattgttaatgctcaaaccactgaagatgagaaacatactttcaacactatgtatgaaaacgtagtggacccagctgttattaaagaaattcttgaatctatgccatataagaaataa

SEQ ID NO: 46615 - DNA, 141 bp, Acinetobacter baumannii
atgcataatttaggcaataaaaaagcccttcagagaattcttggcggaatcaaagggctttggattgctaacacaaggagtgttaacattgaacagtatggtacaagggtttgggaaaaatcaagtctacgatgccagtga

SEQ ID NO: 46616 - DNA, 876 bp, Acinetobacter baumannii
atggtttctattaaattaaaagataaaataaatgaaaatagtgaatttatttcaatgcggagaatatttgaagaaataagagaaaagacagatctcaaaaaggatttcgagatagctgagctgttaataccaatagctaaaaaatgtcatgcttataatcaatatcaattagataatggcaagcctatgcgcttatttgagaaaaatcctagtgatagaaataatgattttgactatacattattagaaatcgcgagaggggacttatatttagatgatagtagtatttttaataattatgctcttcaaaagtcagatttttattatgaatttgaggtttttttgagatcatgtgatttagaaagtttaaaatataatgatttggttaaagaggatgattttaattctatagacgacattaaactattattaaagaaaatttgtgatctagaaaatcttgtacgtgatcaagatttatttattgaagaattaaagaataagctagaagagtttaaccagctaacagatgaaatcaatgaaaaaagttcggggctggaatatataaattatggattaagcaatagaatgatgtggcttgaggacgagaagtccgatcttgaaataagaataaaagaattagaaagtagaacagacatgcatccagctttagatccgaaaaataagcatcatgctccagagttacttctggctatacatgcatgggagtcaaaatatattcacaagcaatatccacatcaagaacatagcccagcaataaaagcttttttatctaaatctggttttacagttaaaagattacaagacagaattgcagcaatcactaatcctaaaaatattaataaatcaaaatcttaa

SEQ ID NO: 46617 - DNA, 591 bp, Acinetobacter baumannii
atgaaaacaaaagtggatctaatatgtgaaatgatagttctttatggaattattcttattgtatgtatctttatatatctgatatttcaatcattagttagcttaaacttatttgataaaccttctgattggtcatcagttttgacaggattactctcatggtcagcaaccatctatactcccattgtagcctacttgttgtttactgattggcgtgaacaagaacataaaaaattgatacgtgatcaagcaatagagtctattaaaaatttacaaagatatataacaattaaccttcatctatctcataaagaagaaataacagtcaatgaattcgaagaattacaatcagtatattatgcagcttacctctcagtgaatatgcttcataagcttacaaaaagtgaggattttctagtgtatcaagaaaaaatacagggatcttttaagacagtattgagttacagagaattgattatgagtggagaagttgattttcttgtaggtaaagaaattattaggtcggctgtaaattccacttcaactatatacaataaaataagtgattacatggatataaataaaatttaa

SEQ ID NO: 46618 - DNA, 306 bp, Acinetobacter baumannii
atggttgaagttgagcttaagtttcagttacctgaatcgaagaaaaaaactgtccagcaatatttaaaaaaacataaagcacagcatattcatctacaggccaagtattacgatacaccagatcgcctacttgcaaaaaatggtatggccttacgcttacgcaaagaaaatgatctgtgggtacaaacctttaaagctgccggccaaagtcatttacatcgtgtcgaagaagaagtttttttaggaaaatgcgatcaagaacctgacttaaactttgagttctctgtacacgacaaaaatagataa

SEQ ID NO: 46619 - DNA, 2637 bp, Acinetobacter baumannii
atgacatctgctgaaattcgtgaagcatttttgcgctactttgaaacgcaagggcatacacgtgttgcatcgagttctcttgttcctgccaacgacccaactttattatttacaaatgctgggatgaaccagtttaaagactgttttttaggtcttgaaaaacgtgattatgtacgtgcaacaacatcacaaaaatgtgtacgtgcaggcggtaaacataacgatttagataatgttggttatacagctcgtcaccatacattctttgaaatgttgggtaacttctcatttggtgactatttcaaacgtgatgctctcaagttcgcatgggaatttttaactagcgaacaatggcttgctttaccgaaagataaactttatgtcacggtttaccatactgatgacgaagcttatgacatctggaataaagaaatcggcctagcaccagaacgtattatccgtattggtgataacaaaggcgaaaaatacgcatcagataacttctgggcaatgggtgatacaggcccttgcggtccatgttcagaaattttcttcgaccacggtgaacacatttggggtggtttacctggttcacctgaagaagacggtgaccgtttcattgaaatctggaacaacgttttcatgcagtttaaccgtactgctgatggcgtacttcacccactccctgctccatctgtagataccggtatgggcttagagcgtatttctgccgtattgcaacatgttaattcaaactatgacattgacctgttccaacacttattaaaagctgctgcaaacatcattggtattgaagatgaaggtcagccttctttacgtgtagttgcagaccatgcacgttcttgctgcttcttaattgctgatggtgtaaacccaagtaatgaaggacgtggttatgtattacgtcgtattatccgccgtgctgtccgtcacggtaacaagcttggcgcaacaggtacgttcttctacaaaatgttgcaaccattaattgaagtaatgggacaggcttatcctgagttagaagctcgccgtgaagtcattgaagcaacattaattcgtgaagaagaacagtttgctaaaaccttagagcaaggtttaaaacttcttgaaggtgaacttgctcagttaaaagataaaactattccgggtgcgactgtatttaaactttacgacacttatggtttcccaacagatttaactgctgatattgcacgtgaacgtggctttattattgatgaagcaggttttgaagttgaaatggctgcacagcgtcaacgtgcgcgtgatgctggtaaatttgctgttgactataacaacattgtaaaagttgaaggcgaaactcaattcgacggttataccaacacaaccggtcaaggccagattgtagcgatctataaagatggcgtacaagttgatgaagtttctgaaggtgacgaagcacttatcgttttaaaccaaactcctttctatgctgaaagcggtggtcagattggtgatactggtatcttcaaaaacgaaacaggtatttttgaagttcaggatacgaaaaagtctggtggtgcctttgttcatcaaggtattgtgactgttggtaaccttaaaaccagtcaaaatgtagaagcgattgttaaggcagacattcgtgaagctactgcgcgtaaccactcagcaactcacttgttgcatgctgcccttcgtcaaattttaggttcacatgtacaacaaaaaggctctttggttgcaagtgatatcttacgttttgactttgcaaatgaccaacctgtgtcatttgaacaactacaacaagttgaacgtctcgtaaatgctgaaatcattgcaaatactgctgtaacaactgaactactcgacattgaaactgcgaaagcaaaaggcgcaatgatgttgttcggtgaaaaatacggtgatgaagttcgtgtgctctctatgggctcagtcattgacgagaaaaacttctcaatcgaactttgtggcggtattcacgtaaaacgtacaggtgatattggtttattcaaaatcacttctgaaggtggcgtagctgcaggcgtacgtcgtattgaagcagtgaccggtactaaagcattagaagtagtacaaaaagctgatcatgatatccagcacattaatagcttattaaaagcacagaaagaccaaacggttgagcgtgtacaagccaatgtagaattggtttctgcattacaaaagcagattgaacaactcaaccaaaaattggcaaacttccaagcggctgatttgattgaccaagttcaaactattgctggtcgtcaaacgcttattactactgttcagggtgttgatgccaaagcgcttcgcaacttacatgacagtgtaaaatcaaaattagagaacgcagtgattgtgttagcaggtgtagagggtgacaaagtcagcctgcttgcatcagtcgcgtcgcaatacactgcaaatctaaaagcaggtgacatcatcaaacatttagcgaccgagttaggtggtaaaggtggtggtaaacctgacttagcacaaggtggcgcgccacttaacgagaagtttggacaagttatggcagcattacctgcttggcttgaacaaaaataa

SEQ ID NO: 46620 - DNA, 351 bp, Acinetobacter baumannii
atgagcaattttgtttttaagcgtggtgacactttcaacttaaatctgcagctagttgatatggatgaagcgctgcaatatccagccaatgatgtacgtcgagcaatcgatttaacggggtatacctttacttcgcaagttaaaactctggatggaaccgccgttgcaactttcacttgtacagctttaaaccagagtacacaaaaggggtggctaaatgttaagtccggagcaagtactgcagcgtggcctttgggtctgtgtcagatggatatcaaagctgtggtgagcggtactactcagcatacagaaactttgacttttcaggtaattgacggggtgactgcataa

SEQ ID NO: 46621 - DNA, 219 bp, Acinetobacter baumannii
atgtcatgtatgctgactttagaagaaatcgaaattaaacggcaagagctggaacgacatcttgaagatgttatggctgttgaactgaagaagtggcaaagcgaaaataagctttgtgtttccgatgtgaatatacgtttggccaatgtgaatagtcttggtggaactaaacataatgtagttactggagtaagtgttgatttagattacaaaccttaa

SEQ ID NO: 46622 - DNA, 444 bp, Acinetobacter baumannii
atggcctcacttttaattttatttctcaaaagtacggtggctaaaatggcaatgactttagagcagacaaggcaagctattatcgatcgtatgcaaagctttacaggtattacgcaagacagaatccagtatccaaatttaccaggctttaatgtacctaaagatggtgtttggtgccgcttaacgattgcaggtggtcccagttttacttctggcattgcagataagccatgtacacgccgtaccggtaatatcatgattcaatgctttgcacgtcccaattcaggaataatcgaaatcacaaaattgagtgatgcattacttgctcattttgaatattactcaatcgatcatctagaatgtttgaatggcgaatccatctatgcgggtaaagatgctgatttcattcagtataatgtgagcattgggtttaaggtgaattga

SEQ ID NO: 46623 - DNA, 369 bp, Acinetobacter baumannii
atggggtggaaggggaaaaagccgactagttttagtcttgatgtgtctaaagcagcagaagaccatgtaaagaatattgtcatggataccgtgcaatccttagttaatttaagtccggttgatactggtgcataccgtgcttcacatattgtttcggttggagccgctgattacggtgtacgtgaacctgaaacgaatcctattaatgatgcagcgattcaggcaatgaagattaagttaggcaatttagtttatatccaaaacaataaagcttatggaccgcgcttagaaaacggctggtctgatcaagcaccacaaggtatttatggcctcacttttaattttatttctcaaaagtacggtggctaa

SEQ ID NO: 46624 - DNA, 792 bp, Acinetobacter baumannii
atgtcattgccatttattgttgattcacttgatgcaatcaaagaagaacaccgagctttatatgtcgaggaaaacgggaagtttcgccttgatctagaaggctatgaagatccaaaaggtttgaaatctgcacttcaaagcgagcgtgaggctgcaagaactgcaaatcgacaacttcaggaacttcaaaaacaatttgagggaattgatcctgaaattgttaagaaagtctttgcccaacttgaccaagatgaagaggccaaattaatcgcagacggcaaagttaatgaagtgattcaaaagcgcaccgagaagatgcgtgaagaacatgaaaagttactgaaagccgaaaaagaacgtgctgataaagccgaaacttatgctcaaaagttcaagcaatcagtgattcaaagccaaattgtgcaggctgcaattgaacttgaagcattgccagaagcgacccctgatatcgcctttttagctcagtcaaaatttgcattagatgaaaacggcaaagctgtggcagttgatgaaaacggggaagtagtcattggtaaagacggccagacaccgatgaccccaaaagaatgggttgaatctctacgcgagcaaaaaccgtattactggcctaaaccaaatggtatgggcgcaccaggtagtaacaattcaaaaggtcagccagacattctcaaagcagatggctcggtaaatatgaccaaattggcgcaattacgaaatgaaaacccgcaactagctaaagagctagcggcaaaacacggtattaaactttaa

SEQ ID NO: 46625 - DNA, 1344 bp, Acinetobacter baumannii
atggcagttactgataaacatccgcagtatattgctgcacaaaaaagttggttaattatgcgagacgccgttgctggtgaagagcagattaaacaggcacaaactaagtacctagctaaatcggccggaatgattgaggctgaaaagcaaggtgatacgactggagagatttataaggcctatctaagtcgagctcagtatccgctatgggttcaggacgcattacgcacaatgatcgggttagtttcaaagcttgagccgaatattgtgattgaaagttctctacttaaaggattgatagagaatgcaacaaatgacggttttgggcttaaacagctctttattcgcatttgttcagagttgctagagtttgggcgctgtgggctgcttgttgatgttgatgctaaaggagtgccatatttcgccttatatgatgcgttatctattatcaactggaaggaaaacagtatcggtggtcgaaaggatttaaaactgttagtgctcgaggagcaatttgataatagtgaagatgaattcgggcacgaaactaaaacggttcaccgcgttctatctatggatgatggagcattagcggtccgattgttcgatggttcaaatgtggaggataaaactcccgatctcggcggtaatcaactttctttcacaccatttgttttctgcggtgccactagtaattctccggatgtaggtaccataccgcttttgacaatggccaaggctgctctgaagtattaccagctcagtgcagattattaccagtctcttcaccatacggcccatccgcaaccttggattagtggccttgatgatgacgatgatgatattagcgttactggtgttatggctgtctggagtcttcctccaaattcacaatgtggttatttggaaatttcaggtagcggcattgaactcactaaaaaggaaatggatgcgcagaaaaatgcagcattagaggctggtgccaaagtagttgataccaatacacaagaatcaggtgaagcgcgccgtgcacggcaagacgatcagcaagcaagtcttcacagtatcgtgatgtgtgcagctgcagcaattgaacaagccattaagtatgcagcgcagtggttaaagcttgattcgacaaaatattcatttacagttgaacctgagtttattgtgcaggtcacggatattaatcttgcaaaacagctttatgagggtgctatttcagggaaaaactctttccgcacatattgggaatacctgatgacaggtaaattaccagctcacgactatcaggaagaagtgaagcgggtagaaatagagcgtgataacactcctttgtag

SEQ ID NO: 46626 - DNA, 408 bp, Acinetobacter baumannii
atggtgttaggccagtgcgaaaaagtcatgttcaatgttggtggctggcgcaaagctagacaagagcaacagatgcgagactggttcggctttgttccaacttacttaatcactattgatgctacattttgcgacaaagcaaatgatcgtgagttttgtgctttgcttgagcatgagctttaccatataggcgcagaacgtgatgaaaacggtgagatgatctttagtagttcaacagggttaccaaaacattatttagctggtcacgatgtcgaagagtttattggtgtaactaaacggtggggagcaagtaagagcgttaaacgtcttgttgaggttgcgaagaatccgccgtttgtttcaaatctagatatttcaaaatgctgcggaaactgcgtaatcaactga

SEQ ID NO: 46627 - DNA, 390 bp, Acinetobacter baumannii
atggaaccagtttctactagcggttttacagcattattaaaattttatgggtttgcaattgtggtggctttggctgcgagcttggttgtagcagttgtattaatgacacgtatgccgcgttcaccacaagagtgggctgtaggtttaatctgtacggttgtatcaagtttggcaggtggttcattcattattgtgaagtgggggcttcatgaatgggttactgatatatgggggatgattgcacttggtggattcttctttgtttgtggtttacccggttgggctttagtccgctggatatttaactttattaacaaacaggaaggtaagacgattattgaagtacttaaagaagttaagaaagccaaaaacgatattacgaacagttaa

SEQ ID NO: 46628 - DNA, 3426 bp, Acinetobacter baumannii
atgattaaagttatttataaaaaagacgctttgtctgaagaaaagacaattgaacaggctcaaaccattggacaatggctcacttcaaaatatgaacatatgcctgaacatgtgcgtatctttcatactacaagcaatatggatcatgccgaaatttcatttgcgaatgaagtcacaccaaagaatgcatatgacttaaagcagcttgatttcttaccgggcacttttatcgtagttgagaaccctaaatgggtcgcggctattgtttcgattgtgattagtattgcgatcgcatttttaatgccaacgccatcaatagcacaaacgactcaaaatactaaccagtcttcttcagcaaacaatgaactttctaaccgggaaaacaagatccgggtgaatggtcgtattgctgataactatggagctgggtggaatactcccgacctaatcgcagtaccttacaaggtatatgaaaacaacgttgaagttgagcatgtagtgggctgtattgggcgtggacactataaaatcaatggagcttatgacggtgaaaccaatattgtcgatattgctggcgcatcggtagaagtctttcgaccaggtgtagatattgtttcaggtgagccatatttctcgcttggtaccgaaattaccacgccgccactaacggttcagcatcaaacttctgttaatggccaagttttacgtcctgctgatacacaatctttagaaggtacgaactaccttcattttgcatatccaaacgagattcttcgggcaacggcaaacaacacagatttaaccactaagtttgtaagtaatgaccgcgtagaaatcaccaatgcctcattcacgtttaatggccagacttttgatttaaatggtacttatagcgttctatcggtagctgatgaccgtatgacgttatcaaatccggcggccgttaatgctaactggttaaagcttaaagagttaaataaccaacaaactgcagctttgtcaccaaagatcagttcaataggtgaaaaatggattggtccattcattctggacaatgttgaacgtagccgggtgctgtgtaattttgtggccaccaatggactttataccgtttcttcaggtgggaatcaggccgctgttaatgtcacgattgaagttgaagtaacaccggtaaatgaatctggtgcagcgattggtaatccgatgctgaagcagatcattttgaaaggttcggcaaagtcacgtcagaccgttggtgcaacacttgatatggtcacgtttcaggggcgttgtagtgtccgtgcacgccgtttaactccgactccgacagtcacaacagttgttgatgaagtaaagtggcaggcgctttacggtgcttatcctttacaaagcacagtgtatgaacatgaaacggtttttcgtgcgcgtacttatgcaaccactggagctttatctgttaagtcccgcaagatcaattttgatcttcagcgaatgttgccgacttataaaaacggggcaatgacaacagagctatatccaacgtctagctttgctgatgctttggtatctatggcactcgatgacaagattggccgccgttcgatcgatgagattgatcttgaaaacatctatcggacctataatgatgtagttgattattttggtacgccgctagcggctgagttctgtactaccattgatgatacgaatctatcttttgaagagctggttaccaatctttgtgatgcggtgttttgtactgcatatcggcaaaacaataagctcaagctttattttgaacggccaactgataactcggtaatgctgtttaacttcaggaatatcattccggatagttacaagcatgacctgacctttggcgtgatggatgactacgacggactgatctatgaatacacggatccgaccgacgatagccgtatcaatatctatttaccggataaaggagccaaaaacccaaaagaggtgaaatctgttggtgtacgaaacaagtggcaagcgcatttcaatgcataccggatttggaacaagatgcgcttccagcgcaaatccattacctttgatgcggcaccagaatcagaattactggttttacgtgaccggattgctgtagcggattatcgcaatggtattcatcaaagcggcgaggtggtacagcaagaaggtttaattctcaccctaagccatgatgtcgatttcattgcaggcaagagttatgtgatttatttgcaaatgggggatggtaccgtggacctgattcccgttacgccgggttcagccaagaacaaagtagttttagggcgtttaccgaacggggccttaaagcttagtcccgatgactttgtgaatactatctacaccgtagttaatgacgatactaaaggctcattgccttatctggttgcaaaaagagaacctgctgaccagttctctaataccattacggcaattaattacgatgaacgttattacctcaatgacaaggactttattgatgtgccagtagatgattcaccgatttacattcgatatgaccagctggatataaatctggtgcgtttgtatcagatgcaaagaggtgatttaccaacgactggcgaaatcagttttgtagttgaagcaggtgcactggtttcaagttcaagttcttatcgaccggaaaccagatttgtctataaattcgactataactctagtcctgcaaaacgagagtatatcgttccagctgcctcagaattaccggcgatagatacaggggagttcccgcccgatctggtggtaaatctgacgattaaaggtgctgttgttggacgtggtggtgatggaggattgccacatttggcatttggtgcatggtctaccgatccggattataactttaccaaaacccgccgtgatgggtatcagggagcacccggtttgttgaaccggcacagtaaactaaatctgattattgatggtggaactctggctcgaggcggatctggtggcggcgcaacaccaagcggtatttacactgagttaacatatggagtccaaggtatacccggtggagctggtgcaccatttggacgggtcatgacgggacagcccatttcaaatgactcgcaagactggcgttggtacttaaatggtgactttatggttgtcaaagtaaccgatgctgaagctgcagtgcccggtaaaggttaccgaacccaaaatgaccgttatggatctccattatcaggggatggcggaaactggggcgaacgtggtaccaagtctaccaatgatggaacatggaactggaaataccatggcacaactgaaggtcagccgggaccgggtggacctgcaattgttggggtggcacctctaacaactcaattgattaacggagggaaaatcttacaaaccctttaa

SEQ ID NO: 46629 - DNA, 507 bp, Acinetobacter baumannii
atggataacgaatatgccaaattctttttcaatcggaaagttgatgtctatcaattggagtgtattgagctttctcatccttcttttatgaatacataccgaatagtccgtaatgatgaccgaggtgtttatgttcaacataaggagggatccggtcaggtctattatgaatttttgccagcatctattcaaagatccggaatgctgggtgatctggaccagacattaacagtctctatatctggtttaggtgatgtaatgccggatgagtttgaacgggtaatcgaaggccaatatcccgatgtaaagccaacagtaaattaccggatttacagttcagacaatctgaattctccaatgttttatttactcggactacaactctcaagtgtcgccatgaaccataaagctgtgacattcaaggctgaatcaccacgattaaataccactaaaactggggacatttttgcactggatcgctttagtggtttgaagggggctatatga

SEQ ID NO: 46630 - DNA, 708 bp, Acinetobacter baumannii
atgaatgcaaaatttcaactcattaaagacattaattataaacccaaagactcacaacttggagtcataattaaaaaggtaacatcagaacaaaatcatactggttttgtatttattgaagataataaattagtactagctcattttggctggcatgaaacctatttttttcaaagacgtaatgactctgacggttatgctatgtactggtttgatttagaaaaaattccagaaagaactcttgtacatataattaatgaacttgaacaaatttctcataataaagatttgaataataatgaagttttctattttcctgctccttatggaatcgtaaattttggtggatctaggatctcaggaggtgattttctaagtacccctaatacggtaggtgatagccttacatgttcagtttttgttaattgtatatttgaacaatccggttttccaatcctagatttagatacctggaaaacaacagagcaggacattgaatggcaaactagtattcttgataaattaattggaaaattgagtccagagtttatgcggatacagcgtgaaaatgtaggtaaagttccgcggttacgtccagaacaaatggttggagcatgttgtgtttttgattatgagctagttgattttgatacagcagatagtgcagcaataattgttttagagcaattagaagcgctaggttgttaa

SEQ ID NO: 46631 - DNA, 645 bp, Acinetobacter baumannii
atgttagttgatacctattcaagctcattaagtttaccttctttttcgagtaatacactaaattctataaatcgtagtacaactgtagtttctaattataatggagttgctaatcgcgtaaataaaagcgttgaaaatttcattgatcatactgaatcaatgcgtgttttttttaaaagctttctaaataatcaatcagattttcttgcgttttttttatgcttatgtgtcattggttcttttcaatcatatgatcttagacttgatagtaaagataatattatttcacctgagatatttaaagattctaaaaatagtttctggtgggataaaaaacattattttgaaatatataaattagaagcaactaatagaggaagagaggcttctgcatatatgacagtattaatgcatcaagctgtacaagttgaagaccttaagtttttaaataatttttttcaagagttaaataaaagtagtttaacttcatggtctctcatagctttattacgctcaacaaatgtttataaaaatcaaatttcattgtggaaagaaatgtatttatatactcagaacgttgttataaatgagggattaaacccaaaacgtgagatgtatggcttagatcgcggtttaaatatataa

SEQ ID NO: 46632 - DNA, 732 bp, Acinetobacter baumannii
atgactgaatttaaatggcaaattgatagtatccgtactgtattattctttaacggagaaattaattttaagaaaaaagaatggtcgaaaaatataactgggcttgaaatttctaatgaaatgacccaatcggaagaaaatggacgtttgattcaatatgttgaaattactaatcttgatagtaataagcaatttaatttggtttatttaaaagatcaaagcttaattgatttacaattagtatttgaaagagatgaaaatttttatactttcaatgaaataatcaaagaggtagattttttttacgaaaaaattagcgtattttttgatcagctcaatgaaaagattattcgtattggtaatgttgttgagcttagtatacctgttgataatgaaaaaataggttgtgatttgttaagaagtaatgtttcttatttaaataacatgcaggaggatttagaagaaattagttatagaactaataaatcatattttattgacaatattaaaattaatcaggttgttcagtattctaatggtcagaaaatgtcattggtgattgatcctaatataggaattcccaaggctaaagtgcaaaaaaatattctaatgaatatagatgttaatacagatgcttctcatagatctgaattagatttcttaaaattcattccattattacaagattcagtaaaaaaattaataagaaatggaggtacttatgttagttga

SEQ ID NO: 46633 - DNA, 4146 bp, Acinetobacter baumannii
atggctggtttattaacagtaggttcagccatttcaaagatggatacatatactggattacaaaatcgccttaagttagtcactaacaatcaagttgaactaaataaagcaacggaagacactttccgaattgctcaaaaaacctattcagcttgggattctgtgttacaggtttaccagcgttttagtgataatgccaaaactttaaacctcacaatggatgacacagcacgtttaactgaaacagtttctaaagctgtagcaattagtggtgcaagcgcagaagctgctgatgcagctttagttcagttcgggcaggccttggctagtggaacgttgcgtggagaagaacttaattctgtaatggagcaaaccccagcactagcaaaggctattgctaaaggtatgggtattactgtaggtgaattacgttcagtagcagctgaaggaaaaattacttcacaagaaattgtaaaagcgcttagaaatgtagaatctgatgttgatgctctttttgctaaaacagatatcacaatcgggcagtctctcacactcctaaacaacgagatcacaaaatttgttggcgaagcaggtaagggaagtggtgcggcacaggtattagctggatcagttcaaactcttgcaagtaatttagatttaattgctgatggggctttagtagttggtattggatatatcactcgtgcaattttgatgaagagcgctgctattaaagagggaatggcttcaactttagcgagccgccaagcatctgtattaaatgctcaagcagaatatgcagaagctaccgctgctttgaatgcagcaaaagctcatctcgcgaatgtgcgagcaacaaatgcagaaacccaagctaaatttggcgcaacagcggcagcaactcgatacgcacaagcacaggcagcagtaactgctgctacaaatgcacaaacagcagctcaaattaagctaaatactgcaacttcaattgcagggagactagctaaaggggcgtttggattaattggtgggtgggctggagttgcaacattaggagtaatgggattagcggcagcctattcttattttaataataaggcagaggaggcaaagcaaaagcttgctgaacaagctaaagttgctgagaaagctgatgaggagttaaaaaaattaactggcaatgataaggctaaagcagttaatgatttaactactgcttttaatgcacaaaataaagcattagagaaatcatcgcgtgctgtagggtctgcattaattgatatcgagaactatgcacgaggaaatagggaggttgaaaaaatttcccaagaagcgagaactggaactatcagctatacagaagccattgaacgtctaaataaaattaagttgcctacagatctatatgaaaatctgaaaaaacaggctgcgcagtatgatgacaatgcatctaaagcaagtttatcagctgagaaacttaaattattaagagttgaggtgaaacttggaggtaatgaagcacaaaatgcggcaattcagcatcaaaaacaagcggatgctttaggaaatactgctactgaagcagaaaaggcaactaaggctttgcaagattatcaagccaagcaaaaagatagcgttattgattcaatctataaatcaggttggcttgataaaggttacactgttgctcaagctaatgccattttagaactgcaaaaagctaaaggaatgagtgcaattttgtctaaagatgaaattgatagcgcacttagaaatctcaagatcatcgaagaacaacaggagcgagaagataaattaactgaagctaaaagaaagcagacgcaggaaattgaaaaacaagcaaaacttactaaacgcttggtcggtatttccggtcaatccggtattggcactggtccacatcttgacgtccgatatggtggttcaatgtcgggacagaaagtttctaatgaacatctggcacgtttgcaggcaggtggtaaacctttaacttcctacaagatcagttctaattatggtccacggaaagcccctactaaaggggcttcttcatttcataagggtattgatttttcaatgcctgaaggaacaccaatcacgaccaatgttgctgtgaaagatatcaagacatggtatgacagcaagggaggtggttatgtcagtgaagtgatctttgaggatggagtgtctcttaagcttctacatcaatctcccaagatgcagagcaaggtgaaaggcggtgcgagtaagggcagtgataaggcagctggtgacattcagtctcaactagaacgtcaactagatgctcagcgttcactagaaaatgaagtagccactgaagttcagcgcatccagaataatttacaagttagattggaagatgttgataaggctgggttctcaccagaacgaacagctgaaattaaggcagaattacagcgccgtgctgataatgatgtggctattgccaaacaagcaattagaagcaaactggaagactataaggagttccagaaaaccgaggagcagttacttgaggagagctttaaccgtaaaaagttcaatgcagctcatgacattgaattaagtaagtctgagcagaagcaagccgttgaattgctggaacagcaaaaacagcaagagttagggttattaaaactagctcaggaacagcgtttatttcaggcacgtttatcattgctttctgaaacccaagccatgcaggagaggtacagactcgaacgggaggaaattcttaagaataccaagctttctatagaagagcggcaaaagctaatcgcattatctaaagccaatcaggataaagagacacgcgataaagtgaataatgctgctcaaaactggggtaatatccaagccgatatgaatggtaccggagaatttttcagacaggatcaggaacgatttagccgtttaaatgctgcaaatgatttagcagatagtcaatttgctgctaccgacctgaatgagcaaaactctttagatggtttgaatgctcaattcgaagctggactaattaagcagcaggattacgaaaaccagaaaacagctatcattcaagctgctcaagatcaacgtaatcagattgctgctgaatatgcaaagaatgctcaggatattgaagataagtatcaacaagatcgcttgaacactcaaattgcatttggtggccaaatgatgggttcactcacatcgatgtttggttcaatgtttggcgagcaatcaaaagcatacaagatcatgtttgctgctgataaagcttatgccattgcagctgcaggtatttctattcagcaaagtattgcaaaggcggctagtgttggttttccagcaaatatcccattaattgcaagtgctattgcacaaggtgcaagcatcattgcaaacatccgggcaatcaaagatcaaggctttgctgaaggtggctacactggtcgaggtgggaaatatgaagttgctggagctgtgcacaaaggcgagattgtatggtcccaagaagacattaaacgttggggtggtgttggtttagttgagagaatgcgtaagagtgcaaaccctgaagcttttctcaataacaatgcttcagctgatagtgtcatgcgccgtgcaatgatgagctctaatgcctttatagaaagccaaaagcaatctgatatctttaatcaaccggttcaagatactcagattatttataagggtaatagagacacacctaagttagcttcttcggcaaattctgacctgttccatgacggtaaagtctatttctcatccaatggtttagttctggatcgctcaaatctggatgatgttcaggactttacttcaggacgtgcttcacgccctcaagctgagattaagccttcaattgagccagcttcatcgataatcaatttcaaaattgaagtgattaatcaggtgagtggggcgacagttgaagccgaacaactggatgagcaaacagtccggatcattgttaaagatgaaatggataagcagcttccaagaacggtaccgaagcttgtaagtgatcaaattggtaatccaaactcaactattagtcgatctttgactgagaataccactgtaaggcgtaaccgttaa

SEQ ID NO: 46634 - DNA, 1452 bp, Acinetobacter baumannii
atgaatacattacgtttaactactcttgcattaggtttgatggtttcaggcatagctgcggctcaaacttatgtggttgaccgttatcaagacgatagcaataaaggctctttacgctgggcaattgaacaagccaatgcaaacccaagcgaagctagcgatatcttgattcaagcagtaggcaaagcgccttatgcgattaaattaaacagcgcacttcctgaaattaaagcacccgtcaaaatcattggtactcagtgggataaaactggcgaatacatcgcaattgatggttcaaactatgttaaaggcgaaggtgcaaaagcttgtccaggtgcaaaccctgagcagtacggcaccaatgtacgtactatgactttaccgggtttagttttacgcgatgtaaataatgtcactttaaaaggtttagacattcatcgtttctgtattggggtattgattaaccgctcgagcaataacctgattcaacacaaccgtattagtaataactacggtggtgcaggtgttatgttgacgggtgatgatggtaaaggtaatccaaccgcaactacgactaataataacaaagttttagacaacattttccaagacaatggtgatggcttagaactgacacgtggtgcagcatttaacttaattgcgaataaccattttgtttcaacaaaagcaaatcctgaaccatcacaaggtattgaaattttgtggggtaatgacaatgccgtagttggtaataaattcgaaaactattcagatggtttacagattaactggggcaaacgtaactatatcgcctacaacgaaatgaccaataactcgattggcttcaacatgacgggtgatggcaacattcttgatagcaataaagtacatggtaaccgtattggtgtagccattcgttctgaaaaagatgcaaatgcaagaattacattgactaaaaacctgatttgggacaatggtaaagatattaaacgttgtgaagcaggtggttcatgtgtaccagatcagcgtttaggggcaattgtatttggagtacctgcacttgagcatgcaggatttgtaggttctcgtggtggtggtgtggttgtcgacccatctaaacaacaaaaaacatgtactcagccaaatcaacaggactgtaatgctcagccgaatcagggtattaaagctcctaagttaacagcgaataaaggttcagttacagtagaagttaatggcttaccaaatcaacgctatcaagttgagttttttggcaaccaaaatgcagcatcaaaagaagctgagcaatatttaggaacaataactgttgctacagatgcacaaggggtcgcaaaagcgaattggaagccgtctgtaaaagttgcctcaattacagcaaatgtgactgatcgctttggtgctacatctgagctcgggtttgtgcaagttaaataa

SEQ ID NO: 46635 - DNA, 195 bp, Acinetobacter baumannii
atggccgaagttaaagtatttaatgctttggatattgaattagctcaaaaaacccaagacatcgtcaatgcgcaacgttttaacaaccgtcctgctttcaaaacattaaatctaggctgggatttagagactgggtcggtagcagtaaattacacatttgtagaagaaccaccagttaatgatcagcctgcttaa

SEQ ID NO: 46636 - DNA, 9492 bp, Acinetobacter baumannii
ttggatgaagccaatcaacgtatcgatcagtctattcaagctaatgaagcattggttgctgatgctcaacaacgtgcaattcgtgctgagaaagaactcgatgataaaatcggttttattaaaagtgaaacagattcaatcattgctgatgtaagaagtgattcaaatgaaattcggttagtcgcagaaaacgcaaaaaaaattgcggatcaagaagttctggaccgtaaaaaacaagcagctgacacactaaatgttattgatcaaactaaggccgccttaaaacaagacattgatcaaaacttagttaaagctggtcaaatgattgatgacgctaaattagcattaggtgaagaaactaatacactcattaatcaaaaaattgaaccggttgtaacccaaactgaagctgcagttaaaaaagttgatcaagttgcagcccagtatgttgaccttgataagaaagtcgattcgggttttctagctgaagctgaagcacgtgcaaatgataaagaggcattaacaaaaagttttgagcttaagtttgctgaaatgcaaactgaattgggtaaatcaaatgccctaatttcagaagaaataaaaacccttgctgctcaagatagagcttttactgaacaaattagtactgcccagtctcaaattggtgataacaaagcggcaattaataatgttgaacgtacagtagttgatcttggtaaatctgttgctgaaaagactgatcaaattcaagcaagtttagataccactaatgcaagcttgttaaatgctactgagttagcgcgaatgcaatcacttggtaagcctttacgtgacgatcctacatttctatctgggaatggggggttaagcgcatatgttgtaccttcaggttcaacgtttactagacaagctaaatctactgataacccagtaaatagtacccatgagatgctattaagatccactgtttctctaggtggtggctggtatccgactgttccaactcttgttgctgctcctaataaaacgtttttaataaaacaaattattaaaatgcctatgggcacttatttattaccagttggcaatgctacaggtacaggtggttatttacgtgtacttgggaataaggaaggaacaggtaagtttgaggtttattactctgttgttcagtgtggctatgatgcgcctgcagctatccatgggcatttccgtgttattgctggcactaatccacctttaccaagcacagcaaacccagtggatgtaatccttgccgattatgaagtctgggacattactgcacttaatgacaccattccaaaagcatggcgtgatcaaattactggaaatgcttcatatatcgaaaaggttgaatcatctgtaaaacttgttgatgaaaagcttgtttcagaagcaaaaaaacttgaagaactaaaaaccgactataattcgaataaaactaaaacaacgtcagatttagcaacaattgctcaatcagtttctgatggtgataaagccttatctttacgcatcgaccaaacgaaagcagctctagaagaggctgatcggaaatctaatgcaaatattctagaagttactgagtcgctcgccgaatttgaacagtctactacttcaaaatttagtgaacttgatacaagtatctctaaagaaaacttaaaggtacaaggtcaaattactgatgttcaaaaaagtgtttcgaccttagaaagtaatacaaatacaagaataaatggcctttcatcatcacttaaaactactgatgatattgctaaacttgctttcgataatgcagcagaagcgcagcaaacaggtacaacggcggtaaaagctacagaagcactttctcaaaatttattaagcctaaagtctcaaactcaagtaacgtcaggggttcgtgcagtcgtaacgtcaaaaggtattgacgactggacacagtggcgtaccacaggtgaagcgaaagtaattcaagatgctgatgcattaggtggttatattcttgagcttgggaataatgccggtaatgatgaagcatgggttcactggaacgagttccaaaaaattgatccaaataagttgtatcgagtgcgtgcacgcttccgccgtgtgcttggggaaactggatctatttatcttggtgttgcatgtaaaaatgcagaccaaagtaaatatgtaactactacaaactcccttgcaggagatatgggttcgtctaactacttattgtcagccattaaacctaatttaggtgagtggcaagaagtagttctatacatgaaaggtaagtctactggggcagcaactggtttagggacaattgaaaatccacgcacattcccagcacaggctgaattttatgccccaatgtttattgctaactacaactttcagacaggaatttgtcagcttaattacattattgttgaagataacaactctttagcttctgctaatgatgcaacagcaactgcaaatgatttattcaaaacagcaactaacagaacagaagctgaagctgaaagaaccactaagcttgaatcaagaatgcagaacgcagaaacaggtattctgagcaatgcccaagctttatcgaaaacagctacaaagagtgatcttgaaagtgccatggggcgtgtggcgactgatattacagctgcagtgaataacattaagattggtggtgttaacgccgtagccaattcagaagcacctcgaacatccacagcagcaacaagccgtgaatacttaatgtatgaacgtagcaaagagttgaaagctttttatgatgaaaatttagataagccggttacgatttcatttgaagtgagtgtaccggttgctggaactgtacaagtatattcatctaatggatcagctcacttcttcacaacttctgttacagtcactaaagcaaatgaatttcaaaaatttgaagttaccgtgtttcctaaattacacactggcagcacaaccgaatcgactattgagttttacggtacatatggcactggtcgaattccaacaattcaaaaattgcagatcgaagcaggtaataaagctacagcgtggagcccaagccctcgagatactcaaagttcattaaatgcaaatgcggaagcgattaagcttactcaagctgaagtgaagaatcatggtgatagtttatcttctcaaagtttagatatttcaaaacttagaaatgatctaactataaccaataccgaagtaagtaaaaaagcgtcaactgaagcattacaaactacaaattcacaagttactgaacaagctggtcagattaaagctgttactgaacaggctaatactttatctgcaaatcttaacaagtccgcaccggctggtacgaacttgttgattaactctaacgtagttggaaactacgatggcgtttcatatcctcatttacgctataagcttggtgaagactgggaagtaggagcaaagtacactcttctttggtgtgcagagcatacacgtggtgctggtgacacaaactcaaatttagctgtatatgctggtggaggaagtcagtttttacagcaggttattaacacttcaggtaaggtaataagcaaaattacttttacgaagacttcagctggtaccgccaaagaagttaacttttatatgcttagcagaccaactgcagacaagcaaagtgttggtactgtgtattgggctgtgttagttaaaggggatttcataactacagataattggattgcaagtccttacgacttcaatgcagcattcgatcaagtatcagcaaatttaaatgaatttaaacaaacgtatgttactgaaagtactgctttagctaaaaaaactcaaaacttagaatcaacaattaatgatcctgtaaatggtttggctgcacaggctaaacaaatttccgaccggatgactaaatctgatgttgatagcgcaatatcaactgcgaccgaagcattgaaaacaagtatcggtggtaagtcttttgacaacatcgttatcgggggtaatgtcgaaaaaagtaaaacgggtggttatttacaagtatcatatcccttagcaaaaagtttaaatgcacctggtattactgttaccgtcagagcaaaagttacctttgataatggagggaacaatgcagccaatttgcgtgtatatattggcggaggtaatgtatttaatgcagatgcacctattttttcagctagtaaagatatctacgaatttaccttaactacaatttctagaacagacgcaactgttgttaatttttattgttttccaaattcttcagcaaatgctaatgccactactacagtgcattgggtagaagtttatgaaggtaataataaagcgttaaatgataaggtaagtacttcaactctaattaaggattactcttctaaagcagatactgctcaagcaataacttctgcaactgaaacccttgaagctaaatttcgtcaaaaatttggcgatttgtggactaatagttcagcaacactagatagtactcgctacaccaaaacagaaactaaccaagctattgctgaagagagcaaaattatcaaagctgctatttcttcaagtggtggtgacaacataattaaaaatggtgatttctcaagccctttaggcaccttaaattggcgtcaaaattctgctgtggcaggtaatctacttgaagtttataaagattcaaaaggtgctacttgggggcactttaaatctactgatacaactacatactttaaagggtttattgaaactctgacattggcagatggtttagagatgaatcagaagtacacattgtcatttaaagcaatgtcgttgacagctgcacagactcaaattttattaattatacaccgtcgagattcatcaggtcgtaataaccaaattggtactacatggaataacatttcgactgataaagaaacattatgtacttatacctttgatacaaatattattaatttacagcatattaacttaattttatattcgcaagtaggttttgctcctgactttttaattagagaagtgcaacttgaaaaaggtgagttagccactggttttagaaaaaatcctcgtgaactaattaaggatcttgaagctaatgcttctgcaattgaaggtactaaagctgatgttcaaaaaaacggtgaaaagattacttcacttgcagagaattatgcgactttaaaatctactgtagacaataataaaactgctgtagatggtaagtttcaggaaattaattcaactattagtgataatcaacagaacactacacagtctattaataacttggaatcaagttataaacaattaaatcaggaccttggtcaagttttcaattaccgtgtttattcatgtggctggaatggctttttcacagggattaaaaacttaaaaggtgaaatcaaatcagtagcttcagcacgtggtttttcagtccatgttttagcagctgatggttctatagcttcttcaactagatatgatacttatgcagctgtagcaaatgctacggcaatgagtaacgctatttctgcgattccaaatgacacctttgttatcgttacaaactacgacagtattggtgtaaacctagcaccagttaagaatgcattaatttcattaggtgccaatccattcacacttgatcaaataacgggtcgggatgcatacattttagttggtcagaaggggattggttcaggtcgtggtatagaattgcatgcaacaccagatactggaccaaatggggctaagcaaatcatgcttgcaatccaagtagttagtggtatcccgattggtctggcaaacaatagtggaaacttacaaaaggttttagaaaaccacgcacaaattcttcaagaaaaaattacaagatctgatgcgaaagaagtatttgctgaggaaatcaaagtttttaaagcacaacttgatactttacgttactcagaagagaactggattttacttggtgatgatactaaaaatttaagtatttctactggtacaaaccgaactgtagctgtttgggaactgcaatataaacacaaggaaattccaattgataaaggtgatccaatagttgcgagaatcaaatacacagcaactgcaggattagttggcgctacatgtagtattcaatttcatggtgcaacttatagtgttgggttaccttcgtttgttgtagctgcaagtggtgaaatagaacttactggtattttcccaaatgatttaaaagcctctgcttatgaagctattccactaggtttacggtttgataatgctccatctggtggaacatttactgtaactaatatgtttatcagccgaggtaattcagcgccaaattttaaaggcggatttagatcatctctaaaacaaaatgctcaatttgttgaagatacttttatcaaggctgatgttaataagggagttatagctcagcaaatccaacaatatgatgcaactgtacctggtggtttatcttctgtagtaaaaacaacaaaagctacagctgaccaaacatcaaaggatctagctacacttagaaatactgaaatttctcagcttcaaacaagtacaaataatcttggttccgcattagaaaacacaacaatgctggcgatgatgattactaatggaaaattgttgcagggagacgtaaatttcaaaaaaggtaacaatggtgtatctgtctataacaatgccggcaatgggaatgtgacagttactcgagtcgcgaaaagttctgataaccctactacctcaacccatgaaattgaaattaaaaccattggtgctgccagcccaacatggggtggatttgttcaactcgtttatggccgtgcaaatgctgtttttgttatcaagtatttaatcaagctaccagttggatataaattggtgaatgctggtaacgcaatggggacaggggcaattgatcgattcattggcaatactaagggtacaggcaaattcgaaacatatattcgaatgattaaatgtggtgctgtaggttctttctctaactcaggacatgtttatgtggcgggaggatctacaccaacagctactgcgcctttagtttggaccttagcccaaatcgagcaatatgacgttactgattacgcttcagctgacccgactttacaggactttgtttcttcagccacagactctatatcaacattaacgaacttcaaagaaacttgggctgccaaacttactgaaatgtcttcaaaattagacagtaaaaacggcgcttatattttgaatgcggatataacaaatactaatgttgagcgtgcaattgcagcatcttcacagaaaattacttctgaatataccaatgctatgagtgtgcagccattgagttcaggtgcagggaaaattttcgttaagcctttaacttggcgtcaagcaatcactacttcgggtacattggttattaagacaccaattacagttggtgcgtacatgaccaaggttaaaatttctggttataactacaataacaaagaagataatattttcgatctggatttggcattttatgcttatacgtcaacagtgccattttatccaaatatgacgtcacgttcttttggtattaccttagatgaaaataatgctacgactaaaggcctggctctagctttagatagcaataataaggtgtgtatcttaattaccaaaaaagatgcttggtcttacccagcaattacagttgagtcggccactattactcatacaaatccgccagattactttaaagatggctggacggcggccattgaaacggatttatcagtttataagtcagttacgccgtttacagtgacttcaatgatggaaaccactgcaggttcacaagccaaagtagatgttccaatgtctcaattaagtgatattgcagctgataataaactcacaccagttgagaaaaaacaggcgaagttggtttgggatacactttatcaaactgatgcaagcttgcgagctgaggcagtcacttatggtatatcttctactgcctatgcaacggcattcagtactttaaatacatatttagcagctttattcgcaaatatgaatgtaactagtacgattgaccgaaaccagttcattactaactttgcgaacgtgcacaacgcacgacaagcattagtacgtgcaatctcggagaaggctaaagaaatagctgatactgccaaggacatagcttctactacaaaagcaacattagagcgtgattacatgacgtctaccaagacgaatgaagcaatcgcatcttcaacagaaagaatgtctgcactgtattctgcaaatggtcaaaagatcatggcttcagtactcgaaacatggcaaaaagattggttagtaaaaactccaagtgggaataggcctgaacttagtttagttgcagatgcaacttgtcgtgggggatatgcactaagaattggtaataacgtaggtaatgatgaagcctggttaaattggttcacatctttgcctatcgatgacaataaatattaccgagttaagtatagattccgccgtgtaagtggtaccggagttgtttatgttggtgcgacctgtcaaaacgccaataaaacaaaatatattgctcaagataactctgaaatcaataatatcagttcaagtcactatttagtcgcaggtaccgcaccagcgttgggaacttggataaccggtactgcttattttaaggggcgatctgctggtgcaagtgcaggtgctggcactctactaagccctaaaacatttgctaataaagctgctttctttacaccagtattcattggtaactattccggtaaagctggtgaagtggatctagactttatagatattgaagatgctgacaacattgctgattttgaaaatttcaaaaccacatatacaactgatgtgggagcatatgctggtgcattacaaactttggtttctgtttacggccaaaatgctatcaagcttaaatcacaagctgatttgatcgatggtgtgaaaggtaagtacgtaatgggaatggataataatggtgtgttctctggaatgtctatggtcagcgagcaaacgaatggaactgtgctcagttctataggttttcaagcggatagaattttcttcacaactggttcttcttctactaaatatatgccgttcataatccaagacaatcaagttgtgatgaacagtgatgtatttattaagaatttgacagccgcaaactttaaggccaagtctcttacagctgaattattcaatgttgacaagttaagtgccataactggtgaacttgggactttaattacttataaagatcctagtcagcctcaaaaagcaagaatggtcatttcagggaccgctttaaagttatatgacgataacaatattgagagaatttatattggtttataa

SEQ ID NO: 46637 - DNA, 1263 bp, Acinetobacter baumannii
gtggcgaataggggaaatgtacatcaattactcaaatctaaagaagaaatcgagtatttggtcactctacatacccatcgttatgccaatatgcctttgcctaagcaactggaaaaaaaattctggtgtttaaatcttgatcgaactagacagaacatctcaaagtttctagcaagtggtgtactcacttatttaatttttattttactggccctgccgaccgactatttagtaattggggtaccttatattactttggactttattcattgcttacttagtgcaatgaatattgcacttgccctgttattgttctgggtttttgccaaatttacaaaactctccgagcacttttatttagctgcatgtggcattgtatttttaaccattattattaatgcgatgttattgcttagtgtcggaaatatggcgcttaagaaccagtctatgttgcttctttcatttttatatatgctcgggttcatattaagcggtattaaacctttgcatatgctttgtgttggtttattggcagcatttttagtttttgcttttcttattttgttagacgtaaattgtgactatattgcgttgggccgtgctttgttcggtagttgtattttaggtttctcgattagcagtatgctcatctcaagagaaagaagcctttttttaaataaccagcttgctgaaattaatgaacagatcttacggattgaagcgtcggagttattgcatttaagccagcaggatgccctgactcaaatttcgaatcgacgtacatttgatgagatgtttgattttttctactaccgagcaaatcaagagaagcgtcctttagctgttttatttattgatattgatttttttaaaaactataacgatttttacgggcaccagatgggagataaagtcatctctagcattgccgcagcaattaaaaactcaattcgtcatgttgactttgttgcgcgttatgggggcgaggagttcgttgtacttttacctgaaacacctgcacagggcgcttattcagtggctgcaaatatctataaagccattgaacggcaagcaattcctcatgcagcttctttagtgtcgaagtatgtcactatcagtttagggtttactgtatatacgggtgggctaaagatgggacaagataggcttattcatgcggcagatcaggctttatatcgggcaaaacagcttggtcgtaatcaaatttattatcaaccattacaagtcgccgaaattgcctaa

SEQ ID NO: 46638 - DNA, 609 bp, Acinetobacter baumannii
  misc_feature (11)..(20): n is a, c, g, or t
atggaaatttnnnnnnnnnnaatttttgaacttgtcaaaaaaaacttatcggcctttattgcttcatttgctgtctctttcccagcttgcttattccttgtgaatcaatatgtgagtgctcctcaagttgaatcgttaaaattggctaatgcaagtttgcaaacttcctataatctattgcaaaaaaactatgaagataaaaaaagtgagtccaaaagcttagatgagacaaaagatattctaactactaacttaaataagagtaatagtgagctaacagtaaatcattacaatgtgcagaatttaaacaacaaaattcaagaattgaataatgaaaaagaaactttgaacctaaaattagaccaagcctatgctgataaccgaaagttgctggcacatcttaaaaactatcaggaaaatgctgatattctccaaaaaatcagtaatcttgaattaaagaaacaaaatgctagaaacggtcatgcaaggtcagtttttgataacaagacagatcaagaaatcagagcagataacgaagtaatagctaaagaatatcaacagcaaatactcaatttgcaagataagttaaagtgtgtgaatcagtcctaa

SEQ ID NO: 46639 - DNA, 330 bp, Acinetobacter baumannii
atgttttcattcgaccaagtgcaactgactttagatagaaccaattggaaatggggaaaacgaaatattaatatcctgatgctcgcaatcgtttatcgtggaatagcgatacctatcctttggacattgcttaataaacgtggaaattcagatacgaaagagcgtattgctttgattcaacgctttatagccatttttggtaaagaccgtattgtgaatgtgttcgcagacagagagtttatcggtgagcagtggtttacatggttaattgaacaagacatcaacttctgcattcgtgttaaaaaaacttcattgtcaccaatcatttag

SEQ ID NO: 46640 - DNA, 435 bp, Acinetobacter baumannii; identical to SEQ ID NO: 26756

SEQ ID NO: 46641 - DNA, 1335 bp, Acinetobacter baumannii
atgtacaaaaaagccgctttaatttttccacttgccctaataagtcaattgagcctagcggattgggtaaaagatgctacacaacaaaatgaaaatcaggtcattcaattaagacaacacatccatgagtaccctgaactaggcaatatggaatttaaaacatctgcattggttcaaaaagaattaaagtcttatggcattcaagtcaaaacaggttatgcaaaaacaggagtaatcggcattttaaaagggaataaccccggccctattattgcgcttagagcagatatggatgcgctacctatggaagaaaaaagtggtgtgccatttgctagtaaacaaaaagcaatttatcaaggtaaagaaacttatgtgatgcatgcttgtggacacgatgcgcacactgcaatgttattaggtgcagcaaagatattggcggccaataaagataaaatattaggcactgtaatttttgtatttcagcccgctgaagaaggtggagcagatatagataacttcacgcatggtgatcaaatcggctcaagaaaaatgattgcggatggtgcatttaaagactacaaaccagaagccatttttggcatgcatgtcatgtctggcatgaaaagcggacatctatattataaagatggtgctattttaaacagtgccgatcacttacgtattcaagttaacggcaaacaggttcatggctctaccccttggttaggcagagatccaatttatgcatctgctcaaatgattaataatttacaaagtcttattagccgaagaaccgacttaacccaaggtatgggcgttattagtattggcaatattcaaggcggtacagctggaaatgtgattcctgaacaggtcaatatgatcggtactattcgatccaataacgaacagatccgagaaaatatcctaaagagcttaccaactctggtggaaaataacgctcaagccaatgatgtaacagcaaaagttgaaattgcgccttatgctccagtaaccatgaataataaagctcttactcaacttacccagccaacattagccaaaactgttggagattcgaatcttcatgttttggaccataatgcaagtgcaagtgaagattttgcctattatgggaaattaatgccctctttcttcgttttcttaggagcaacacctgaaaatcaggacttaagccaagctgcaccaaatcacaacccttcttttatagtagatgataaggccttaaagacaggaaccgagctacatataagattcgttttagactatccgaatatcgctaaacaagttcaggctgcatggaaacagtcttaa

SEQ ID NO: 46642 - DNA, 1236 bp, Acinetobacter baumannii
atgagtattgtaaaaattgaaaatgtacgtgtgttagacccaatccaaaaaacagacagcgtacaaactgtatatattcaagacggtaagctcgttgctccagtcgatcaggttgaacagaccattgatggtcagggtaaatggttaatgccaactatggttgatttgtgtgcacgtttgcgtgaaccgggccaacagcagcatggaacgttgaaatcagaaggtaaagctgcacgtgctaacggtattttgcacgtcattacgccgccagactcaaagccgattgtacaagacaacggtgcgcttattcatggtttaattgaaaaagcttggcatgatggtggtattcacatgcatatcatcggtgcccagactcaaggcctaaatggtaagcaaccagcaaatatggcgggccttaaaaagggtggctgtactgctgtttcaaatgcgaatgctgcttttgaaaatgatgatgtcgtcgttcgtacattagagtacgctgcgggtcttggtttaaccgtcgttttctatgctgaagagccacaacttgctaaagatggttgtgctcatgaaggctttattgcatcacgtcaaggtttaccaatgattcctgcaattgcagaaaccgtagcgattgcaaaatatctgcttatgattgaagcgacaggtgtcaaagctcactttggtttgttgtcttgtggcgcttcggtcgaattaattcgtgctgcaaaagcaaaaggtttaccggttactgccgatgtagcaatgcatcagttacatttaactgagcaactaattgatggcttcaattcacttgcacatgttcgtccaccattacgttctgagcaagataaagagcttttacgccaaggtttaaaacaaggtgtaattgatgcaatctgtacccaccatgagcctttaagcagttcagctaaaatggctccatttgcagagacgcaaccgggtattactgcatttgatacttatgtggctttaggtattcagctcattaatgaaggtctatttgaacctttagaatgggtaactaaagtgacaagtgctcctgcacaggtagcaaacatgacagctcgttggcaagctgaagcagggtgggtgttggtagatcctgagttaagctggactgtaagtaaagacactattttatctcaagggaaaaacacccctttactgggtcaaaagcttacaggtaaagtcttacagacttttgctgtttaa

SEQ ID NO: 46643 - DNA, 426 bp, Acinetobacter baumannii
gtgaatatccgtttagcacaatgggaagataccgagaccatatgttatttacttaaacaaatgggatattcacagcctttaaaagtagttcaggaacaatttcaaatactaagtaaagatcctaatgcgattacgttggtcgcagctgacgatttaaaagtgtatggagttttatcgctttattttattccacaaattgccttacaaggtgactttgccaaaatatgctatctgtgtgttgacgagaaaatgcgtagtaaaggagtggggcatttgcttgtacaagaagcagaacggatagcaaagcaacgtggttgtgaccgaatggaacttcattcggggatacaaagatctttggcacatcaattttacctaagagaaggctatgtcgaagcgccaaagtactttcgtaaagctttaaattaa

SEQ ID NO: 46644 - DNA, 1338 bp, Acinetobacter baumannii
atgtctatatatcccaagcctcataaaacgttaaatttaagccctccttcacttttagcgctagggtttttaggctttattacttttggcactttattactcaaattgccatttgcgaatacaggcaatgtcagttggatggatgcgctttttacagccacctcagcagttaccattaccggtctatctgttttaaatattcatgaatctttcaccctctttgggcaaactattattttattactgatccagtctggcggtttgggttttatgacttttgcgatattggccgcattaagtttgtcaccaaaagttggtcttaaacagcaaatgatggctcaagatagtctcgggcaaacaagcctatcaaaagttacttttgttgctaaaggagttgtcacttacacccttatttttgagctgattggtacagttattcttaccgccgcttttgcaccaacatatgggtttgcacgcggtttatattatgcagctttttacagtatttcctcatttaacaatgctggtttttcattgttttcaaatagcttaatgaattttcaaagcagctatattatttgtataaccattagcatcctttacaccttaggtggtcttggttttttagtgctcatggatattaagcaaaacaaaagatggaaaaaactaacaccaaatagcaagcttattctgacaaccattgcaattattaacctagttgcctttattttaatatgggctttagaagctcaaaatcccgcgactttagggattttaaactcaggtgaacaagcattaaacgcttggtttcaggcaacagtccctcgttcctcaggttttaataccattgatacaggtgcaatgaccaacagtagctcactactaatgatgttattgatgtttattggtggtggctcactgagtacagcgggtggaatcaaagttggaacctttgtcattttagtacttagtgtaatttcatttttacgccgtacagatgaaattagaatatttaaccactctgtctctcacgaaactacttataaagccttagctgtcaccgcaattaccagtattctcatatttatcgggttctttatacttttacttttagaacctaaagcagactttatgaacttattatttgaagtcgtttcagcagcctgtacggtagggctttcgcgcggtatcacgccagatttacacaatggtagtttatttattttaagcttacttatgtttgcaggtcgtttaggccccttaacactcgcctatttaattgctactcctaaaaaaagccgtctcaaacatcctcaagccaatattcaaattggttaa

SEQ ID NO: 46645 - DNA, 1152 bp, Acinetobacter baumannii
atggcgttcagacaatttgaacgcacatctttacggctaagtatgggaaccctgcttagctgtttatgtgcgtcggtggcatatgccgacaccttagcccctgtaaaacctgcgagtgtagatgcatgtgttgcccttgcttcgaatgctgatcgcctagcttgttatgatgctgtgtttaaaccatcggccttaccagtagttcaagccgcagtagtaccagagcctgttaaaaaaattgataaacctgttgttcaacctgaaacatttaaagaaaaggttgtagataaggtaagtaatatcaaagtaattggtaaggcacctacacttgaacctactacgtctttactagatcaacgttgggagttgtctgaaaaaagtaaactgggtgtttggaatattcgtgcttatcaacctgtttatttgctaccagttttctggacgagcgataaaaatgagctacctactagtccaaaccctaataatgtagaacatacagcccagaatcttaaatcaactgaaagtaaatttcagatttctttgaaaacgaaagcttgggaaaatatttttggtaataatggtgacttgtgggtaggttatactcaatcttcacgttggcagacctttaatgctgaagaatctcgaccattccgtgaaacgaactatgagccagaagcaagtttaatgtttagaacaaactatgagttgcttggcttagatggtcgtttgcttggggtaactttaaatcaccaatcaaatggacgttcagatcctttatctcgtagctggaaccgtatcatctttaatgtgggtttagaacgcggtaactttgctttaatgcttcgtccatggatacgcattgaagaagacagcaaagatgataacaatccagatattgaagattatgtggggcgtggtgatttaactgctttttataagtggaagcaaaatgacttctcattaatgctacgtcactctttaaaaggtggtgatgattctcatggtgctgttcagtttgactgggctttcccgattagtggcaagctgcgcggacacttccaattatttaatggttatggtgaaagcttaattgactataaccatcgtgcaacttacgccggcttgggtgtttcactcatgaactggtactaa

SEQ ID NO: 46646 - DNA, 2940 bp, Acinetobacter baumannii
atgactgtagatgtcactgaaaccatttctcaaactgttcaccctgcgtttcagttgctacgtcagcaccatgttgaagcattagatattttagtgtctgaatataagcataaagtcacaggtgcggtgcattatcacttggcaactgattatgatgaaaatgtatttcttgttgcgttcagaacacaacctatggactctaaaggaactgcacatattttagagcatactgctttatgtggctctgaaaagtttcctgttcgtgatccattcttcttaatgatacgccgttcattaaatacttttatgaacgcgtttacagcagcagattggactgcatatccatttgcaactcaaaataagaaagatttccaaaacttattatctgtttatcttgatgctgctttctcggcaaatttgaatcctctggattttgctcaggaaggtatccgtattgaacttgaaaatggtcagcctgtatacaaaggcgtagtcttcaatgaaatgaaaggtgcaatgagtgcgccttctgatcagctttatcatcagttggctcatcatctattccctgaaaccacttatcactacaactcaggcggtgatccaaaagatattcctgacttaacgtatgaacagttagttgaattttataaaacccattatcatccgagtaatgcggtatttatgacttttggtaaccaaaccgcctatgaattacaagagcaatttgaaaaattggctctacataagttcactgctggtacaactttatattcgaaaccagaaaaacgcttaacggcacctgttgaagtcactgaaacttatgctgttgatggcgatgagttaaaggacaaaacttaccatgtattgtcgtggttattacctcaggcgagtgacattaaacttcgtctgggtatgcgattagtagaaggcgttttactcgaaaactcagcttcaccacttcgtcattatttagaaacttgtggctatgctcagtcgactggtcctttaatgggtgtagacgatagtaactttgaaatgacgttctactgtggtgttcaaggttcaaatccagagcatgcacagagctttagagatggtgttttaaacgttttacgtgaagtagctgcaaaaccaattgattcatcgttagttgatgcaattttgcatcaaatcgagttacaccaacgtgaaattaatggtgatggtacaccatatggcttaagcctaattttaaatggtttaagtggtgcgattcaccataacgatccgattcaaatttgggatgttgatagtgccattgctcaggtcaaagaagaactccaagacccaatgtggttatctaacctgattcaaacgcatttattagataatccgcaccgcgtgcaaatgactttagtaccggatgcaaccaagtcagcgaaagagcaagaagctgaaaaagcacgattagctgcaattggtgaaaagctaactgaagaagataaagcagagatcatcgctaaaaccaaggcattgcaagaacgtcaagatacaccagataatcttgaactgttgccaaaagtaggtctagaagacgtcccagctgacttgcatattgtacaaggtcaattgcgtgaaattatctgtaatcgaatggatacgccgttgaatttgtatcatgccggaaccaatggtatttactatcaacaagtcctcattcagattcctgatgatgtggttaaatcaccatacttcaatttgctctctattttaatgggtgaagttggtgcaggtgagtatgactaccttgaactccagaacttacaaacagctgtaagtggtggtttgggaatgggtgcttcgttacgcagtaaggttgatgataaagacaaaattagtgcttggttaactttaacaactaaatctttaactcagaagttcgatgcgattcatttattaaaattagcatttgaacaacttcgttttgatgaaaaagagcgaatcattgagttattgcagcaacgtaagacacgctggcagtctcgtttatctggtgctggtcatagttatgcaatgcagattgcttctcgtaacatgagtgcattagctcaacgcgactatcaaaacacaggtttaggtgcgttgaactggttaggcgagcttgttactaaaattacccaagatgatgctgcttatgatgcgcttattactgaattgaagcatattcacacaaaattattgcaagcacctaaacagttcctgctcgtatgtgaagagcatcagtcagaacgtttagttgaagaaatacaaaatgtttgggataaattaaacgttgatacagcagcggctgagttaacccaagttgagcaagaaaatgataatgaacatgaagcttggttaattcaaaccaatgttcagttctgtgcctctgcatatcaagctgtggaagtatctcatccagatgcggcacctctaatggtattggcagcttacttgcgtaatggtttcttgcacagtgctatccgtgaaaaagggggtgcttatggtggtggtgctagttatgatggaaatgcatgttcattccgtttctttagttaccgtgacccacgcttagcagagacttttaaagattttgaagcgagtgtgcaatggttgttaaacacagagcaacaacctcatcagcttgaagaagcaattcttggtctggtggcaagtatggacaaacctggttcaccagcaggtgaagcaataacagcgtgttatgcattgttgcatgcaagaactccgactttccgtcgcacattacgtgaaagattattgcatgtaactttagaagatttacaacgtgttgcgcgtcaatatttaattgaacaaacacctgtaaaagctgtcgttgcaccttttgcaaaacgtgatgaattgcaacaactgggctttatgatcaaacaagttaattaa

SEQ ID NO: 46647 - DNA, 2103 bp, Acinetobacter baumannii
atgaagcgttcagttttatttatttcatcagttggggttatgacaagccatgtatatgctctggaagcagatcaacaggcggtaaccaaccttccaacaatttcagtcaaagctgataaggaaatcagtttaaaacaagaagtggggcaagcatcaagtgcaactaaaggacttatgcaattaaaagatgtccctcaaattgtaaacgttgtacctaaacaagttttaagagaacagacagtcacctctatgcaaggtgccttgcaaaacgttgcaggtttaagctttagtgtaggagatggacaacgtgatcaggtcatgattcgtggtttctctgcaatcaccgataactatgtagatggtattcgcgatgacgcattgtattttcgcgatatgtcgaatgtagagcggatcgaagttttaaaaggacctgcttcggtattatatggacgtggttcagcaggtggtttagttaacaagattaataaaaaaccaatcgatcaatctttgcgtgaagtgagcctgattggtaatacaacaggacaacgccgcgcagaagtcgatgtaaatgaaaaagtcgcagagaatgttaaggttcgtttaactggtgcagttgaagactcagatggttaccgtgatcaggcttttttaaaacgtcaagcggttgctccatctgtacagtgggatattactgataagaccaaacttttacttcaggctgactatttgcatgataatcgtttggcagatcaaggtttcccgacagacccgattacaggtaaacctgttaaaacaaatcctaaaactttttatggcgctttaaatggtaaagaggttggggatgttgatactgaaatctcaagccaaactatcagcttagaccataagtttaatgataattttaaatatcatggcgcagttcgccactataactactcacttgatcgtcaatatagtgtagattcacatccagctgctgataagtcaaaaattactttaacccagaataaacgcttacgtaatgaagatggtgtgtatgttcaacaagagttgaacgctttatttaatacagggtttttaaagcacaataccttaattggtgctgaatatagcaagcagcataaagatgagatactttggcaaggtgctaaaacaaccactgatttatataaccctaaattagagtattgggcacctattaatacagggacaacagttgcaagtaataataatagcaatacctttgaaaattatggcttatatgtacaggacttaatgacagttacagatcagcttaaagttttagtgggtttacgttatgacaatttgtcgcaagatcgtgacgataaaacgagtaagaatctggatttaaatcgtactgataatacttattcaccacgaataggggtagtttatcagccagtaaataatatctcactttatacttcttataaccgctctttccaacctttggctgattcatttgttttttatcaaaacagtgatgacttaaggccaacaaaaactgaaaactatgaaatcggtgcaaagtgggatgtaaatgatcagttgaatgtaaccttggctttatttgaaatgagccaaactaatattcaaaataaagacccgaatgatcctaatggttcaaatgcaattttagcaggtgagcaaaaaaccaaaggtgttgagctttcattaacaggtcagttgaccgatcaattgtcagtattggctggttattcgtatatggatggtaagattgaaaaatcgactatcggatttacaggcaatcattctgcgctcacgccaaacaatactgctaacttatggttaaaatatcaaattaatgatcattggtatgcagctgtgggtggtcgtggtgaatcatcacgttttagtgcgccagacaacaaaaacgttttaccaggatatgcagttgtaaatgcggcgttaggttatcaaagtgaacgctatgatgtgaacttaaacttaaataacttgtttgatcgcgattattttgtgtcaggtcatagtggagcaaatgattcgaacatgatgggcgatcctttaaatgctcaagttgcacttcgctatcgtttttaa

SEQ ID NO: 46648 - DNA, 804 bp, Acinetobacter baumannii
atgtctgaaaaaatcgaaatcgaaaaatttttaggtttagctaaacctgtaattccacttgagcgtggtcagcttgtagcgttgcatcatgactatagtgttatagctgctgaaaaatttatggatgctcgcttccgtcctcatggtgaatttactacaccaacatttaacgactttaaagattttgtagttgcagaaggcggtaaaaatacaccaatttttgttaatcaaaatgacatgaaagctattgcagttcttaacttccatggtgaaggacaagcccaaggccattgtgactacttagcttctttatgtttagaatcaactgttgtatggaaaaagttgaatcaacttaaagaccataaattagatcaacgcaactttgctgttttcattgaagattgggctcaagtacttaatgcatttgatgaaaatcataatgtcattgatattaaagatgcccttgttgcagtacgaaatatgcaaattgaagcatcgactactagtaacgctgaagtagaaaacacacgtcaggttcaatctgaaatggcccaaattgcagcatctgctaaaaaaggcgtattaccggcttatttcaccatccaagattcagcttacttaggtcttgcagaacgagaaatcaaattacgtttaattgtgaatagctctggcagcacacctcagtttgccattcaaattgtcaaagaagagttattacgtaatgaaattattgaagatttcaaagaagaagtaatagctttacttcctgaaaaccctgtacgaattgggtcatttaaatcttaa

SEQ ID NO: 46649 - DNA, 261 bp, Acinetobacter baumannii
atggatcactacaaagacaaagttatagacgaacaaggcttgattagcgtttcggaggcgttacgagctatggcttgtggtcgtgttattcaatgttcaagtaaagactttccaaattggaaggacatggaaatcacaaatattaatgcgaaaaatttaattgatgaagagcgcattaataaaaacggcttgaagtacagatataaaccttcgcaaatgtctgtaaatgctgagctaacacaaatgaaaaagcctcaatga

SEQ ID NO: 46650 - DNA, 330 bp, Acinetobacter baumannii
atgaatcagaaatatataaacagtcaatctgccccatctacacctatttgtttcgtgcctgaacttagcgggaataaaacaaataaaccagctacttctaaactttatcagcatccatcagcagaggatctaaagtttaaaaaagatagtaaatggccgtatgttttatgcttccttatatttagtgcattagctattgctttcctttatgcatgtgatgcagaggctcaagtgcgtgagcagaagactcaacattggcaacaacaatttaactcaggcgaacctgttgatgttcaagtacatgtagttaaattaggtggtgcacaatga

SEQ ID NO: 46651 - DNA, 372 bp, Acinetobacter baumannii
atgagaacaaactatttacgaggatctaaacgttacgaaaataatctgaatggtcaagtaaaccataaatcaactttccgtgaattcgtagggaaggatgaagaacgtggtttatacaaagtccgtcttggctatacagtttatgctgcaaatcacactttaactcgtgtttatacggttaatgaaaacaatgaattaactcctgtttcacaatatacattaaatacaaacgagtggattttaagaaatctagaaaccgaaattaaatatcgtagaggacgtgaattaggtcaaattcttcaaaaaacgcacatcccttcccctgaccggaaagcctacaaaattcgtcgtggctttcttggtacacgctag

SEQ ID NO: 46652 - DNA, 681 bp, Acinetobacter baumannii
atgaaagcaattattttagatactgaaaccaacaaattaaatggttatccaattgaaatcgcttatgcgccttttagcttagagaatggtcaattgttagttcataaagatgaagtttttaaccgtttctattcttgtcctgaaccgattgatttagaagcaatggctgtacacaacatcattgaagcggatattgaaggtcaaccaagttgcgaatcgttccggttacctgaaggggttgaattcattgtcggtcacaatattgattacgacatcaaagctctaaataaatgtggaccagcaattaaggcaaaggctatttgtactttagctttagcaagggacgtatggcctgatttaacaagtcataaattggctgttctgtactatttcgtaatgagtaaccgtgaagaagcacgtaagcatttaagacatgcacattcagcacgggcggatgtttattttactgggattatcctaatagctctaattgaacgactgggaattaaagatttgaactccttatttctcatgtctgaagctgtacgtttacccaaaataatgacatggggtaaacacaaaggaacgcctcttaaagaattaccgcgcccatatatctcatggctcctgaataaagaagaccttgacccacatttgcgtaaagcgcttcaaaatatttaa

SEQ ID NO: 46653 - DNA, 1029 bp, Acinetobacter baumannii
atgaaacctactctatttacgcctgaaacatgggcggagtttacccaacaactcaaaaattcttgggaaaaagataacgctggtactgattcaccaatttttgttgttcaagaaaaaaagattgtttggggtttagatccggctagtgattctgtagaaatcactaatattgtagatgccgatgatgaatcaacatataaatcaattgatgatttttttgaatctcttaaagctacagataagcatgctttaaatggtttagcaattgaagaggaagatgaacttttcctcgatgtaaaagcttctactcaaataaacattttatctgattggaatgaacgcaatattcatatctgccatggtaaatatttttgggaagatgttaattgccatctaactcgttcagctgcagatgcatttattaaacgtaaatcgcatgatttcggtgagttgcgggtatttgttaagtcactttattggtgtgaggagtttaagaatttacttaacgctattattagcggtgaagtaggtttgacaagtatagatgacgacaacatcctaaacgttttgggaccaattgaacccaaagcagataaagaaattaactcaactcaagcaaaaaaatctgcgaagaaggccaataacaaagaggaaaattggactcgttatcataatgacaaacctgttgagtctccgttagctggccttattgaaaagctaaagaaaactaaaactgcagatgcagctaatagtctcattgaggaaacgaaagactggtcttctgaagatcaaaaatcttttttaactgagttaaataaacacttagtcattattgctggtcaatcaaaagaaaatatttctattggggaaaagatcagacaagcaaaggacctgactacattagatgcccttgaaattgatatttctgaagctgatgaacgtattcaagaacgtctaatggagctggttgtaaaaagaagaaaagaacttgaggttgaaggtaactttttattggagtcgcctcaatga

SEQ ID NO: 46654 - DNA, 141 bp, Acinetobacter baumannii
atgattcaaatttataacagcaaaactagaacatttactgtgatcggtaaacgaacccaagttttcttaaatatttcacttaatgaaacagaagctttgctcttcaaagcgaaacttaaagattctatttggagaatgtaa

SEQ ID NO: 46655 - DNA, 291 bp, Acinetobacter baumannii
atgatgcgtaacatcccagactctttgtcgcttccgttcacagtatggatgtgtgaaaacggattttatccatctcataaaaatggattcatggttttaaaacgtggcaaagaagtagcaaagatatcaatgaatgaaacaaaatacggtttcccaatgaatgatatttgccaaaagaaatttgcctcgttctgcagagcatggataaacagagataaacactttattgaacaattacgtttgcgtggtttagcaagattaaatcaaaaaagttatcagttggtggcgtaa

SEQ ID NO: 46656 - DNA, 366 bp, Acinetobacter baumannii
atggaacaggaatataaagggaacatgaactatccctttcaagaccatattgttctaaatatggaggaaaatattgttaattttccaagctctaacctacgtaagtgccagcatatacaagtcgaaattgatagcaaggctttagaacttatttgtatgaaatgcaaggcaaaagttaatcccgtaatctggattaaagatactttgaaatattggtcaagacaacaaactcagataacagagcaaaaaaagcagattaaagaagatcttgatgagctcaaaaagcgggctcgtactaagtgtcaacactgccaaaaaatgactgctatcaatctgaaaaattataaattttcaattattggatga

SEQ ID NO: 46657 - DNA, 288 bp, Acinetobacter baumannii
atgaaagatgttaatacagaaattactccgactttatggtgcgtaaatattcctgaagaacctgaatctagccccattttacatccggtacctactcaaaaaattggtaaacagcttgtttaccgacttaagaaagaagccttacaagcttttccaacagtcggtcaatgcattgctgatgctattacttttgaggagtggcaaggaagcaaagaagaccatgaaaaatatcttcaagacaacaaaaactggtggttagagacaacttttttgggtgaaggcggatga

SEQ ID NO: 46658 - DNA, 387 bp, Acinetobacter baumannii
atgatagatttgaataaggaaagagtggcatttgaagaagcttatttgagtgttggtggtaaacagcgtgaacttgaatttgaaggcggagagtatacaaattcaaagtcacagctaggttgggatttatggcagataaaagccaaagttcaggaagtagcattacctgaaacacgagcagtaactttaacctgcgccgaactgaaagatgcctttgattttggagcccctgatggtgagaaagatcaattccagatggaaactgaaatgaccatcaaatggctccaagatggttatgacggtgaaggatactactgttggtatgctgatttacctgaggaaggttgcattaagttgggtgttagcgaatcgggagctgagggatga

SEQ ID NO: 46659 - DNA, 483 bp, Acinetobacter baumannii
atgaatgcacaaattttagatccatgctgcggttcaaagatgatgtggtttgatcgaaacaacccaaatgtagtgtatggagatattcgaaaagaagaacatacattatgtgatggtcgtaccttagtgattgaaccagatgtattaatggactttcgcaaaatgccttttaacgatgagcaattttctttagtcgtttttgaccctccccatcttgtgcaagctggaaagaaaagttggttagctgccaaatatggaaaattgtcacaggattggcgtgaggatatacaaaaaggtttttcggaatgcttccgtgttttagtgaaaggtggagttttaattttcaaatggaatgaaacacagatcaaagttagtgaaatcttagagctaacagatcaaaagccattgtttggccacattagtggaaagcgcagcaatacacattggattacttttatgaaagcggaaagtaaggaggggtaa

SEQ ID NO: 46660 - DNA, 573 bp, Acinetobacter baumannii
atgtcaaaaagagacactattataaaaacagcaactgccctttttaatgaaaaaagctataactctattggagtggacagaattattgctgaatccaatgttgcaaagatgacattctacaagtattttccttcaaaggaaaagctaatagaatcatgcctttacaaaaggaattctgatatacagtctgctatattagaaagaatcaatatcaatgacctacctttagttcaactcagaagcttatttaattggtatattgattggatttacacagaagactttaatggatgcttatttaaaaaggcaactatggaagtagtacaactttatccatccgttaaaaatcctattaatgaatatagagaatggctctatgagcttgttttttctattttaattaaaattcaggtagaagacgcagctgcattaaccaatctatttcttaatatcctcgatggagttattaatgatggaacaattgataaaaatttaattaatgctgaaaaaacttggtcttatattaaaaaaataatcgatcttgagaaaattgaggaattagtcgctatttaa

SEQ ID NO: 46661 - DNA, 912 bp, Acinetobacter baumannii
atgcatatttatattttaggttcagcagctggaggcggttttcctcagtggaactgtaattgtcctaattgccatggtgttcgtacaggtacgattaatgccaaagtgcggactcaatcttcaattgcaatttcagaaaacggcgtagactggattttattaaacgcatcaccagatatccgtcaacaattatttgattttaaagcggctcaaccagcgcgaaaattacgtgatactggtattactaatgttattttaatggatagccaacttgaccataccactggacttttaactttacgtgaaggctgtccaatgaatgtgtggtgtactgaaatggtctatcaagatctcacctcgggttttccggtattcaatatgctgaaacactggaatggtggtcttcaatatcatcaaattgatcctaaacaagcttttaaaattaatggtttcgacaatttagaatttttacccttaattattcaaagcgcggcgccgccatactcgccacatcgccatgacccgcatgagggcgacaatattgccttaatcatcaaagatcacaaaacacaaaaacagttgttttatgcgccagggcttggaaagattgacgatcaaatcatgcagattatgcaagattctgactgcgtcatgattgatggcacactatggacagatgatgaaatgcagcaaaccggtgtagggaaaaaaactggccgtgaaatggggcatttatacattagtggtgaaggcggttcgttatcttacttaaaccaactcagtacaccaaagaaagtgctaattcatattaataataccaatccgattttaaatgaagactctgctcaatttgctgaactaaaagcaaatggtgtagaagttgcctttgatggcatgcaaattgaactctaa

SEQ ID NO: 46662 - DNA, 1245 bp, Acinetobacter baumannii
gtgaaaatagatactgatgtcaatactggatacagcaaggataccgacaaaaatggatatgcaaatattaagtatcgtgagctaattcaaaaattaacagcaacattatcattgacgcttttgtcatttggatggggctctacagtaaacgcagcacaacaacaaatcgctttagtaggaacctggacatctatcccagatgcaccgcttgtgcaaaaaccagaaaaagccagtgaaggtttgtaccagctacaagttaatgctgacgggaccttaactcctgttaaggtattgcaaatgaaaagtccatcttgggttgtaaaatcgaaagatggccgttttgcatataccactaatgaagaaaatgaaggggcggtaacggcattatcgattcaaaacggaaaggtagaggtattgaacacggtaaatagtcatggcgggcatccaacacatgcatccatcagtttagatggtaaattcctatttgtgtcgaattattctgcatttgataaaggacgtggcggtgtcgctgttttgccaattttaccaaatggacatttgggtgaaatggtacaaaatattgtttttgcggagggttctggtcatgttaaagggcgtcaggatagtggccatgcccattcgacaacttttagcccagatggtaagtatttatatgcaagtgatcttggaaatgacaaagtctatgcttttcgttacaacccaagtaagcctcaaccacttgaagcggataagagccgagatgtgagttttaagcatggttctggtccacgtcatatggtcttttcaccaaatggtaaacaggcatacattaccgcggaaatgcgaagtgaaattgtgacgtttaacgtacaagatggccatttgaaaaaagtcgctgagctaaaactagttcacgaagacaaaacacctgaattcaagagtgcaagtggaattattcttagtccaaatggtaagtatgtgatcgctgcaaatcgtggtgcggacaacaaacttttggtatttaaaatccaacagaatgggctgttaggtcaaccacaagtttataaggccaatggtattgaaccacgtgctttttcatttgatgagtcaggtaaatatctgtatgtgacgaatgtttatagtaataacattagcttattccgttttgataccaaaaatggctcattaaaatctttaggcgatgcagctaaaatatcgactccaactgatatcaaattcttttaa

SEQ ID NO: 46663 - DNA, 4521 bp, Acinetobacter baumannii
atgaaagaaatattaaaaactttaactgaagcaatgacgctacctgaagatagctattctgaacaagatgctgagtttcttgagattttcattgaagaaattgaagagatttttgttgatttgcaacctttgataaataaatggatgcagtctgagaatattgctacgctcactgaaattcgtcgtcatttccataccttaaaaggttccggaagaatgattggcgctaaatcttcagctgaacttgcgtggacagtcgaagatacactcaaccgggtaatcaaccaaagcttacaattaacgccaactattcagagctatgtgcagttagtatttaagttctatttccttaaattagtagataattttaagcaaaaaagagcacataccttagatttcagacctcttattttattaggtcaacaactacaacaacagcaaagtttagaaccagctttagaagagcttttacaactttcaaatacgcttacggccgaaacagtgactggtcttgagctagattatattgaacaagattcgttagccgagccaatcattcaagctactcatactgaaattgaaataaatctagatgaaactttgaccttatttatggaagaggcagaagaacatttagccacgattcatcaatttttggatcaagagttacatcagtacgacagttataacgctttaatccgcgctttacatactttgcgtggtagttctgcaatggcgcaggtcgaaacaattttcgaggccagtaccaaagttgagcatttatttaaaatactgctacaagaagagttatcttctcactctgaagaaattttattattacaagaatatcgtgagtttgttcgagatagcttggaactactatctagatatagttcaagtgaacagctcgaagcgagattgcagcaatttaatcaattttgggatgcatatgttgagcaacatggtgaccgaacagatccgttaatgccttctcatggcttggtatcgcaattattacaattagatgtttctgaattattggatgcagaattagattttgagaagggaattcgtaatgagtttcctgattatcttgaacgcctaagtgaacaggctgatttattactgcaacatacacattctcaagcaatgctgggtttacatgaatataccagccaacttaaagaaagttatgaagtactgcttgataaacctgcgttattacaatcagactatatatttgaaatttatcaaaaagcacatcaacagctcattcaattatttgatgctttagctgctggtcagcgagtcggtgttgttaagcaacatcaaagtattttagaagaattaaaactttatacgcagtacattccagacatatcaaatgacctgcctcagcaggattcgacatcttttgaaccaatatccaatattgaaccagagccagaagtagtagctactgtagagaatttctcagattctgcagactgggcggtattaggtcaaagtgtgcagcaagatcgacaatatatttcatctacacaagtgaatcgaaattttgatgctgatcttttagatatttttcttgaggaagctgaagaattacttgagggaattgataccgatcttaatatttgggtaggtgagcaagaaaactttgcagctctgaacaatctaatgcgttatttgcataccttgaaagggggagcaaatatggttcaggcaacgtatcttggtttgattgcccatgaattagaaagcatctatgagcgtttaattcaaaagcaattagtggcaacttcagatttaattgattttattcgtttggttcaagatgacttggctgaccgtttacaaattatgcgtgaacaacaactagattatgcagccccttacacaattaacgcattaaaacgagcgggtcaaaactctaacttccaacctttaccagtggttgaggcatttgatactgaaagtgagatattctctgagcaagaggtgatatctgaaataataatagatgagataccagtagaacttgaacctgctcttgcagagctagaaactcatcacgatcaggtattcgatacagcggttaccgagttagctactccagttgagatgattaccacggttacatcgcaagagagtgaaattgcagctgatgaacaggacattgaggctgttgttgaacagacgttcctagaagaagctactgaattgttagaaatggctgagtcgctattaaaacaatggtttgaacagcgtacaaaccgtagtattttgcttcagcttcaaagagccgtgcacagtttaaaaggtggtgcacggatggtgggtttagaagccgtacaagcaattgcctaccaactagaaaatgcttttgaacaatttgcgctacatcacttcaattcgaatatttatgatcatttattagaaagtgcgattgcatggttaaaagatgcaattttcaaccacaactatcagcatttcgatggattacagcaaagtttagaaaatattcaattctttgaaactacaatccagattccgactaagttaactagagcggacttgtttagctcagaacctgtgatgacctttatacaaggtgatggtacagagcctccaccaatgatgggagcgtgggagcaaacagagcgtctggatcagaataatgaaatgatccgtgtctcagccgacttaatcgagaaaatgattgatttgtctggtgaaaactccattaaccgttcacgaattgaaatggacttaagccaatttagccatacactggttgaaatggagctggcgattcaacgacttgccgatcagttgcgacgaatggaaggtgagttagaaacacagattattgctaaacatggaattgaacattctcgttatactgactttgacccattagagatggaccaatattcatctttaaatcaattgtcgaaatcgcttgctgaatctgcatcggacttggtcgactttaaaaatacgttatctgacaagatcagagataccgaaagtttgcttttacaacaatcaagaattcaagcggaaattcaagaaggtttaatgcggacacgtttggtcccattttcgcgtttattgccgcgtttacaacgaattgttcgtcagacgtctacagcattgaatagacctgctgagcttttcgtaaataatacggaaggtgagttggaccgcaatattttagaacggttagtgactccgcttgagcatatgctcagaaacgcaattgaccatggtttagaagaccgaatgcagcggcaacaagcaaataaaccggaaacagggcgtattgaacttaatattcagcgtcaaggtacggatgttgtggttgtctttagtgatgatggtcaaggcattgatgttgaaaaagtacgtcagaaagcactccttgccggattgatcaagccagaacaagacttagaacagcaagacatactgcaacttattttccatccgggtttaagtacagcagagcaagtcactcagatttccggacgtggtgtaggtcttgatgtcgtgcagagtgatattaagtctttgggtggacatgtcagcgttgaatccatctatgggcagggaacaacatttacgattcgcgtaccgactacagtagcggtaagtgatgccttaatggtgaaagtggctgatcaacaatttgcgattccacttgctcaaatcgatcgaattattcgagtgtcaccagcctctttagagcagtattttgaaagtcctcaagaactatttgagtatgaaaataaacgttatccattacgttatctttctgaatttgttggtaaccaacccataccacgtttaaatggtgtgatgtattcattacctgtgttaatgattaaagccaataatggccaaactgtggcactacttgttgaccagttaattggctctcgagcacaaattgtagtgaaaccaattggtcaacagttctctagcattggagcaattgcaggcgccacaattttaggtgatggacaggtctgcttaattttagacggacaaaatattgcgcgacaaattcagtcaactcagcgtcataaacaacttagtgaagcagtgtatagacaacgagagtctgatgaacaccgtctcatcatgattgtagatgactcagtaactgtacgtaaggtcacgtcccgattacttgaacgtcaaggctatgatgtggttacggctaaagatggtgttgatgccatagaacagttagaaaatattaagccagatttgatgctacttgatattgaaatgccacgtatggatggttttgaggttctcaatcttgtacgacatcatgatatgcatcaatacatgccaattattatgattacatccagaacaggtgaaaaacatcgtgaacgagcatttttgttaggtgtaagtcaatatatgggcaaacctttccaggaagaagagttactagagaatatcgatgttttacttgtagcgtctgacagtgaggtcaaatcatga

SEQ ID NO: 46664 - DNA, 744 bp, Acinetobacter baumannii
atgaagaaaaagtctaagcaatggaagtggtggttttttgccctcattgcatttttaatttttattattttacagattccggcgacttggcttatctctaaattttcaaagaataatcaaactgtccataatgtaagtggcaacatctggcaggggcaggcagactggcaccgtggggcgttacgaggcactatccactggaaaacgagactgctagacttacttttattacgctttgctgcagatgttgatattcatagtggtaatacgcaattaacggggattatggcgtatggttttggaaaaaaagttattgtaagggatatgaatggccagattgctccagaaacactgaagcaaattgtaaattggcaatggcctgtaaacagtattcaacttaaagatatccagtttaattataaaaaagagcaagggtttgcggcagttgatgggcaattgcattggggtggtggggcgctcatttataatattggtgatcgtcaagatcgtatgaatatgccttctttaagcgggcaattaacggatcagaacggacagctacaagtggacatccgtgatcagcgtaatcaaaaaatggccaatcttttactagatgccaatatgatgctggatgttcagctcacacagcgtttattactcaatgttccatcatatgacggtaaagctggtttggatacttttgtcattagttctcgccaaccattattacaaggtggtaactaa

SEQ ID NO: 46665 - DNA, 1260 bp, Acinetobacter baumannii
atgagcaaaaaaactttaatcgcattattatgctgtgccagtttaggattgacggcatgtaacgatgataacgatcaagatcaaacttcacctactgaaaacgttaccgaaccaactctaatttcttttgctaagttacctgtagaaacttatgctgctggaccagactcaggagcatatgtgaaaggtgcaaatggaatttatcctccgtttaaaggtcaacctgtacagggattttctgctgcattaaaaaatgaagatggcagttatatggcaatggccgataacggttttgggactcaagataattcatcagactttttacttcgtatttataaaataaagcccgatttcaaaactaaaactaaaggcaccggtcaagttaatgtacaaagttttatccaactgcgtgatccgaataaattaattccatttaatatcatcaatggtaatacacctgagcgtttattaacgggtgctgattttgacccagagtcgatgcagcgtactagtgatgggacctactggattggagatgaatttggtccatatttactccatttctcagcagatggtgtacttttagacgctccgattcctttaccaaatccattagatccaactcaagaattacgttcaccacaaaatcaatttaataaagcacaaattaattttgtggaacctcttgctcaacaaagtggcggttttgaaggaatggcgatttcgccagatgggcagtatctttatcctcttatagaaaagccaattaaatcaattcgggaaacagaaagacaactgttgatttcccaattcgatattaagaaaaaagcgtatacaggaaaatattattggttccagttagacagtaaagctaccaatattggtgatttccaactctttaatgataaagaagggatcattattgaacgtgatgccacgcagaataatttaggcggctataaaaaattaatccgtattaaattaaatgagtcaggccagttggtcagccgcgaagacttagttgatttaattaaaattgctaacccgaatatgttgtatggcacagctagagcaggggatattggtacgggacaggtttttgccttcccatttgaaaccattgaagatgtaattattgaaaatggtacgacactaacggttttcaatgataataacttccctgggtcgacaggacgtaatgcaaagttggccgatgataacgagattattcagattcgtttaccaaaagctctcttctaa

SEQ ID NO: 46666 - DNA, 567 bp, Acinetobacter baumannii
atgaaaactgttgccattatttaccatagtcgccaaggccacacccaatttattgctcagcaaattcaaattggcatcttgagccatcacaatattaaagcagatttactcaatgccgaggatcttatcgagcgcccaggacttcttatccaatatgacggattaatttggggatctcccacttatttaggtggtgtatcttccaagttaaaacagctcatggatgcaactggtccattatggaaaaaacaaagttttaaaggaaaattagcggctgggtttaccgtttcatctcttcctgctggtgataaacaatccacactaatttcaatttttactttttgcatgcaacacggcatgttatgggtaggtaacccaattctaccagaacagcatcaaggtgttgcctatacacaagcagctaaccgactcggttcatggtcaggtttaatggctcaggctgaacatgctagtaatgcagatggttttgatgaaggagatattaaaactgctcaacaatttggtgaaaattttgcattgaccttaaatgcttatcaagggacttaa

SEQ ID NO: 46667 - DNA, 1533 bp, Acinetobacter baumannii
atgaatacatcagaacaagttactactactgatgttttaatcattggcgcagggattgcaggtattagtgcagcctatcacctaaaaaaacatcgaccaaatactacatttattattctagaagcccgagatacatttggtggcacatggagtcaatttaaatatccagggattcgatctgactcagacatgccctcttttggattcggctttaaaccttggacccatcaaaaagcaattgcccaagcaaatgtgatttgtgactatctacaagaaactattcaagaaaataaaataaatgctcatattaactatggctataaagtcaataaggctgaattttcatcagatgaacagctttggaccatcacggctgaaaatctagcatcaaaagcattagtaaattttaaagcccgctttttactattaaatacaggctattatgattaccaaaagggctttactccagaatttgaggggattgagtcttttaaaggaaaggttattcatcctcaacactggccagtaggttttgattacactaaaaaacgtgtagtcgttattggtagtggagccacagctgtaactctactgccttctatggcggataaagcagaacatgtaactatgcttcagcggtcaccaacttatatggtttcttttcccgctgttgatccaattgcaggtatgttgaataaaattttaggctatgaaagagcttatccgattattcgcaaaaaaaatatttcaatgaaccgtgcattatataaagcttgtcgtaactatccgcaaattatgaagaagctattaattgcagatgtgcgacgaagacttccaaagggttttgatgtagaaacacattttacgcctaaatataacccgtgggatgaacgtttatgcttagttcctgatggagacctattcaaatccatttctgaaggtaaagcttccgttgttacggatcgtattaagaaattcacagaaaatggtattttattagaatctggaaaattgctcgaagctgatgttattgtcactgctacaggtttaaatatgttggcctttagccgtattcagctcacagtagatgacaaaaatattcaatatccagataccactattttcaagtcaatgatgctttctgacgtaccgaatctagcatttgcatttggttataccaatatcgcatggacattaaaagttgatcttgtttgggaacatttttgtcgtatgcttgactatatggatgaaaatggctacggcacattcaaaccttttatccaaaacaaaaaaatggaacgagtacccttcattgatttaagcccaggctatgtacaacgtggtctagcacaatttccaaaagctggaacagaaggaccttggacattacaacatgcctatgagcatgattttgaaagacttcgtaagggtcctgttaatgatcctgagttgctcttcataaagcggttatcgaaaaaaaaactatctgtaatgaatgagccttcaactaagcaaattaaagcacaagcttaa

SEQ ID NO: 46668 - DNA, 204 bp, Acinetobacter baumannii
atggctaagacatttcgtttcactgatgaggaagaacacgcattaaatgaaattgcattgaagctaaatagagacttagtgaaagctggtaagaaaccgcttagagatacagaaatattccatgaaatcgttaaacagacacttatcgacggaattatcgaagtgtcgagagacggtgctataaaagtagaaacaaaaaaataa

SEQ ID NO: 46669 - DNA, 1248 bp, Acinetobacter baumannii
atgatttgtgaatttgtgatttacatgctcgatcatctctgtattaatgctcactttgaatcaagcttttactcgttgagtgaaagtggtgagtatttttttgtagatgttgatttgcatagcttggacattccattggcaagcagggcagttcacaagaatgatgacggctctattacagcatcatctttatttcacccatacgaatcagttccgaccagttttactggcatgtctctaaagtgtttttttgattcgtcttatgcaccgtatattcagatcaaggctagtcctgcaaagctccgccaaggtcataatgtgtttggtgatgacgatattgaattaggggctatggagatgattgggtatttttatgaagcttatccaacgttagctcgcatgattgactggactactgcatgggtatcacacattgatgtgacttactctgcacgtgttggtgatcagaatacagctaagaaattgcatgacttcatgcgtcgcgtgactaatggtcagacgcaacttagtcaaaagcagatggataatacaatttattggggcgggcaacattcacgtttgattaatatcaaatgttacttgaaacataatgagtttatggaagagttcaaggaacaacaagcattggctaagaagtgtgataaagctgcaatgcgtgtcgtgaatgtaatgtctgatagtcgtttgattaattggactgttggcattatgcgttttgaagcacgtttaaaaaaacgttggcttgaacgtgctggtattccagttaatctttttgaacttattcgatttcagcgtgaaaaccctgagatattacaagcactttggactaaagcaactcatagcatatttgaagccttaaggggtcaaactatgaaattaaccgatgataaaagtgttcttgaagccatatctaaatccccagtagttgttacaaacagtgggaaggtttcccaaacacgtatccgaaatatttacgcaacattctgtctcatacgcgaacatggtttggaagagcttgcaaaaatgctccctaaaacaacattttacagacagatttcagaattatgtgaatgcggtttttctaaagcgtatttacagaacttgcatgacaacaagtcatcaaatgtcattcctttcatgaagctcgtagaaatcgacttttcacagcagttgccagactggtatgaaccgccagtttcgcaatttaactatttaaaacttgcatag

SEQ ID NO: 46670 - DNA, 324 bp, Acinetobacter baumannii
atgaataattcacaacatccaattatgactgtaactggtatccgtaaggctgctggagactttacagacgataaaggcaaaacaatcgagttttcaaacacggttgtaactgtgctgcaagaatattcagatcgtgagaaagaacaaggcgcaattggttttaaatcgactgactacaagattaaaggcgctcagttctttaatgattatatgcatcagaagttgccagccgaagctaagttgatctttgattgggatttcacaggcaaacaaccaaaggccgtgttagtagctttggattttgatggtgtggaagcagcttaa

SEQ ID NO: 46671 - DNA, 435 bp, Acinetobacter baumannii
atggacaaggcatgtgaactaattaataaaatccaagacttcgataaaaacattcatcagcttatagaagtctatgagcaatctaattccatcatggatgaaattgtcttagctgcgacttattcagaaattgatcttcgtgtttgccaaaaccttaaagattatttgaatggtgttgttcagaacaaattaaaccattgccagcagctcatcactaaaaaacagaaacagccacaggacaattcagtcgttcaaacatttgaacacaaaatagccaatgtactaaaaaacacggtacatccaaatcagcaaggttctcaaaccccaatttataatatgcgggaaacgattgatcaaatctgcatcatgtacccagacatagaggtcatagccacgcagacttgcgtagcctcgactgatacgcaagtcgagtag

SEQ ID NO: 46672 - DNA, 249 bp, Acinetobacter baumannii
atgagtagcatttcttttagttcaaaccttgattttatacaggctgctttcaatcaaattgccaagatcgttgctgaacatggtcatccatgcctagacgtatgttgtcctgccgaatctacagaaagatgtcttgatcatttggccgtggttgcaagtgactggtcatatgactattcactgattgatgcccacttagaaacctataaaaaagccaatgctgaaattcgtgaatttctaggagagtag

SEQ ID NO: 46673 - DNA, 336 bp, Acinetobacter baumannii
atgagcatttcaactaatattaaacgtctatgtagagagttaaatattaatcaaaaagagctatccaaacttgcaaatttacctgcaagtaccgttagtagtgcattaaaagaaggtagtgacccaagagcatcaacgattaaaaagattgctatcgctcttggtgttagctcagatatgatcctatttaatgatgaagagctaggaacaaatggtgatcttaaaattttattccgtgaagttgaaagatttggaggaaaagaacgggagcagttaaaagatatgctcaaaatgatgattgttcacaacaaaagcaaagaattaatgagagattaa

SEQ ID NO: 46674 - DNA, 258 bp, Acinetobacter baumannii
atgaagaaaataatttttattttagctatgttatcaaccctgacttttgcaaatgatcagcccaatcctagcaaaaaaaatagtaatgtaacaggacaagagcaacagtcaagacaacaaaaagcgtttcaggaaggtattgattttgcagataaaaataaaaaagagatagtaagtaaagaagaatttaaggatggtgaagcattcgcaaaagagatgtgtaaacaatatcctattaaatgcaatattaagaaataa

SEQ ID NO: 46675 - DNA, 1260 bp, Acinetobacter baumannii
atgaatggaatgtcaactaataggacaaatccgattttaataggaatgcttgccgtatttgtgagtaacattggtcacgcttccgctcttgaacaatcaggtcaatctattttgccatttcttgaaaatgggaattatgcagaagcaaatttttttgcagttgattcatctgtttctggcatagtcaacgatagagccgatcttgtacgagatcatcaaagtcgtgatacaggtgatattgcagaaagtacgcagttctatacagctgctctaaagttacaactcacagatcaattaagttttggtatgttatacgatcagccttttagtgctgacattaaatatccggcacgttctaataatagttactttgataatgatgttagccatcaaggtacatcagtaaaagctgatactcaaaatttaagtttattattcggatattctccatatcagcattttcaaatttatggtggacctgtttatcaaactgtaaaagcaaatgtaacgcttagaggtaatgcctatactcaggcttttaatggctataatgctaagtttaaacagcaaggtgaagttggttggttgttgggagggagctatcaactacctgatatagcattaaaagcagcaattacatatcggtctaaaatcaaatataaatttcaagtggaagaagatatttttggtgaaccattaaaacttgttgaaaatgagaaaacccaattagagactccagcatcattaaatattgattttcaaacaggtatttctgaaaaatcacttgtttatatgaatttaagatgggtgaattggaaagagtttgaaactcgtcctccacaatatggagctctttctgaaattttaatgaaagaattaaccaatggcgaatatattcaaggattcaagctcgattcttaccaaaacgatcaatatagtgcaactttaggaattgcacaccaatttacagaaaaatggagtacttcaacagatgtaagttgggattcaggtacaggtaatcctgcatcaacgatgggacccataaaaggttcatggtcacttggtttaggcgtccagtttaatccagctaaaaactactttataactggtagcttaaaatatttttggctaggtgatactaaaactgaagatgggacttattacttgccaatagagggaatcaagccatacgcagaacaggcaaatttcaaaaataaccatgcaattgcgtatggtttgaaatttggatattggttttaa

SEQ ID NO: 46676 - DNA, 1989 bp, Acinetobacter baumannii; identical to SEQ ID NO: 46156

SEQ ID NO: 46677 - DNA, 231 bp, Acinetobacter baumannii; identical to SEQ ID NO: 41935

SEQ ID NO: 46678 - DNA, 474 bp, Acinetobacter baumannii
atgattttttttgaaccagaacaataccaaaaaagatgcactcagctttttaacttataccgaaaacaaatttccgctctgctaccatctgcccaaattgagcatataggttcatctgcaatacctaatgcattctcaaaaggtgatttagacatttatattgaggttctacccgatcaatttgagtttgcaatagaacagttaaaaacgcttaattttatagaaaagcaaaatacattaagaacaaatgagctttgcatgctcgattcactcaacaacgatgatgttgcctttcaagttgtagtaaccggttcaatattcacatttttcttaacctttagagataagcttatagcttctccaacattagttaatgaatataatcaattaaagttagagtccacccacttagatcatgaccaatatagagcagtaaaatctaattttattgaacgcgttttaagtcactcctag

SEQ ID NO: 46679 - DNA, 1491 bp, Acinetobacter baumannii
atgagttattttgatcccaccctcatcatgtttatggtgtacatcgtagcaatggtacttatcggcttatttgcctaccgtgctacaagcgacttctctgattatattcttggtggtcgtagtttaggcagtttcgttactgcattatccgcaggcgcatcggacatgagtggttggttactcatgggcttaccaggagcgatttatctttctggtttatctgaagcgtggattgcaattggtctaattatcggtgcttggcttaactggttactggttgctggtcgattacgcgttcatactgaaatccaaaataatgcactcactctgccagattattttacaagtcgatttgatgaccagaaaaagatacttcgtattttctctgccgttattatcttggttttcttcgctatttactgtgcttcaggcatggtagctggtgcccgtttatttgaaaatttattcggtatgtcatataccaccgccatctggttaagtgctattgcaacaatcagttatgtttgtattggtggtttcttagcaattagctggactgatactttccaagcgggcttaatgatttttgccctcttgctcactccaatcgtgacttacctcgcaattggtgacacaactcagtttgtgacgcttattgaaactgctcgtccacatgcgtttaacatcatttctgatttaagtgtggtggccgttttatcttccatggcttggggcttaggctattttggccaaccgcatatccttgtacgtttcatggctgctgactctgtaaaatcaattcctgctgctcgccgtatcggtatgacctggatgattttatgtttagtcggtgctgtcggtgctggtttctttggtattgcttacttccagcaacaccctgaacttgcaggtgtggtaagtaaaaaccctgaaactgtatttatggaattgactaaaattttatttaatccatggattgtcggtatcattctagctgctattttagctgcggttatgagtacattaagctgtcagcttttggtatgttcaagtgcactaactgaagatttgtacaaaggcttcattcgtaaaaatgcatctcaaaaagagcttgtatgggttgggcgtatcatggttcttgcaattgccgttctagcaattgtgcttgcgggtaaccctgacagtaaagttcttggccttgttgcttatgcttgggctggttttggtgctgcatttggaccactcatcatcttgtcattgttctggaaacgtatgactttagaaggtgctttagcaggtatgatcgtaggtgctgttgttgtgatcggttggaaaaaccttttcgcaagcactggtgtttacgaaattattccaggctttatctgtgcatttatcagcatcatcgtagtaagcttgatcagcaaagcgccaaactctgatgtgactggtcgctttgagcaagcagataaactctataaagaaagtacataa

SEQ ID NO: 46680 - DNA, 180 bp, Acinetobacter baumannii
atgcacactgaatttgatcctatagtgtccgagttcgatagctccgaccatgaagcccaatacaacgcatggttcaaagccaaagttgaggcatcacaagcagatcaacgacctggaattccacatgatcaggtggttgcacgtctcaaaaaacgtcgcgaggaacgtaatcagcgctaa

SEQ ID NO: 46681 - DNA, 1188 bp, Acinetobacter baumannii
atgaaccagtctgatgatttagaataccaacttgatactttagccattcgtaccggacacactcgtagttttgaaggtgaacatggcgaaccaatttttttgacttcatcttttgtatatgaaaatgctgctgaagcagctgcaaaattttctggtcaggttcaaggaaatatctattctcgttttactaatccgactgtatcgatgttcgaaaaacgtttagcggctttagatggggctgaacgtgccgtggctacaagctcaggtatgggagcaattctatcgattgcgatggcgtatctaaaagcaggtgatcatgttatttgctcaagagcagttttcggttctattgtcgctttatttgaaaaatatattgccaaatttggtgtagatatcacatttgtggatctacgcgatttagatgcatggaaaaatgcagtacgtccagaaactaaactattatttgttgagtcaccgtctaatccattagctgaaatcgcagatatccaagcgcttgcagatattgcgcatgcaaatggcgcattacttgctgttgacaatagtttctgtacacctgttttacagcaaccgttaaagttgggtgcagatctcgtgatttactctgcgactaaatatttagatggccaaggccgtgcgttaggtggtgcagtggtaggtaaccatcaactcctagaagaagtttttagcgtagtgcgtactttagggccatctatgagtccgtttaatgcatggattttcttaaaaggattagaaactttacgtttacgtatgaaagcgcactgtgaaaatgctcaaaaacttgccgagtggttgtctacccatgaaaaagtagaaaaggtctattatggcgggcttccaactcatgaaggtcatgaacttgcagcaaaacagcaaaatggctttggcgggattgtttcttttgtagttaaaggtgagcgtgaaggcgcatggaaggttattgataacaccaaatttatttctatcacgggtaatttaggtgatgtgaaatcaacaattacgcatcctgctacaaccacacacggcaaactttctgctgaagcaaaacaagctgctggtattgaagaaggcttaatccgcgtttcggttggcttagaagatattaacgatattattggtgatatctcacgtggattagatttgatctaa

SEQ ID NO: 46682 - DNA, 1125 bp, Acinetobacter baumannii
atgtttcagtttatccaacagcaaaccgaattggttgatgttcttcaacaaatggatcaatgttcaacttatgggcttgatacagaatttattaaggttgataccctttggcctaaacttggagtatgtcaagtcaatgtcaacggaaatgtatatttattggatggagtgtctttagatttaagcaagttttggaaaaaaatctttcttgctcaacaaaatatttttcatgcatgtggtgaagatattgatttaatctatcactatgccgatgaacaaaacctattaaatgtttttgatactcaagttggattatcctttttgggacatggtttacaagtaagttatcaaggtgcattaaagctttgtttagagattgatattgaaaaggatcagattcgatcagactggttggcacgtcctttatctccgcaacagctatgctatgcggcaaatgatgttttataccttatgcaattggctaaccatattaaagatcagcttaaacaaaaagggctttatgagtatgttcttgaggattgtagtagcttaaccaaagaaattattagtgaaacaccaaccccattgttatatacagatgtgggcaattatcgtcattcacgtcgtcaattaatgcaattgcaaaatttaagtgagtggcgtgaagaggtagttagagcaactaaccagccacgtagttttatccttagaaactcgacgatgattgatttagtcgaaaaaaatccacgcaatagtttccaattatctcaagtaaaagatatccgtccgaatgttgtccgtgaatatggaaagattattcttgatcttttaaaagacttacctgttgaaggacactggccagctaaaattgctaaaccttttaaaattacatccaaagaaaccctaaataaaatggatgcattgattgctaaagcgatagaacaaacctctataccaaaagaagttttacttcgtaagaaatggttaaatgcgattcatcagcatgtgcttactaaaggtgatgaacaggatctcccagattatttattgggttggcgctatgagcttttaactaagccgcttattcagttatttaaagaagagaaagccagtcttttattttag

SEQ ID NO: 46683 - DNA, 330 bp, Acinetobacter baumannii; identical to SEQ ID NO: 46639

SEQ ID NO: 46684 - DNA, 435 bp, Acinetobacter baumannii; identical to SEQ ID NO: 26756

SEQ ID NO: 46685 - DNA, 273 bp, Acinetobacter baumannii
atgcaaactaatttatcaaatcaaacgtccaaacacaacttacaagagtttttagtgggtgatgtagtggtacttactgaagagtgccgtagttttaaatcaaatgatttgtttgaagttaaaaacaaaactttgaccaggttgtggactatcaaatcagagaatcatttgattctggtttcttcaaaagaaatccgcacagcaacagtagcagagctcaacgctaaacgccggctaacaagcgctgagcaagcattagcggaggtgtcatga

SEQ ID NO: 46686 - DNA, 267 bp, Acinetobacter baumannii
atgaccaaacaaaagccaagtgcaaaaaagacggtgtgcatgccgacacatttatctgagcctgtagctgagcatgtggcaagggaagcatatgaacgaggctggtctaacagccagtatttaagatggttagccattctggatatgaagcgttgtgaagatgacaagaatcttatgtcacaggtatctggaatacccagagaacgttttgatttatatgaacaaagaaaacaatccgttcggagagaacgcaataaaaaagcctga

SEQ ID NO: 46687 - DNA, 243 bp, Acinetobacter baumannii
ttgaatcccattaaatatgcttttgatgctgttggtggtcgatctaaagcagcagcgttactaaaccgtacatacatggccatgagcaagatggaaaaacgaggggtattaccaagaactgaatatacgggcgaaaccaaatatgcccagatacttgcaattaatagcggtggaaagtttacggctgaatggctacttgagaatgctaagccagagtcgtctatagcacaactgacctcatga

SEQ ID NO: 46688 - DNA, 726 bp, Acinetobacter baumannii
atgattatggaatctatagctgaacgcatccaagcagcacttgattatgcaaatctaaaatggtcagcagcatctctcaaattgggactatcagctcaagctgcatctaactggaaaaaggggaaaattggtaaggaaaccctgaaagagctagcggctttaactggagtaagtgccggatggttgctagatggttctggatcaatgatcgagttggctgacaatcctgagaatgctgatgcatataggccagttatggcatgggaagcaccggatgacctcgatcctaattcttttatgattattccgcatgtagacgtcaagttttccgcaggtaatggccgactggttgaatttgagccaacaaccaggatgacgggatgcgcacaacgcatggagtggtttcataagaaaaaagtttcacctaaaaatcttgtagaagtggatgttgatggtgacagtatggaaccaaggataccaagcggcagcgttgtaattatcgacaagtctgttaatagactagagcaagttcagaacagaaaggtgtatgcaatcaggtatggtgatgaactaaaaatcaaaagattatctcgtagatatgacggagccttgattattgatagtgataatcctagctatgaaagagagatcgttgagccgcaagacttggagcatattggcatcattggtaaatatgtttctcattcttatgatggtgaaatttag

SEQ ID NO: 46689 - DNA, 300 bp, Acinetobacter baumannii
atgatcgcaacacttaataaatccaaaactgcgctaacgattaatcgccaagagttcaaattagcattaggtaaaattggcgaaggtattgaaaaacaaatagcctcacttaaaaaagccaagcaaagttatgacgctactgaaatggcatgtgaggtcattaatgaagcaaatatctttgaggctataatcgaaggatttaatgaagctgaaggtactaatttaaaactatcagatataagtaatttggagcaagcgcaaggctgggttgatgattttctagaaaagtacagcacttga

SEQ ID NO: 46690 - DNA, 291 bp, Acinetobacter baumannii
atgaataaaaaatatatgccaccagaactttacgaatacaggcatctaacaagcactgaacaaatggcaattcatcagatgcttatttcttatgttcgtgaagatcaccgcttcaatatcatcatgatgggggctgcggagccttacaacttagtaaagataatcagtgtgaattttgaaaatgaagctgcaggtatatggattcacttcgaaactattgttggtgaaaagctggccttgcctattgatttcatttcaagaattgagttttcagggcagcaggaaatttaa

SEQ ID NO: 46691 - DNA, 216 bp, Acinetobacter baumannii
atgcaaaaaattgaagttaactcccgtaatatcagccatgttctttatcaacacttcttgttgacggtagtgcttagaacaggtgaaaggtttatttacagacttcttgaagcaaccacattcaaagagtttgttgattcagaagataaagataaattttatagaagtcatattgaggctaataaagaatttaagcggattcagctttttgtttaa

SEQ ID NO: 46692 - DNA, 291 bp, Acinetobacter baumannii
atgtataagatacctaaagtagttattcctgattccgctaaaaaatataggcctcccaaagttaaattaacgctagaagaaatcaagcaactttcagatgacgagttaatgatgcttttaagcggtgaaggccgaagcggaattatcccagcaccacttctacaagctataagctatgaattgacatcaagacagattaaaaaatccagcaaaccgcattggactgcttatgttggggtgctgctggccttaattgctgcagtcactggtgttgttgcaatactaaaatga

SEQ ID NO: 46693 - DNA, 441 bp, Acinetobacter baumannii
atgaacgtaaaagctactcctttcaactcatttgcatttgtcagcatggctgctcttgcaatctctggtggttctttagttgcttgccaattgcaaccagctttccaaacaaaagaagccccttctctatttacccctaagactcaaccaagtacttacggtgttttaaccgcaaaaatcacaggtaaacattctggcgttgccgtaatcaaattagatagcttccgtttaaacgttagctttgattttgaagctcatccagacagttacggcgttccgggttctgaatttaccgctgttgatattactcaactcacggtaaatgaaattactgacattaacggtaagtcatataacgatttcaccgaatttgaagacatccgcaacatcaatgaccttctaaaaggcttcatcgaacgtaacaagttggtggaggcttaa

SEQ ID NO: 46694 - DNA, 1122 bp, Acinetobacter baumannii
atggctctaccgattattactgctgaccaaactttattggttcaagcaattattgtgtacctatacgctgatccgggtttaggtaaatcatcgatgggttttactgcggaaaaagcaatttcttttgactttgaccgtggtgctcaccgtactggtgaattacggcgtggtgcagtcgtacaggtacaacaatggagtgatgtagctaaccttactccgcaggacttagcaccatataaaaccgtagtcattgataccgtgggtgcaatgcttgaatgcattaaaacccatctgttacttacggcaaataaccgtcaaaaagatggctctttaaagttaaaggctcaaggtttagcgaaccaaacgttcaagcaatacatcaatactttgatcagtttaggtaaagatgttgttttcattgcacacgcatcagaagatcaaaacggtgatcaaattatttaccgcccagatctaggtggtaaaaaccgtaacgagctttaccgtatcgcagatgtcatgggttatctaacaactgttactactggtgaaggtaaaaatgcccgcgttattaatttcaaaccctcacctacacatcatgcgaaaaactcaggtgctttaggtggtgaaactggtgaagtgtgggtaccagatcttaaagcacatcccactttcttggctgacctgattactcaagctaaagaccacattaacaccttaacgcctgcacaacttgcagcagctaaagcccaagaagagctagaaaactggaaacaaagctgtgaagaagctgagcatgcaggtgaccttaatcaattaactgagtcgcttgataaagaacacatgtattaccagaacatgcgacaagcaatgttaatgagagctaaagcattgaattgcacgtttgataaacaacgtggcacttggattagtccacctgaatttaacggtatctcagatcaacaaagagatgaacttcaaaactttattgctgaacgtggcctcgatgtaaaaacagtttgtgagcacttaggtatcgatgcccttatccaaattgaagcggcaaaacttaaggcagttaaacaagaaattgaaaccttagcgaaaacggggatgacagcatga

SEQ ID NO: 46695 - DNA, 690 bp, Acinetobacter baumannii
atgattaaaaaaagtaaccgccgtcagtggagcgagtttttctccaataataaaagacaggaattctttaaggatttcagtgtttcatcaggtaatgacaaagttaaaaagcataaagctagctcaaataaacatgtgtttttcccgtgccatgtagaaaaagaaaatgatggtgaaaatagtgtgtataggggaagtacaggtggtgttatcatttttggtaagcaatacatcacaatcaaattgccttatggattaagcgctaacgagatttggcgggctacaattgatcagaacggaaagcaaagaaatagtctttcagtaggtgctaaaaagtataaggacaaggttcaaaaacaatatggacctatgtttagagcacttaagttaaaagctatcgatcaactttgtgaaatacggttaattgttcagccaccacttaaaactcgttcttacagcgctaaaacttatccacgatttgatattgataactatccaaaactactaattgatagtgtcaaaggtgatggcttgttattcaaagacgacaatattttcataagtgaacaaattaagctggcagaaccatgtgaagagggttgtgtctggctttcctgtgtttttactgaagaaactgattggttgtcaaaaactgtagattttgattggttagctgggagaagcatttaa

SEQ ID NO: 46696 - DNA, 687 bp, Acinetobacter baumannii
atggcgaaaaagagcgatttgcaacgtcgagtacttattggaagaaaacttgcaatggcgcgtgatatgtctcaattacgtcaagaagacgtagcattagagatattcggtacaccacataaaaaccgaatgagtgaaatcgaaaatggtaagttaatgccagatgcagaattactttcggtgctatgtcaaaaatacggtgtttcagccgactgggttcttggttttactattgagccagaactagacaaaacagcttctgtagctggtattctgtttaacagtctaggtgaaatgatgagtgaatacactcaagccatggcatttcaattaagtatggctgcagcacagcatattgcatctttcccgaaagccttaactgtagagctgcttgaagcttcaaaggggctaattcaagcttgtttatcgcaagaccagtctattcaagaaaaggttttacctgaacttcacactcttatgcgtattgttcgtgagtgtgaacagaatcgtgcaaaacaaatccgtaatttagagatggctattgatgatgttttccagcgtgaagagaatgatttacagcaaaaagctttaattgatcttatccaaaataaaaaacgttttagcaaggcttctttacagcagcaagctttagatgaagtgaaacaaataggtctatttgctgaataa

SEQ ID NO: 46697 - DNA, 843 bp, Acinetobacter baumannii
atggctcgcaagattgaatactcggaagaaatttggaaccggctaaaagaagtctatgaatcttcacctaagattacatggcaagctttagttgatcaggttggcgaagaactcggttgtgagatgccttcgccatctgttgtgcgccgtaaagcacttgcagagaaatggaaaaagaaagctaaatctctagtcaaaaagacagcccaagagctcaataaagagattaaaaaattgaccaaaaaaaacaatggtcaagaagatacacaaactactgataaatcggaaaaaagtgatagtcaaaattctgtcaaaaaaacgtcaaatattgctgaatttaatagtcaaaactctaaaaataatggtcataacaacggcgggcgttctacagtcaatgagaactatctaaagtcagctttggttgtcaaaaataaccgtataagagctcataagctgggtgagttaattacagatactatcgatagtgttattcacattagagatgaagtccttaatctaaataatcctactgaagatgaattagcgctggttaagtttaaaatgggcttgattagtcaagtggttgatttgaacgttaaacaaagtatcagcatttctaacattgctcgaactgaggcaatgttctggggcttagatgtcgatgatcttaaagaccagtcggaagttcaagcacggcgtagttcagttatttcaggtgctgaagaaagaatggcaattgcaaaagctaatatgaaaaagaaaaaagaagaggcgtttatgcgaaagttagcgttaattgaagccggtgaagtagagcctgaagatgaaaaaagtgaaaattga

SEQ ID NO: 46698 - DNA, 261 bp, Acinetobacter baumannii
atgacattcattacagcagctgaagcatcagaaatcgctaccaaagcaaaatcttctgaacaagaaatcattgatattttatcaaaggctgttcaagacaatgctaaacaaggtattcgtcgaacaacttggagtttatcgcgtagtaaagttgaattaccaacattagaaagggtaaaggctaaattcgtagaaggaggatattccttccagatcctttcaaatagtcctgaaacatatactgtagatattaagttttaa

SEQ ID NO: 46699 - DNA, 2349 bp, Acinetobacter baumannii
atgccctatatcagtatggggcatttttttgttatgacggattcaaatcaccataatccagttttatcttacgatgagctgggcttcatcatcgggatgaaacgagttgaaaaaaaagttagtacgattgattcaaacattgaaaagatcattggtatccttactcaaagctttgaagagcaaaaagcacaatttgcacagcctcagcctaaactgactgaatttcaaaagatgcttaatgctgtcaataatagacaagctttagattttgaagatttattaaaagacaaagctaatccaatcactcaatcttttgttgtagcagacaagctggtcaaagactttgctgatgttttggaccaatcaattaatgaccttaaaacagtagataaaaaacaaatcaacaaatctaatgggcgaaagcccgctatagaaattaatagtcatgaagacttatcaaaaattataaatcctactgttcctgagcgtgatgaaaggggccgttttgtatctaatccaaatgaaccccaaaaccaatcatcgattcgtaaagttgcccaaacgatatctacggcgattaaaggagtaatgccgaactcaacacaaggtgtagatcctacagttgacgcaatcaatgaagttggtcatttactttcacctgtacgccgtgcagcaggattagctttgcggccattaactggattgatgcgtagtaaaaagagaaatgagccattacctcgtgaacaagagaaccataaccgcaaacaaataaagttattgcagcgtattgccgataatttggcgtctaagggtggtttgttaggttctctagggaaattgcttacttccgtgttatctgctggtggtgggcttctaggtggtgctctaggcaaaggaaagaaaggtgtagggaaattaggaaagggcttaggtaaatttcttaagtttggccgtggtctacccgtaataggtgcattggctgctggtgcatcattattagattggaatgaacaaagcacacaagaaaagggcggtactgtaggtagtcttgctgggggcgttattggtggcacggtaggatcaatattaggcccagctggtactttgattggtggtatggctggttcatggataggtaataaacttggtaccgcagttgcgccgtattttaaagagtggacagattcattaatagctgcagatgtaccaggtattattaatactgcttggaaaggatttgtaagttatgcttctaatgcttttgatcaggcaaaaaacactgcttcaaaagttgtagacggagttaaagatactgctggtgataccttagatttcattaaagataaatttaaccgatttaatccatttcatgatggtgttccaacatggggcattgggcaaggagtttataagccgggttttggtgcaaataaaaatgtacctgcttatggggctactaatgagcgtaacatttccagaaatcaagcggatatgattagtcaaatgtatgatggagctattaatgcagggtttagtcataaacaggctattgcactactcggtgaaataggccgagaaggtgactttagtgagaagaacatttttggtagtcataatgatccagcccgtggtaataacttggggatgttttcttggcaaggagcacggaggaaagcattagaaaaatatttatcagaacgtggtttaatgaataatgatggaacgatcaagcgttctaaggaggctgtgcaagctcaatttgaatttgctcgtagtgaaatgactaacaataagcgctggaaaaaaggattcttagataaaaaggaaattagtattgatgaagcaaggcctgaattaggtggtagaggctcttatgttgggtgggctcgtgggcaatctactattcgtggtgaagatggctcaagaaaaccttttgattggcaagctcaagaaaataaagcaaatcaatattctaaaatagctgagagaatttcccagtcaaagaaaaaggaagtactagatacaaaacaacagacctcaggactcaaacctaaagaggcaaaaactactgataatatttataaccaagctagtaaaaagttaaatagtgtcttgagcacacaaaaagctattgctcctcaagccgctaaaagtgcaaaacctcaattgaataatcaaagtaagttattaacgaatgttatgccatttaagcaacctttaaatactcctaatccgcaggaagttgttgttgtaaatcagaatagtggtaatatcgggcagaatgttaatgaccgtttccttgctcatgcatttactggtggtatcggaatggggaaatttgaggtttaa

SEQ ID NO: 46700 - DNA, 390 bp, Acinetobacter baumannii
atgaaaaaagtattgatatgcctaagtactattactgttacttcaaatacagtggctgcaaactgggggtttttcttagaaagtaatggggtcaaacaatacctagatcgagatagcttaaatattgattctaaaaagaatacagttagctattgggaaaagcgggaaggaaaactaggaactgaaaaaggaaagaaagttagtaagtatttagccttaaataaattttattgcaatgacaatgcttatcaaattattgagtttcacacttatgatgcttcaggattagctataacaaacgtcatccaaccttcttcaaaaattagaattgtacctgattcaatttctgaagatatgtaccttgcagcatgtgaagatactaaaaaataa

SEQ ID NO: 46701 - DNA, 4872 bp, Acinetobacter baumannii
atgtcacaaaattcagtcgttgctcctttaaatacttttagtcccaaagatttaactgcaaaaaaagcagaagttgataaatggtttagggaatatacaaatggtgtggttacagttgaccgacttgagacaatctgtagaagtgtccctgttttaggtagtgcctttgctattggcgatattattattgatattataagtatgatcaacaaaggtggtcttgataaagttgagatctttgattggttaaatttgggaattgatgtcattggattggtgccaatgggaccagttggtccttcggtacgtagtgcagcacggccagcattattttatgtaaagaatgaatcagaaaaaattatcaaagcacaagcaaagaaattaggcaaaaaaacattaacttctcaagaagtaaaaaaagctttaagtacagggtttaaagacagcgcaagtgtatttttaacgaccattatcgctgaaaatgtagcgggtactttagaaaactttgctaagaagggacagagtttacttaatcaaatactaaaagaagttggtaactggattgtcttattaacaaaaactattgatgatggctttaaaaaattagtaagtggctctttaaatggacttccaaaccttaagcgagcgggccaacagtctttaggagttataaaaggaatatttgaacttgatggaacccgtatagtaaacaatgccaaatatgctactgaaaacgttgcaaaaactgtgggtaaagggtatgtcaatttagccaatttagcagtctccgatgaagcacgagctaaagttttagctttaggcgcaaaaataaggtctataggtcaagttgctcaagcaaaagtaaacggtttaagtgaccctaatactttatggactattggttggctatttagcattatgggaatggttgctgcaaaacatcggcaaaagagagcgcagattaaggccaaagaaacaacaaaggccaatgcaagtcatccatcaactgcgactgacaaatcaaataaacaagctcatgccgagaacaatgccaatcagtgtaaaaactgtatgggtggaactggtggttcaattacctttgcaatgggtaccgagttctttactcatgttgatgcacaacttggcggaataattcaggacagcattagccgtacctatgtttcaaacctttaccagatggatgatgctatatttggcgcacgttgggttactccatttactacaaaaatttctcgtaaatttaaatatacttcaaagaaaaaagaccataaagactatttaaatgggcttgaatacatctgtttagatggtcgggcaattgatttgccagacctaaagaagggacaaagtatttatgatccgattgagcaatacacttatacagttttatcagatcagctgcatttaattgcctacggtgaagacgagaaacgctattatgaaaaatacggtgaggactatcgtctatcctatatagaacgtaaaaatggtttcaaagtcgctttacgttatgaccatgtttctacggataataaaacgattttatcggacattttatttaaacaggacgataacttgctggctcatttagctttgcaattaactccccaaggtttggtttccgatatttggaccatcaaaaatggccaattagatcgtgttttggcaagttatgattatgatcaacaaggtgatttggttcaggcaacaaatgagtttgcagcttcttattattatcaatatacccatcacttaattacacgttatacagatcttacacatcgtgggatgaacctaaaatgggatggtattttacctacttcaaaagccattgaagaatgggccgacaatgctagtcgtgcttcaaagctggagtgggataaaaatatccgaaaaacgacagtgttagacgttgaggggaatagcactgaacattactacgatattgatggctatacttaccgtattgtttatcctgataattttgaagagtggttctttcgagatgatgcgaaaaatataacactccatattgctaaagacggttcgaaaacttcttacacttatgatgagcgtggtaatgtcttgactacaactcaagatgatggtgcgacaagttattttgaatatgatgaaaaaaatcaactcactggtatggttgatgccgaacagggacgttggtttaagcaatatgatggttctggaaacctgatcaaagaaattgatccacttaagcatgaaactgcttatgtttacaatgcgatgggcctagtcacttccattacagatgctaaaggtggaagtaagtcacttaaatatgatgatcaagggaatttaattagttatacagattgctcaggtaaagagaccaagtggcaatatgatgagcgtggtcgtgtaataagcattgaaaatgcattaaaccaaaaagttgagtatttttatactgaacttaccttagaaaatcgggaaccaattataaagggtttacctctgaatgcttttggtcaacttgaaaagattaaacatgctgatggcacagaagaacacttcattcatgatgctgaagggcgtttactggcgcatgtagatcctaaacagaacatcactcgctatgaatatgatgaggcaggtttaattctgtctcgtacagatgctctaaaccataaattaaaatataaatgggatcgattgggacgtctcacccgactcattaatgaaaatggtgccagttaccaattcttctatgatgtcgcaagccgactcgttaaagaaattgactttgatggtaaggaaacggtttaccattacgatgaaaagtcgggccaacttgcaaccagtattgaagttgcatctgcttatggacaagacctcaaagaccgagctgcaccgaaagaccgaattcaacaatttatttttgacagtatggggcgtttagaacagcgtacagcgggttatggtcattatggtttagaacttgaagaaaaacagactgaagaatttgcctatgattatatggggcgaatcattcaagctaaaaatgctcaaagtaatttacaatggttttatgatgcggctggcaatttagtacaggaacaccagcaagattataaaatcaataaaacagcggtgtggaaacaccaatatgacgaaattaatgatcgaatcaaaacaactcgtccagacgggcaggttattgactggttgacctatggtagcggtcatgtacaaagtttaatagtgaatggtcaagactttgttagctttgagcgtgatgatttacaccgtgaaatcgcacgtcactatgccaacggagtgagtcaagaacagcaatatgacttagcaggtcgtttgaaaagccaaatgatgttaagtgaacatgaaaatggctatcaaaaccaatataagcgccacaacaatgcattagagcagaccagtcaactggtacagcgtctttatcaatatgacaaaacaggtgagctaacggcaattcgagatacacgccgtggcaatattgcctataaatacgatcctgtagggcgtttacttgaagcgagcagtaagttaggtaaagaaacatttagttttgaccctgcgagtaacattctagattcataccatagtcagaaagttcaaagccattcacaaaagctagacgaaacgagttatggttataatcgtttggttaataatgtagttaaagaatatttagaccaacaataccaatatgatgcttatggacaactcatacgacaaaaaacgagccaaggtgatttaacccttgagtgggatgtctatggccgcatggtaaagagccgtaatagtcaatacacggcagaatatcgttatgatgctttaggccgccgtattcaaaagtggagtaagcatcaccatactggtcaagagcagaacatcatttatggatgggatggcgatacgcttgcttatgagtcgacagaggaactgactaagcattacatctatgaaaaggacagtttcgtgccaatgctacaggctgtttatttaagtccaatagaattacaccaaactccagattggtcagatagaccttataatatacaccgagacccgctttggaaaactgaaaaagagggtaaagaatttgatgatgtatggttctatcactgtgaccacttaggtacgccgcaagaaatgactgaccatacaggtgcaattatttggaaagctgaatataaagcttggggcgagtgtaaagcagaggaagccaagtcgaatttcttcgaaaatagtgaaattatttcaaataatatccgttttcaaggacagtattttgatgaagaaacagggttacattacaatcgctatcgttattattcaccgtatgtaggtaggtttgtcagcaaagacccgattggattgttgggtggtaataatgtttatgtatatgctaagaacccgattacatggatagatagtaagggattatgtagtaccaccttaaacagaaatttaggaggagtaaaaggtgatcatttacaagctcatcatattattcctgaagaaatttgggccaagcgcaaagattttttagatgatattggtattggcggaaatagagataaagcagaaaatggcgttttaatgcctgacagtgaagctaaggcaaaacaaatgaagcgccaattatatcattgtgggtcacatccaatttattctgcaggtattaatcaaaagttaggacaaatacagagagaatttgaaagtaagaaaataaccgcttctcaagctagagataaagtggcaaatttacagtcaagtatgagacttgttttaataacacctggtacaaaaccaatcagattaagttag

SEQ ID NO: 46702 - DNA, 648 bp, Acinetobacter baumannii
gtgttccaaggcggcgcatcggcaagtgttaaatctagtttgccaccaccaccaaaacgtgcacaaggtgtacttgagcttttgcacgactattcacatggagcttttgttaaaggagctggttataccgtaactgataatttgggcaaagtcgttaatggaaagctagacgataaaggatttgctcgtgtttcaggtttggcaacgggctcagtgaaggttctttttgatccagatccgcgtaatccttgggatgaggcaagtgattttaaacgcaaggtagagtggccaaatcaaaatgacgtagaaggtagcattggtattgaatctggcagtaaagggttaactgaaacattgaaaaatgactttaaaaagttgagtcaacttgcgagcaatgtgaaatctgtgcagcagaagattgaatcggttaaaaaaatcaaagatcaaggtgctaaagcattattgccaatggcgatggaacaggttttaggggggagtgatggatctaagttaagtcaatcatttgttagtcaaaatagctttatgccttcaagtcagcagagtaacccactcagaagattggctcaagcaagctctgacaaaacagcaataacaaaaatccaatcaccttttgaaacgtttgtataa

SEQ ID NO: 46703 - DNA, 462 bp, Acinetobacter baumannii
atgaaattagcagaagctctcttacttcgaagtgatcaacaaaaaaaaattatttcactaaaacaacgtatcaatgcaaatgtattggtacaagatggtgatcaaccatctgaagatccaaatgaactactaaaacaagtattttctttaattcaagaatttcaaaaattaagttatgcaattcatgaaactaatgctttaacaaaattaaatgatggccgttctctacttgctttattgactttgcgtgatgaatttgtagaacagcacaaaaccctaactgcagcaataagtaatacatctcgtgaatctgatcgttatagtacgcgggaaataaagtggcataaagttattccagtttcatcattacaaaaacaagctgatgatattagtcttaaattacgtgatttaaacgtgttaattcagtcgactaattggaaaattgatttgattgaagcttaa

SEQ ID NO: 46704 - DNA, 2412 bp, Acinetobacter baumannii
atgctaaataaaagtaaactatttttagctttaattactttaggggcctcgaaaattttattggcagctgaagggcctgttactaccttaaatacaatagtattaactgcacaatctgatgagttagggtctgagctgttaggcaaaagtctaaatgttagtaatcagtttattgatactagtaaacttaaacagcgttcgacaactctaggggatgccttgggtacggaattaggaattcattctaatcaatatggaggtggagcatctactcctattattcgtgggcaggaaggaaaacgtattaaagttttacagaataatgctgacgtgttggatatgtctaatatgtctccagatcacgctgtcacagttgaaccaagtttagctaagtctattgaaattatacgtggtgcaagtacccttttgtatagttcaaatagtgcggcaggggtagtcaatgtcattgactataaaattccaacccaaatgcctcaagacggattagagggtaatactacattacgttttaatactggcagtaatgagaagttgaccacagcaggtgtaacagttggcttaagcccacatgtagctttacgggcagaagggttatatcgtaatgctggtaactataaaactcctcattaccagtctagctcttataattctttagaagatcttgaaaaccaaaacagtatttataaaaatttaaaatatttaccagaaagctgggcagagtcgagagtaggtacgcttggattatcctggatagacgataatacttatttaggagtttcttatacacatcgtcatgatgaatatggtttaccagcccatagccatttatatgaaggttgtggtgcctctgcaatcggtatcgattcacgaattagtggattaaaaaattatcttttatattatcctcaattgatggatgagcaagatattaattacataaatccacgtcctgattgtcatcagcataatcatattcatgaaactaatttctctcataatgctccttatattgatttaaatactcgacgttatgatgtgcgtggagaattcactcaaccatttaccggtattgacaaaattcgtacctcattgagttatatagattattttcacaatgaactcgagggagataagattactaacttttttaaaaatacaggaaaagtaggccgcatagagttatcacatcagccattaggggaattaaccggtatcttggggctacaatatttggaacaggataatagtgctttatcaccagtccattctcaagaaggccataccacctatctagataatcagcagctattaaatcgaaatgtcactaaaaactttagtgtatttggcctagaaaaatataactggaacgactttactttcgaactaggtgctcgtatagaaaagcagaaagttagtatggattatgatatagaaaaaattaaagattcaatgaaaccttggcctaataaatataacagtccttatgtagaaaaaaataataaaatcagggctcaaaatttaaaatctattttagaagctgttcaacctaacaaagaaacagctttttcttatgcaggtacagtccactggagatttgctccaaattatatcttatcattaacaggtacacatcaagaaagattacctaatgcacaagaaatgtatactcatggtatgcatctcgctactaattcttttgaaataggtaaccgctttctaagaaaagagaaatccaataatttagaaatcagtctggcctataaggatgatttacttgattatcaaatcagtacttactattatgattttgataactatatatatttacagacactcaatgaagttttaggaactacaaaagttagagatcagcatacactacgtattaatcattatagccagtctgctgctaatttttatggattagagggcaacatagggtatcaatttaattctgtttatcacggctctctttttggagattatgtgaaaggccgtttaacaaatttacctgatgctgtaattgcatacgatatctggaatagagaaccgactttagctccccaaaaggatcgttacactcctagattacctcctgctcgtttgggtacacgactaaaagctgattttgatgaatcgcttaaaggtgaaatagaatattatcgagtctttaaacaagataatatttctaaatttgagcaggttacatcaggttataatatgcttaatatgactttagcatataaaaataagctatctcacacagaatatgatttattctttaaagcgaataatttacttgatcagaaagtctatgcccatgaaacatttttgccatatattccccaaattggaagaaattttagtttaggcttaaatcttaatttctag

SEQ ID NO: 46705 - DNA, 315 bp, Acinetobacter baumannii
atgagcatggttagatactcacacaaagagctgaatgagaaatttggtgagaagcaagatgctgaaattcaacgcttgcttgctaaaggcacggttcctgatgatcagctagatctatcagatattcctgaaattacagactggagcaatgctgtacgccaaaatcaattttaccgcccagtaaagcaacaaacttcaattcggttagatgctgatgtacttgcttggttcaaagcacaaggcaaaggttatcaaacacgtatgaatgaaattttacgagatgctatgctaaaagaattaaaaaatcatcaataa

SEQ ID NO: 46706 - DNA, 288 bp, Acinetobacter baumannii
atggaacagtattttgaatgggatgaggctaagaatcgaaagaatcagaaaaagcatgatatctctttcgaaactgcaagccttgtttttgaagatccattacggatctcaatccaagacagacataccaatggtgaagaacgttggcaaaccattggacgagttaaaggcgtactaatgttattggtggctcacaccatttttgatgaagatgactgtgaaatcatccgaatcattagtgcaaggcaagtcactaaagcggagcgaaacaaatatgagcatggttag

SEQ ID NO: 46707 - DNA, 1146 bp, Acinetobacter baumannii
atgaatatagtatttcaatattataaaggttcaggtggagctttaattaatattaagcatatgttggaagcaataatattacaaaatcctaattggaattttgtaatcgtttgtaataaaacatctgtgcttagtgaaattgaaaccccttataataatctcacttatgaatatatagttgagagtaatttgccaagtgaaattggtagactaatattttttacctttaaattaaaaaaaatagtagagaaatattctgctgatattatttggtcaatgaatgttggaccatatgttaaaacttcggcatatcatgtattatctttaaataatgctttccaagtttgtgacgctaatttattagaaatacatcctagtggctcatttagagttagtcttttaagattcttttttagacttagtatgcgatatactaatttaactatattacaaacaccatttatggaaaaattagttaaaaagaattttcataatactaaaactgtcgttgcaaaaaaatcagtaggtattagtaataatttatctaatgataaaaatattggttgtaaaaaaataaatccagatgattttaatattatttatgtcgcaactgactatccctacaaaagacatttattattattaaaagctttaaatttattcaataatgaaatacctaatttaaaattaattgttactctaacatatgagcaatgtttaaatatcgattttgacttgacaaccgagctacatcgtaaaggaattttaatttgtctaggttgggttcagcccaaagaactagaatctttatataagtcttcgaaaattgcggttatgccaagtctaattgaatcattgagctcatctcatattgaagcaatgttttggggaattccacagattacctccaatcttgcatatgctaaagatttatgtaaagaggctgcttattatgtggttgatcatgagtcaccacaagcatggaaagatgcaataattaccttatacaataatccgagtttatatgagcagttgatccagcaaggatatcgagaggctaaaatgttgcctcagagttggaatgatgcagcaaatactattagcaaagaattttctaaaattatgggagaggacaagtatgtttaa

SEQ ID NO: 46708 - DNA, 234 bp, Acinetobacter baumannii
atggcaaccccagtaatctgtaatcctattggtgatattactttgtatgctcaacatggagaaaatgcatgtattgttaacgatattaatgaagttgcaaaatttctaggtgatgttttaaaaaacaatcaatataaatatatgcaacagcaatgccaagaaacaattgagttaaaacttagtaataaagtctatagtaatcagttattagagttttttagaagattaaagtga

SEQ ID NO: 46709 - DNA, 369 bp, Acinetobacter baumannii
gtggctttagcaccaccacctacagcagcagcattttcatttgtagcctcagctcctttaccaattgccgctgagttatcacctgttgcctgcgcaccactaccaattgctgcagaactgttcccagtcgcttttgctccttcacccggtttattaccagagccaattgctgttgaatttgtacccgatgccaatgagttaatacccattgccgatgcgccatcacctgttgcttgtgcaacagcaccgaatgcagcggcgcctttacccgaagcatttgacatgacgccaaaagcagaagaagcatcaccagttgctttagaagtcataccaaacgcagaagaaaacgctcctgtacctacagcttga

SEQ ID NO: 46710 - DNA, 402 bp, Acinetobacter baumannii
atgaataaagtttacaaggtcatttggaatgcttcgattggagcatgggttgcaacctctgaaattgcaaaaagtaaaacaaagactaaatcaaaaactttaaatctatcagcggcagttttatcgggtgtaatttgttttgctccaaatgcttttgctgggacaaataccgaagggggagtaggccaaggaacatccatttctggtgcaacttcatgtcgtgaaggaagcgctaatacggctaatcaaaaagatattgctattggctgcggagcacaaactcaagaccgaactggctctaacatcgcaaatcgtaataatccatataataattctaccggtgcttatgctggcgcaatgaaacaagggggcaatcagtgttggtacgggggctgtggttga

SEQ ID NO: 46711 - DNA, 348 bp, Acinetobacter baumannii
atgacagataaatccaaatggtttgtttttaagaaaaatgatcaagtttttggatgtttcaggattaagcctttttctgatcctgaatttggtgaggcctataaaatgctttgtaccaaaaaaagtatttttagaatgagtgccatgctatcagcccaagagtttgccaaaattatcgcaactcatcttatacaggattgggaaaatattgaactttcaaaaacaggaatagctggtgaaaaagaaacgcgttattcgccaaaatcagcttatcaattattaatgtatggagatctaggggctgagataacttcatggatcttggaaaagtcaaaaagtattgcctag

SEQ ID NO: 46712 - DNA, 150 bp, Acinetobacter baumannii
atggagcattttaaaccaatagtggagcttatgaaagtgtctattgaaaagtatggcttatggcagacaattattgcctttttaattttgttttccataccaattctaatctggaaattacctgaaatcattgcagcgattaaagcctaa

SEQ ID NO: 46713 - DNA, 948 bp, Acinetobacter baumannii
atgtctagtttagcattaagctttaacgaagtgaaatttaaccctgttgttcgagataatggacaaatttacctaacagcgggtgagttggcgcaggcgttgagctataaaagtgttaaatctgtaagtaatctttataacgcgaataaagatgagttcacagattcaatgactcaaatcatcgaatccgtgacagcagggaatatcgaggtcactgattcagtgacctcgaaacaaacacgaaatttaaaaaagaaagttcgagttttctcactacgtggttgccacctaatagccatgtttgctcgtactgctgtagcgaagcaattccgcaagtgggtacttgatgttttagataaagaagttggcacaccagttgccaaaacccacaaatccgaacgtgaacccctaaccaatgctgtaaatcttcttgtagctaaaactaagcatttgaattacagcgatgcttataaattagttcatcagcgtttcaatgttcagcatattgatgaaatcccatatgacatgattcctgttgcagtggaatatgttcatcatctgattgcgatgtacagtagtgcagagaagaaggctcaaggttctttgtttgataatgaaacattgggtttggttaaggatctggtagatgcaattatttcccaaaactttgtgacaagcaaaatctatcgtgcaatacacatgcttagtaatgaacaaggtcactacttagctgaatatgcgtttaaaaccaatattgcagttctaaaactcactcgaacaatggatttaagaggacctcttaatagaaaaatcattagtgatgatttaaaaaccataagctacacaacaggtaatcaacattatggcgaccgttggtttcacccactgatggagtcaagtcgattgatggaagtacttgaaatttcaggtagtctgattcgtcactaa

SEQ ID NO: 46714 - DNA, 381 bp, Acinetobacter baumannii
atgtctcaatcagatttaatcaggtttcctgccagattagacccccaaatacatagtgatctacttacttacgtaaagcagcaaggcgggtcaattaatacagctattaataatctattgcagtttgcacttagatacggccttcaaggtgaaggtagcttgttagactcttatttacccgatttgaaaacaaacttaggtaaagctgaatttattattgagcaatttattcatagtgaaatctcatctgaatttgatgatcttaccaatggtcaaagatatcaggattatatttcaaccaaaatagaagaacttgaaccacatgataaaaagcttctggccgagttagctggttccttggctagaaaaaaagcaccctag

SEQ ID NO: 46715 - DNA, 744 bp, Acinetobacter baumannii
atgatattggatgactatctggggcaagccgctaatagcaagaaactcgcacagattgctattaaagaaaggcgttttgacgatgcgtggaaacatttaaacgatcaaaaaaattcctatttaaagcatgctagtaagatgggtttttctaaaacagaaacactggttctagactcctcaccacatgaagatatggcaaatgtcttaagactagagggcaagcataagaatgctttaagcaatatatcttacacttataaggtggcttatacagcaaatcgaccaattattacattagagaaaaaattagaggcttattacaatagggcctataaaaaacagccgtttaaaagatttttatcattacttaaggctctacctaatagtgactatatttctgttcgagatttagttgaaatctacttccctctgtctcccgatgatgatgaagtagcttcaaaagaggggaatttaagcgaacaggaaattaaaaaggtaaatgataactttttgaagcaaagatctattgctcgcagtaaagagcatataggcattccaccaccgccgagcaataagtcagttaaaacagtcaaaccaagccaccctgaacccaagtatccaactaaagttattgattcgaaaaaagataataatttgattcttagctatccagcatctgaatggataataggattaatggtgggtgtagcattgttgatcgggttgatttggttgctatcgtaa

SEQ ID NO: 46716 - DNA, 321 bp, Acinetobacter baumannii
atgaaaaaaatattggctgcgggtttaattggtcttgggttggtggggtgtggtaagaaagaaccaaccgcacaagaacttaatgcattcaaagaaatgaaggctcaagagtcagtgaaggccttattaaaggaccctggttctgctgaatttagaaatatgaatggtatgtgtggcgaagtaaattcaaaaaatagctttggagcatatacaggttttgttcgttttattggaacacctgatcttacaataattgaaaatgaaacttctcaagtagatcaaacgacctttaacgaagtctggtcaaaagtctgcaagtaa

SEQ ID NO: 46717 - DNA, 459 bp, Acinetobacter baumannii
atgtatcactatgaagaatgcggtctgagcaatatttggctgcgcaatggatttacaattgaaaatgatgaagactatggtgaactcgtatctattgaatctgttcatgagcttcataatgccattgggttgttcttaattacgcaaaagcctgacttgaatggtgaggaaattcgttttttacgtaaagaactaaacttgtcacagaagaatcttgctgggcttttaggagtcagtgagactagtattagacattgggaagctgatcgcggtttaattggtaaacctactgagctattacttcgtgcattatataaagagcatgttcaaggtgatggcaaactaagaagtatgattgagtcattaaatcatcaggaacgaactttagtaccaagtgaaattagtttttcatatggaaataaccattcatggcatcaaaccaattgtgaaatagcttag

SEQ ID NO: 46718 - DNA, 300 bp, Acinetobacter baumannii; identical to SEQ ID NO: 45476

SEQ ID NO: 46719 - DNA, 2007 bp, Acinetobacter baumannii
atgagttatctatttttgtcgtgtacagagaaaacttttaatcagtctggtgaccgaagcgaaacgaccaatgcttttatgggggttacggctggactaaatttagcaggttggcaattacgtcataatggtcagtggcaatggcaagatacgcctgcggaaaatcaatctaaatcagactatcaagaaacaagcacctatttacaaagagctttccctaaatatcgtggtgttttaacactcggggatagttttacaaacggcgaagtatttgactcatatggttatcgtggtatcgatttttcaagtgatgatcgaatgctaccgaatagtatgcttggttatgctccacgtatccgtggtaatgcaaaaaccaatgcaaaagttgaagtacgtcaacagggccaattgatttaccaaacaactgttgcaccaggtaacttcgaaattaatgacctttaccctaccggctttggtggtgaaattgaagtttctgttatcgaagcgaatggtgaaatacagaaattttctgtgccttatgcctccgttgtacagatgttacgtccaggcatgaaccgttactcattaactgtaggtcagttccgtgatcaagacattgatctggacccttggattattcagggcaaataccaacaaggtattaataactatttaaccggctataccggaattcaagcatctgagaattacgctgcaatattgcttggtgctgccgttgctacaccaattggagcaattgcattcgacgtgactcactctgaagctgagtttgaaaaacaggcttcacaatcaggtcaaagtttccgtttaagttatagtaagttaattacgccgaccaacacaaacttaacacttgcagcttaccgttattcaaccgaaaacttctataaattgcgcgataccctacttatacgtgacttggaagaaaaaggtgtaaacacttatgctgctggtcgtcaacgtagtgagttccagattactttaaaccaagggttacctgagggttggggtaacttctatgtggtaggttcatgggtggattattggaatcgtagcgagagtactaaacagtatcagattggttatagtaataactatcatggtttaacttatggtttatctgcaattaaccgtaaggttgagtacggctcaaatgatgcgtcgcatgatactgaatatttaatgacgctttcattcccaattaactttaagaagaattcagtcaacgtcaacgttactgcttctgaagacagccgtactgttggtgcaagtggaatggtgggtgatcgctttagttatggcgcttctgtgtcacatcaagactatgcgaacccaacatttaacgctaatggtcgttaccgtactaactatgcaactgttggcggctcttatagtattgctgactcttaccagcaagcaatggttagcttaagtggtagtgtagttgcacattcagatggtattttatttggacctgagcaaggccaaaccatggtacttgtgcatgcacctgatgctgctggagcaaaagtgaataacacggttggtctaagtgtaaataaagcgggttatgcagtagttccttatgttacgccataccgccttaatgacattactcttgacccacaagaaatgtcgagcgaagttgaacttgaagaaacaagtcaacgtattgccccatttgctggtgcaattgcgaaagtagattttgcgactaagacaggttatgcagtttacattaatagtaaaactgctgatggcaacagtttaccgtttgcagcgcaagtctttaaccagaaagatgaagctgtaggtattgttgcacaaggtagtatgatttacttacgtaccccacttgctcaagatagtctctatgtaaaatggggcgacgaaagtaatgaacgttgttcggttgagtacaacatcagtaatcagttgcgaaataaacaacaaagtatagttatgactgaggctgtctgcaaatga

SEQ ID NO: 46720 - DNA, 1011 bp, Acinetobacter baumannii
atgaaaagaatattattaacgggtgctctatttaccgcgggctttggtgtgtatggggaagcgaatgcttcatgtattatagttaattatcaaccaaatgatgttcgcatggcagtaggccgtgttgttgtacgtcctagtgatccagtgggtgctgttttaaggaaagcaactttccctatcagtagtagcggtacacaagcgatgtattgtgatagtagagatactgtagttgctcaattaacacaagcttatccattaagttccttaggcaatagcatctatacaaccaatattcctggcattggtattcgtttatatcgtgaagcagagaatagcagtaatttttctggttattacccttatgaacgtggcggtatttctggcactcgttatttggcatcaggttattttgttgtagaaatcattaaaattgctccacaaactggttctggaacattagtaccgggcagatatagtagttattacgtccgtggctttccaaatcagccatttttaacaagtactgttgatgctaatgcaattaccattgcttcttcttcatgtgaaattcaaggtaatattaataaagttgtacagttgcctacagttacaaaggcaggttttaaaggtgttggctcaactcaaggcgaccaaacttttgatatgaacattctctgtaatggtggtatcaaccctactggctatgaagagaaaaaccttattagtttaacttacgactttacccaagatggtaccaacaatcaggttttagcgaatactgctccaacatctgaaaaagcaaacggcataggtgtacagttactctggaattatcaaaataaaaatcaagtcatcaaaaaaggtgacaaattagccttaggtacattgtcttctaaccagacaattcaatataacgtaccgatgactgcccgctactatcaaactgcaacaaatgtgactgctggtaaagtgcgtgcaatggctactgtaactattgaatatgattaa

SEQ ID NO: 46721 - DNA, 927 bp, Acinetobacter baumannii
atgtatgaggtatcttctgacaatacgaatacagtaccgcgtaacgaatctaaccaaaaagtagcatctaaaagcatttcatccactacaaagaatgaaaagttagcgtctcaaactctcttggctcaaactacctcccttaattcctctgccccagtctgtaaatataattttgatgcgactcaagaagattacgatctttggaacaatgaacatactgactattggccaattaaaatattcccattaataattggtcaaaaatttggttttaaagtagaacctacgccagaaagtcagtatggctacgtagattatgtagctacaagtaaagtagatagtctgaattcggttaatgaaattggtgatttaataatacctcacacaggtattattgcatttgaaatggaacttaaaattccaacatcaactcttgggagttcatcacttggaaattctacttattactcctctagcattggatttagtggggtaacaaataatggttatacaattagatccaactattggtttgatatgggggggtatgatccagattttggcgagaatcctgctagattaaactattatgtagcttatcgacttagtgataatagtgggcctaacaatccatattataaaggtcaaaacatgacaaataattcaaatgaataccaaagattagggatgtatattaatcagaatactaagcaggttggcgttattttaaatggtgttgatcaggggtatcaatctactttacctgctccactagagaatatacgtttttctgtctcaagtagtataggaatatattctaatcaattatttggacaagagttgtctaatgaactcattactgaccgtaatgcgctacagtttaactaccctcagggcacaacagacatgtgtggtaatgccatctaa

SEQ ID NO: 46722 - DNA, 441 bp, Acinetobacter baumannii
atggctcaaacagcctctaaaaaatggctaggcataggcttagtcgttgtagtcctttttgttgctttgttcttatggaataaacatcgacaaagtggctcaaatgaacttgtgattggtattagtccaccatttgcaaaacctttacaagctgctgccgatgaagcaaagaaacaaggtttaaatgtaaaacttgtcgaattttctgactggaataccccaaacattaccttaaatcatggggatattgatgcgaactttttccagcatcaacccttcttagacaatgcaattaaagaaactggctttaagttaaaggcatttgcggtgggtgcagcctcacatgtgggactgtattcaaagaaatctctgtacacgacaaaaatagataactcattgagatgtgtcatagtattcgtcgttagaaaacaattattatga

SEQ ID NO: 46723 - DNA, 1413 bp, Acinetobacter baumannii
atggcagatttcaaagcaaaagagattttattaaacgcctttgacatgaactgtgttgggcatatcaatcatggcttatggacacatccacgtgatgaatcacaccgctttaatgaactgagctattggacagaacaggccaaaactttagaaaatggtttatttgatggtttgtttatcgctgatattaccggtgtgtatgacgtctatcaaaacggtatagatctcactttaaaagagtccattcagcttccgagccatgacccgtctacactcatttcagcaatggcggtagtcactcaaaacttaagttttggggtcactgtgaacctaagctatgagcatccatatcaatttgctcgccgctttgcgagtcttgatcatttaactcaaggtcgtattggctggaatatcgtgacgggttatctagatagtgccgaacgattaattggtcaaaaaggtttaaaagaccacgatgctcgctatgaacaagccgaagaatttttagaactttgctacaaatattgggaaggttcatgggaaaacgacgccgttaaaaaagataaagtacagcgtgtttttacagatccatctaaagttcacaccattcaccaccacggaaaatattaccaaagtgaaggtgtttttcaggtgtctccttctgtgcaacgaaccccaacactctttcaagcaggtgcttcacccaaaggtatgcagtttgcgactcgtcatgctgagtgtgtatttattggcggcgacaaacccgaaaaaatacgtgaacaagtgaaaaagattcgtgctcttgcagaacagcaaggccgttcagcgaacgatattaaagtgtttgttggcataacggttgttgtggccgaaacacatgatctggctgtacaaaaacttaatgaatatcgtcagtatgcaagtcctgaagcaggcttagcgcattatgcgagttcaacaggcattgacttaagtaagtttgctgacgatgaagcgattccttaccaaaaaagtaacagcattgtttcgattaccgaaaagtttaaagaacagcaaatcacaaaaaatgacttaaaagctcagcatgttttaggtggccgttaccctctcatcgtaggtagtggcgaagaggttgctgaatacttaattcatcttttagatgagactgatattgatggctttaatttgacacgtacagttgcacctgagtctcaccatgactttatacgcttggtcattccagagctacaacaacgtggtcgctataaaactgcatataaaacgggttcactacggaacaaaatttttaatcggggtgatcaattaccagaacagcaccctgttcaagcgttccgatgtagtccctataacaacagcaaaaacttaacaaaaattgaagaaataaccgcttaa

SEQ ID NO: 46724 - DNA, 1224 bp, Acinetobacter baumannii
atgacttcatatcaatcggttcaaaccaaacaaacatcggcatcaggccaagcacatattattcaaaatgatgctgaagcattagaaattgccgaacaatttgccgaacaatttaaaaaaaccgcagttgagcgagacgctaagcgaattttaccgtataccgaaattgatgcattaagccagtctgggctttgggcaattacagtaccaaagcaatatggtggtgctgaagtttcaagccatacagttgccaaagtaattgcgcttttaagcggtgcagatggttcaatcgggcaaattccacaaaaccacttctatgcattagaagtgttacgcaatacaggtacagaaactcagaaacaacgtttatacggcgaagtgttaaatggcacccgctttggtaatgcacttgctgagtttaaaactaaaacttcaacccataaacaaactaacattcgtccacatgaaaatggctatcttattcagggtgaaaagttttactgcacaggaagtctatttgctcaccgtattcctaccttagttttagacgatgcaggacgtgagtatctggcatttgtaaaaagtggttcacaaggattaaaacttgtagatgactggtctggttttgggcaaaaaaccacaggcagcggtacagttaaatttgatcaagtttttgtcgatgcagatgatgttattccttttgatacagcatttttacaaccaaccttagtcggaccttttgcccaaatcatgcatgcatcgattgaggtaggcattgcacgtgcagcctttgaagaaagcttgcaaagagtgcatcaagctcgcccatggattgattcaaatgtagaaacagccaaccaagatcctttaacgatttatgaattaggacgcattgcggtagatgtacgagctagtgaagtcctattaaaacaggcagctcaatcaattgatgccgcaaaaattgaaaccacacctgaaagcattgctaaagcatccatcgatgttgccaaagtacgtgctcatagtaccgatatcgcactcaaagcatcgtctaagctgattgaacttgctggtagccgtggtagtcagtctcaagatggcctagaccgtttctggcgtaatgcgcgagtacatacgttgcatgatgccgcacgatggaaatattactttattgggaactacgttcttaacggtgtgcttccacctcgtcgggggacattgtaa

SEQ ID NO: 46725 - DNA, 891 bp, Acinetobacter baumannii
atgggtacagaacaacaaaaacaatttatcttttcagaaatattagccggtaaacgtcttgccaacggtggtcccgaacgaaatacccatgactcaaaaaccttaaaaaccacgcttactattgaaaacggcaaatattttttaaacggcgaaaaattttattcgacgggaacaagttttgcgcattggcttgcaattaaagcaattcatccagaagaccatgtcgttttagtgattgttaaccgagatgctcaaggcattgaaattattaatgactggaatgggtttggtcaacgtactacagcgagcggtacagttaaattaaatcatgttgaaattaatcctgaacttatttttgatgagcgtttattaacacaagttccaacctatcgcggtgcgtattcgcagttattacaagtggcaattgatgtcggtattgcggaagctgcttttgaagatactttatcgactatacacaaagcgcgcccaattattgatgcaaatgttgaaaaagccagctttgaacattacaccctacaagaggtgggtaagttaaatattttactcgacgcagcaattttactgcttgacgaagctgctgaatatttagatgaacttgatcaacttcaaacggtgactgacgaacaagtagcaaaagcttcaattttggtcgcagaagcaaaagtctatgccaatgatgcggctctacaaatctctgaaaaactactagagctaggcggtagccgctcaagcttaagccaacataatttagatcaacattggcgaaatgcccgtgtacataccttacacgaccctgttcgctggaaattacatgccattggcaattattaccttaatggtcatttccctgcccgccatgcctggatttaa

SEQ ID NO: 46726 - DNA, 342 bp, Acinetobacter baumannii; identical to SEQ ID NO: 44348

SEQ ID NO: 46727 - DNA, 1407 bp, Acinetobacter baumannii
atgagtagttttgatgaaatacaaaatagagaagctgggctgcataaaaagttatctgcaaaacagatggggatgattgcgattggtggagcaattggaaccggattgtttatgggaagcaaatttgcaattagttttgcaggtccagcagtcatcgtcagctatgcgattggtggtttaattgcttttgcacttatggcttgtttggctgaaatgacagttcagcatcctacttcaggttcatttggtgcatatgcagaacattatataagtccacttgctggcttcttagttcgctactgttattgggcttgtattgtactggcggtaggtacagagattaccgccgttgctgattatatgaagctctggttcccgaatgtaggctcttgggtctggattggatttttttcactgaccttacttgttgtaaatgcctatagtgttaaagcttttggactagtggaatactggttttccacaattaaagtttttgccattattgtgtttattcttttatctattggtatcttgacgcaaagcaatcagggaatgacgcaagttgtaactcatttatcaggacatgggggcttttttccaaatggttttagtggggtatggattggtgtcattatttcaatatttagttatttaagtatagaaatgattgctgtcgcggctggcgaagctaaagacccggaaaaggcagttaaaaaagcattcaaaagcacagcacttcgactcattttgttttatttattgtccttattcctaatcgttactttggtgccgtggactgttttgattggagcagatgcaacaagcccttttgttatggtcatgaagattgtcggtatcccgtatgcggatagcattttaaactttattgtaattgtagctgccttatcagccatgaatagcatgctttatatttcaactcgtatgctgtttagcttgtcacgtgcaggtgatgccccaaaagtctttggtcgaattagtagtaatggtgtaccggtaaatgcgctgttgttatctgcggtagggattggtattgctagtattgtttatacgattaatccagcttccgcatttccaattatgattgcgctatccatgtttggtgcgttgttcacgtggggaagtatatttgtgactcatatgttttttagaagacatatggttcagcaaaatatacaactaaaatttaaaattcctgctagtcgatttatctctttgtttgggtttattgcgattttaagcattacagtgactacctggtttaccagtgaatttaagtctactttacaatttggcgtacctttagtgcttgttcttatatttttctattatttgaaacgttctaccgtaaagttaaatctcaactctagtgaagaaacattgaagtga

SEQ ID NO: 46728 - DNA, 1479 bp, Acinetobacter baumannii
atgaatatgtgcctcaatcttaacttattacctcatgaattgattgttgataattttgcaggtggtggtggaacatctactggcttagaaaaagcctttggccgtcccgttgatattgctattaaccacgatcctaaagcaattgcaatgcatcgtgctaatcatccaaatactcgtcatttttgtgaggatgtttgggatgttgaccctgtaaaagttactaacaatcagcctgtaggactggtttggcttagtccagattgcaaacacttttctaaagcaaaaggtggcaaaccggttgaaaagaaaatacgtggtttagcttggattgctcttagatgggctgaccttacacgaccacgtataatcatgctcgagaacgttgaagagttcaaaacttggggcagattaggaaaagatggattcccgagtaaaaagcacaaaggtgaaacattcaggtgctttgttaatgcattacgtcatcaaggttataaagttgaatggcgagtaatgagtgctcgggattacggatctccaactctaagaagacggttttttctagttgctcgccgtgacaacttccctatagtttggcccaagcctacgcatgctgcaccagatagcaaagcagttaaaactgggaaattaaaaccatggcgaatcactgcagaatgcatagattggtcaattccttgcccaagtatttttactcgtaagaaacctctagttgaggcaacttgtcgccgtatagcaaatggtttagtccgttatgtaatcaataatccagaaccatttattgttccaatggataaggttaaaagcgttgccccagtacttactgagtgtgcaaatgcttcaagcccaagatgtatgcctgttgatgaacctttacgcacaatttgcgcaggggtgaaaggtggacatcatgcgttggttactgcgttcattgctaagcattatacgggtgttgttggtagtgatattcgcgaaccgctccatacgattactgcaaaagatcataacagtttagtcgttagcaacctggtgaaactgcgcaaaaacaacattggtcaacctgttgatgaaccattacataccattaccacaagtgcgggtcattttgctttagtacaagcatttctaactgccttctacggtagtgagaaagacggaaatagcattcatgagccacttcgtacgataccaacacgtgatcgttttggtcttgtaatggttaaaggtgagctgcaccaaattgttgatattggcttccgtatgcttcagccaagagaactattcacagcacaaggttttgaacctacttacatcattgatcatgggatcgatgaacatggaaacactatcaaattaactaagacagaacagggaagaatggtaggtaattccgtacctcctcaattctctgaagctttagtacgtgcaaattttgcacatgaacacttatatgaggcagcttaa

SEQ ID NO: 46729 - DNA, 1044 bp, Acinetobacter baumannii
atggcaagatctagaaatattaagccctcattctttatgaatgaagacattattgaattaccttatgaagcacgattgctatttattggtctttggactttagcagatcgcgaaggccgactcgaaaatcgacctaagaaaatcaaaatgtctttatttcctgcagacgatataaacgttgcagaacagttagagaacatttctaagttcggttttatcgagttatataacgctgatggtattgatgttatccatatcgttaactttgttaaacatcaaaacccgcacgggctagagaaagacagtgaattacctgaccgtaatggtatctacactgtctatgaacgtaacccgaaaaacaaaacaattgttggaaaaccaattcagttaaataaagctgatttaaagcatttttacgataaaacaggaccgtttgcccctcaaaatactggttctgctgttgaaaacagttatcaagataacgaatcgaatcaagcaaacagtagtgggaacaaacaagaacagttagataacggttctaaaactgtttctatctcagaccaaaacgccctgaatcctgaatcctttaatctgaatcctgattcactgaatcctgaaacctttaatcagaatccagaaggtaataacaactccgccgttggcgaagttgattcatcgactcaaacaaaatttagtttcaagagtgctttgaaaaaaaatggtgtacctgagaaagacgctgctgagttcttacaagttcgtaaagccaagaaagctcaaaacaccgaaaacgcttttgaagcacttttgaatgaagcccaaaaagcaggaatcacactgcagcaagccgtcgaatattgtttgaaaagacaaaatccttggggtgccttcaaagcatcttggtacctaaacgaaaaacccgaaatgactaccggtcaacagtcaaaccatcaatcgttaccacgcaatgtaaatgatcaatggggcgcgccaaagaaatatgaaccggttgctcacacagctgtgaagggtgaattgatatga

SEQ ID NO: 46730 - DNA, 471 bp, Acinetobacter baumannii
atggatttcaattcaggtgtttttcgaaatttacttcttgtcggccgtactggtacgggtaaaacacatctaggttcatcaattctgaaaaatatcatcattaagaactgggaagctatttacattacgtctgcagatctagctgaagatatcgcgggtgcctatcgccgtagtggtgatagtgaagatgaagcgctaaaacgctatgtaaaaaaagatttattaattattgatgaatacggtttacatgaccgtgctgaaaaacgtcctcaacttcttgaaagtgttcataaggttctactcactcgttatgacgagttgaagccaacagttgtgatttcaaacctaagtctttctgaggtccgcgaagatcttggggaccgtctatggtcaagatttcaacatgatggcttagatattgtggaatgtgattgggatgatgctcgtataggtggaggtaaagcacagtga

SEQ ID NO: 46731 - DNA, 420 bp, Acinetobacter baumannii
gtgaacgcatttattgatatgaaaaaatctgaatacgcattagttgcttactcaaacgtagcagctaaatctgatgagcgaaaagcattagaaaaagcagttaagaaatggctgaaacatcctggtaataaaatccgacaggttgagtctttagggcgtgatctcaatatgcctcacggcaccggccctatgtacaagcgtttatgttgtcgttgcgaaacttgtgttgaatgggcgctttccactggtttaatcaaatctaagccaaaaccagttgtaaagcgtggtccagatgctcgccaattgcgtatttgggcacagaaaaaccaattgaccccctacgctacagcttttaatgaagattgggatttactggccttagaagtggattattcagttacggcatttcaacgtttataa

SEQ ID NO: 46732 - DNA, 330 bp, Acinetobacter baumannii
atgtctagaacctatactttttttattcatttaagagctttgcctgcttggttggctttaccacgtgaaaagcgggctgagtttagtacacaaaagcttgaacctatttttgagaagtacccgactgtaaaagttcggtggtatgacgttgaagcgtttagcactaaagccagtgatattgctgtgtttgaaacgacatctctgcaagattattattttgtgattgatgcaattcgagactctgagtgttgtacagtgccctactttgagtttgtagagattattccagccattgaagatgggtatgtggagtatgagagttcattataa

SEQ ID NO: 46733 - DNA, 600 bp, Acinetobacter baumannii
atgtcagaaacactcccagatccacgcaaacgcccgcgtcaagcacgttcagtggctacttttgaagctattttagaggcggctgctcgcattttagagtcgttaggctttgctggatttaacacaaatgccgtggctgaacttgctggtgtaagtattggtagcttatatcagtactttccatctaaagatgctttaatcgtcgagttaattcgacgtgagcgcacgaagctttcaactcatatcgttgaagctataaaacaacatgaagccgctgacttaaaagaaaaactaaaactcatcattcaggctgctgtgcaacatcaattgagccatccgcagttagcacgaacccttgaatttgcttctgaactcattggcaaagacattgaggaaaatgagcttcagcatgaacttgaaaccataatttctgatctgtttatacgttctggaatttcacatgcgcaaatagctgcacaagatataattgctttaagtaaaggaatgatcaacgcagcaggcatagcaggggaaaataatttaaatgatttacaacagcgagttgaaaaagctgtatttgggtatttatatctggattaa

SEQ ID NO: 46734 - DNA, 2376 bp, Acinetobacter baumannii
gtgaaagataacgacaccacctataacggcaatggctcaggtgctggtaatggttcgggcgatggcttgttaaatggaattggctctggcaatggcgagcaaaactacggtatcggaaatgggattgcggatgacgcaagtattacagccccaattacgcttcctattaacttgtctggtaactcaattactctaattggcaattcatctgcaagttctgttaattcctcgccaactacaacgtcaaatactgtgaatgacaacgacaccacctataacggcaatggtactggtgatagcggcgtgagcgctctgggcggttctggcaatggttcaggtgacggcgcaggtaatggtatcgcttctggcaatggtgaacataactatggtattggcaatggtaacggcgacgatgttgatattactgctccgattaccggcgttctaaacatttcaggaaactcatttactctcattggtaattcttcatcaagttcagttaatactgcgccaacaaccacatcaaatacagtgaacgacaatgacaccattgataatggtaatagcggcggcacaggtagtggttcaggcaatggctctggtgatggtttacttaatggcgctgcttctggcaatggcgaacataactacggcattggcaacggaaatggtgatgatgtagatattaccgcaccaattacaggtgtttttaatttctctggtaactctttctcactcattggcaattcatcttctagttcaattaatactgccccaactacaacgaccaatacagttaatgacaatgacgtgactgataatggaaatgatggaggcggacttgttggtggaagttctggaaatggctctggtgatggcctgttaaacggcgctgcttctggcaatggcgaacacaactacggtattggtaacggaaacggtgatgatgcagatttcaccttccctcttactggtgtacttaacttttccggcaactcgctttcaggctttggcagttcatctagtgactcggtaaatgttgcccctaccacagcaaccaataccgtcaatgataatgacaccattgataatgccaatacaggcggctttggtgacggttcgggcaatggctctggcgatggaattgtaaatggtgcagcgtctggtaatggcgagcataactatggcattggtaacggaaacggtgacgatgcagactttacgcttccatttactggcggtttaaatattttgggcaacgctttatctggtataggcggttcttcgactgactctattaatatttcaccgacaactacttcaaacacagtcaatgacaatgacactactaacaacggcaacacttcaggtggtgtgattggttctggcgactcaggcaacggctctggtgatggcctattaaatggcatctcttcaggtaacggtgaacataattatggcattggcaacggtaatggcgatgatgttgacgttgtggcccctatcactacaccacttaatgtattaggcaactctttctcatttattggtggtgatggtacaggcgatatcttaggtccgattactggcgttattggtggtattggcggtgatggagatatcctaagtccaattactggcattatcggtggcattggtggtgatggagatatcctaagcccgattactggcattatcggtggcataggcggcatcggtggtgatctgggcgataacccacttacaggtattattcaaagcggtattgacgttctacaaaatttagaaagcttaaaaacaggtttgattaatacaggtattgatacgattgccggaacaattattggtgtgttccctgatgcagagcatcctgtcggtgattttgcagaccttggaaaactacttttcgagacttcacgcgatagtgttaacggtacacttgaggctatttctgaacttgcaggggctgatcttgatggtgcaagtggctcgattactggtgtaattgacacccttattaccaatggttcaacggcatctaccattattcagcatattgtaggtgatgacctagtcactgaaaacggtggtctattgggttcaatcaccacgattattggtaatgttgacagcggcgacggtggtttactgggtggcctagatggcttaattaacattaactatggcgactcagacaatagtaactctgtagatgtagaagatattttaggaaatatcctcggctcggtaggttcaaatcaaggtattgctgttggtgaacctgatccaacgggcggtagtttgattcatacaatttcacttaacacagtgaatcagttaactgaccaacttttacatgctttaccgactgtctaa

SEQ ID NO: 46735 - DNA, 411 bp, Acinetobacter baumannii
atgaatggtttaaaacgtgcaaagattttaagttacaacgcaaaaggtcgtactgcacaagtacacattcatggtttaactgatggcgcgagtgaaggaattacagcaacttttgcctatccagtcggcgatagtgatttagatacagaaattcaaattgtggatggggaagacgtctatgtcttctttgaaaatggtaatgaagaacgtccagtaatccatagttatgtcagtcacggagacggcgcgattgtaggggtgcgccgtattcgacaagacaatattgaatttatctctaaagaaaatttaaaagtagattctggcacaaccgtttcaatcaaaacgccgttaatgaatgtacaagctaatactcaacaaactggtaatagcctgtctcttatacacatctga

SEQ ID NO: 46736 - DNA, 612 bp, Acinetobacter baumannii
atgttttttgaattttcaaaaagcaatccaatcattgctatttcaagtctcaacacctacaacttcgtatttttaatgcttgggttagctttacatggcacaccacggaactttttaaatgctgttgcaaaagcagttccggcagtatcgggcatcttaattcaatttccactttacggaagtatcgcctttattatgacgcaagctttaaatagccaagacttatcgctgtcacattatattgccgagtttttcgtttcaattgcttcaaaagaaacctttgcaattgtgatgggaatttactctgcggtacttggattttttgtaccgtcaggtggtggaaaatggattattgaagccccatatgtaatgcaagcagcaaatgatttaaaggttcatttaggctggtctgtacaaatttataatgcagccgaagctttaccaaacttaatcaatccattctttatgcttccaatgttaggcattttaaaactaaaagcaaaagatgtgattggttttacagtgacacagctcgttgtgcattttcctttagttttattcttgctgtggttctttggtagaacgctcagctatacccctccagctttttaa

SEQ ID NO: 46737 - DNA, 642 bp, Acinetobacter baumannii
atgactgtacgtccaattttatttaattcagaaatggttagggccattttaaatggatctaagacgcaaacacgccgaattattaagagtaaagttcaaaaaaaaattgatatagctgaacatcttggacagttctttggtttagaagattctaaatcacaaatatcttcttattttcagaaaatttgtccttttggagcaattggcgaccagctttttgttcaagagacgtatggcaccaaaattagaagtttaggtggaactcctcatgagtcatttgtctacaaagcagataacccaaatgaaattgcttattacgactgtaagggaaagggttatccagttagatggaagccatcttctcgtatgcctcgtaaagcatcacgtgttttgcttgaaatagttgatatccgtgttgagcgtttacatgaaattagtgatgtagatgctaaggctgaaggttttgataaacctaaaactgattcaactatgcaaagcaataattctcataacccagttcttaactttcaaaaacattgggaagcaataaaaggtaaagaatcttggaatgaaaacccttgggtttgggtgattgagttcaaggttaagcaagagataattttttcagtggggaacttttaa

SEQ ID NO: 46738 - DNA, 456 bp, Acinetobacter baumannii
atgatttttgaattaataaatcctagtgataaatgtacatttgaagcgccaaatttaaaaattgctgctttagttacttgtgtacttggaaacggtcaatactgtgcaaaaggaattgaaaacgaccttgatgttccattctttatttttggtgggcatgacgaatggtttgtttctaattttgggttgaattttaaagaaacttatattcaagttcgaaatgaagaaaagtttgacctggtaaatagctttaacagtgttttgttaggttcttatcttgaccgtactgctttctataaagcttatgacttaattcaagatccagctgagaaaaataaatggcgtgaacaatggttagatgaacgccgctcgtctttaaataatatctgtaaacgtgcatggaattttgctgaacaagtgagcttgtataaaccagctcaggaaggtgcagcatga

SEQ ID NO: 46739 - DNA, 186 bp, Acinetobacter baumannii
atgacttcagaaaaaaaggtttggccgttaggaaccaatcacactgattctgagggaacgccgtggaagcgtgacgaacagaacaattggtggttttggcaagaaaactttggctggtcacgctacgtaggtccagttaaccaagctttcttagatttacgaattgaggttgggactgaacaatga

SEQ ID NO: 46740 - DNA, 375 bp, Acinetobacter baumannii
atggctgaaaaacttcttgcaaatgcatcatcgaaattaactttagaagaaaaagcaaagatggaatggattgccaaactagaaggcaagaattccttatctaatctcatccgttctatgtgtaagaaaaagatttcagaagtagaaggtgagatggcaggtaaaagctctctcgaagtaattaaaaacatttgcactaggaaagtctcagaagctgaatctgaatacgagtttctcagaaatgttttttgtgggtcaaaagataatgggtataccagagataccttcgaattagtgcctttacgggccgaaaaatcgcggcatacaaatgctagtgataaatcagtccagcttgatctacttagctggaaataa

SEQ ID NO: 46741 - DNA, 234 bp, Acinetobacter baumannii
atgtgcatgaatattcaagataaggttatttacctttcaaatagtcgaggtttgactcaacagcaaatctcagaaagaactgggatttctcaaagttctgtttcaaaaattgcaagtggcgaacaaaaagaagttgcttataacaaaggtgttgctttagacgcgttagttgcctctgaacagaaaagagaatatgaggaatccaagacaaaacaattaaatcgatctgcataa

SEQ ID NO: 46742 - DNA, 414 bp, Acinetobacter baumannii
atgaatgcaaaagttaataacaagacaatggattggtctaaacgttctgctcatcaatggttggaacaatatggtctatgggtaagatcaacaaaatttaaagtttctgctaatcctttagcatgtctaattgaccaaaatgacacaactagaattagatcaagtaaggtctctatgccatgcgaaattgaagattatgaggcagttgaagtaagcaaactcttggctaaaatgcataacgataatagggaatttttacaagaaagggcttggtttttaatactttattatgaaaataattggtcgtatctaacaattgctaatgtgcatagatgtagtaaagcaaaggtacgtgctgagattgataaaggcttggcatatttggatggaaaaattgaggtgttgcaatcttga

SEQ ID NO: 46743 - DNA, 405 bp, Acinetobacter baumannii
atgacatcaatgagccttgctgattaccgccttacatgcccgaaagttcaaaagaaaaagggtcgaaacaagtttaatgcttcgaaaattaaattggatggaatgacttttgacagtactaaagaatacaaacggtatatcgagctaaaggctctacaacaacgaggtgaaattaaagaattgcagcatcacacaaaatttgaattggcaccgaagacaaaattagaaggggagaaacgagctaaaccagcacttagatattttgccgatttcacttatttcacgacagcaggtgaatacgttgttgaagatgtgaagtctatagctacacgcaagctaccgagttaccgaaataagaaacacctgatgaaaacagttcacaatattgatgtgagggaagtttaa

SEQ ID NO: 46744 - DNA, 357 bp, Acinetobacter baumannii
atggataagtgtagagaagagtttgagaagcaaaagtactggattgggctatttagagacgcggttgattttgatgaggagcttggtcgatatgttttaaacggtcaaagaaagctttacgcatttcacctcgattcatttaacgagaaatgggcaatttggcaggaagcatggcagcaccagcaagcgaaagtagtggaattgcaaaagcgtttagatggggcattaaaggagactcaatatgctttgcagtatgttgaaggggacatgcgcggcaatcatgaatttctacaaatggcaatgattcgaacctttaaagctttagagcaagtgctcaatggtggtgagcctaaatga

SEQ ID NO: 46745 - DNA, 297 bp, Acinetobacter baumannii
atgagtgagtttaaaaaaggcgacatcctagttaatcaaacggctgttaattcaggtcttgttgagctgctgtacgaacataagcactactttcatggctttagcaaagactttggaatcataacaattgctaagaagaaacttgataggtatcgcaaagcaactgaagcagaaaagcagatagggctccgcattgactgcgaagtattagacaaaccagaaaaccacatttcgccgaattgcaaagtaactgaagttcacattaacgaagcttacaagcttaatcgattggggtga

SEQ ID NO: 46746 - DNA, 336 bp, Acinetobacter baumannii
atgagcaaacgaattcttaagaaacttagcaaaaaggctaaaaccctattgattcaatgtggtggatattctgaaaaatactttatgcctgctgatagagaagacgcaaccatgtgtggagtcttaaaaggcacagctatgttctggtcacagtcgagttttgaatataacgaatgggattgtgaagatgctttcagcttgttgagagaatttatcttttgggaattatctgaatttgatagtgagacaggggatgttttaagaagtcctaagtttaaaagccgtggagatgttctgcgcatggcaaagcaatatgttttaaggagtcagccatga

SEQ ID NO: 46747 - DNA, 351 bp, Acinetobacter baumannii
atgaaagcaactaaattgattagagataaaggactgcaatacgcgaaggaaatcgtagattcagccccttctaacgcaactgaatggaatgagggttatgagttccaatgtggtcaaagtgtagaaatcagcccagcagatcgtgagaagtattttgtagatttggttgagcttaaacgtcttgtggagtcggttgatttggttgaatcatggggtggcattgaggacttaaaactatatgacttgtctcattgcaaagataaacctgaatctgctggatacaagttgcttcatgcaattgctgattacgaatcaatatacggaggcggggatgagcaaacgaattcttaa

SEQ ID NO: 46748 - DNA, 135 bp, Acinetobacter baumannii
atgaccaaattcgagtttttgggatggggcttactcatttcgtgtgtaacagcagtactttgcggtgcggtggttttgtggtggttggcgcgtaaagagcttgatgagaaaggagccagccatgaaagcaactaa

SEQ ID NO: 46749 - DNA, 468 bp, Acinetobacter baumannii
atgaattccatgacaaaaaataagttatttggattagctgatgatcgaactgatgtatgggctacgccgcaagattttttcgaaaaattggatcgagtatttaactttgatttagacgtttgtgctctgcctgaaaacgctaaatgtgaacgttattttacacctgaaattgatggtctaaagcaagagtggactgggacatgctggatgaatccaccttacggcaaagaaatcatcgattgggttgctaaggcagcggaaacagcaagtaaagggcatacggtagttgcactcgttccagtaagaactgatgcccgatggtttcaagactattgtttgggtcgtgaaattcattttattcgtggccgcttaaagtttggcggttctaaaacgaatgcaccttttggttgctgtgttgtggtgtttagaccaagcctgatagacgtcagttgggagaaatcagcatga

SEQ ID NO: 46750 - DNA, 393 bp, Acinetobacter baumannii
atgtatttgatcgaagccggccaaatgcgagcagctcaagataatttcttcgggacctacaacgtgatggttgctaaagctcagttaaaaggccgtcagcaagagttttacactccaccgctacaactagagcataaagaacctgaacacaccccagtaagcaatgacgaagcgcaaaagcatctcaaatctttgatggaacggttaaaaatcaatggtcgtaaacctgcaccagtacaaaagcttaaggctaaggaaaaagagcctgagcttacaaaggaattagggccagatccttttgacaatccgcacgaatacgtcgagatgtgccgccgggagggcatgccaattcctagaaatattcagcaattgattgatggggtgaatgtatga

SEQ ID NO: 46751 - DNA, 144 bp, Acinetobacter baumannii
atgccgaaactgaaagacattgccctgggaattattgtggccccgctgctgatcccgatcatgctgattgcatcgtaccaggataaaaaggcacttaaaaaagagctgaatgaacgccaaaaagaaaaagaccaggcatcctga

SEQ ID NO: 46752 - DNA, 576 bp, Acinetobacter baumannii
atggctaagttatcactaagtgaagtatctaaaaaattccatgtggatagatcaaccatttacagagctgtacgtaatggacgtttatcacgctccagtgatggacaattcgatctagcagaggtcatccgatgctttggagaacctgagcaaacaccccaaaaaattgaatcatctaagcaagaaggtgatgaatctacaaaaaaacttattgcccatttagaaaatgaagtcaaaaaataccaagaacgtgaagaacggttaatgcaacaaattgaccgtatgcaaacactcattgagctgaaaagtgttgcacctgccacagcatcaccacaacaagatgctacggcatgcgacactgacatgcaacagcatgcgacaccacaacaagacaatgataataaaaagaatcatgaattaaatattgcagaaaatgtggcagtgccacagcaagaaaatacggcataccacacccaaacgctacagcatgccacgttgcaaaatgtggcagtgccacaacacaaaaaacgtggcttatttggccgtgtgctgaatgctgtttttgataatgactaa

SEQ ID NO: 46753 - DNA, 951 bp, Acinetobacter baumannii
atgagagaattagttgtaaaagacaatgccttaattaatgcaagctataacttagatttagtagaacaacgtttaattttattggccattgttgaggcaagagaaagcgggaaaggtattaatgctaatgatccccttgaagtacatgcagaaggctatatcaatcaatttggcgtacatcgcaatacggcttatcaagcattaaaagatgcctgtaatgatttatttgcaagacaatttagctatcaaaaaataaatgaacgagggaatattgagaactatagatcccgttgggttagtgaaattggatatgtagataatgaagcagtggttaaacttatctttgccccagccatagttcccttaattacacgcttagaagagcatttcactaaatacgaattgcagcaagttagtaatctcagcagtgcttatgctgttcgcttatatgaattattaattgcttggagaagtactggctctactcctattatagaggtaagtgatttccgtcaaagaattggcgtactcgatacagagtacaagcgtatggaacgctttaaaactagtgtacttgagcttgctattaaacaaattaacgaacatacagatatcactgtgaagtatgagcaacacaaaagaggtcgatcaatttcaggattctcttttacttttaaacagaaaaagaaggacaacccaccgatagaaagagatccgaatacgttagatctctttacaaagatgactgatgcacaacgccatctgtttgcaaataaactttctgaacttcctgaaatgggtcgttattcccagggaactgaaagctatccgcaatttgctattcgtattgctgagatgctgcaagaccctgaccgaataaaagaactatacccatacctaaaaaaagtgggatatatgccatcaaataaaaaggacaccgtaaatggctaa

SEQ ID NO: 46754 - DNA, 192 bp, Acinetobacter baumannii
atgtcaaaagaattagtcaacttagcaaatatcgttccttttcctaaatcatgtggattctgtgaatcaaaggaaaatgtacaactttttgcagggttaatgctttgtagtagctgtcaggaaaacatccgaaccactaatcctggaatgtttacagctaataatcaaattgaaaaaaaagcccaggattaa

SEQ ID NO: 46755 - DNA, 1152 bp, Acinetobacter baumannii
atgcgatttaaaaaaatttcttgtctacttttatccccgctttttatttttagtacctcaatttatgcgggcaatacaccaaaagaccaagaaattaaaaaactggtagatcaaaactttaaaccgttattagaaaaatatgatgtgccaggtatggctgtgggtgttattcaaaataataaaaagtatgaaatgtattatggtcttcaatctgttcaagataaaaaagccgtaaatagcagtaccatttttgagctaggttctgtcagtaaattatttaccgcgacagcaggtggatatgcaaaaaataaaggaaaaatctcttttgacgatacgcctggtaaatattggaaagaactaaaaaacacatcgattgaccaagttaacttacttcaactcgcgacgtatacaagtggtaaccttgccttgcagtttccagatgaagtacaaacagaccaacaagttttaacttttttcaaagactggcaacctaaaaacccaatcggtgaatacagacaatattcaaatccaagtattggcctatttggaaaggttgtggctttgtctatgaataaacctttcgaccaagtcttagaaaaaacaatttttccggcccttggcttaaaacatagctatgtaaatgtagctaagacccaaatgcaaaactatgcttttggctataaccaagaaaatcagccgattcgagctaaccccgccccactcgatgcctcagcatatggcgtcaaatcgacactacccgacatgcttaagtttattcatgccaatctgaacccacagaaatatccgacagatattcaacgtgcaattaatgaaacacatcaaggtcgctatcaagtaaataccatgtatcaggcactcggttgggaagagttttcttatccggcaacgttacaaactttattagacagtaattcagaacagattgtgatgaaacctaataaagtgactgctatttcaaaagaaccttcagttaagatgtaccataaaactggctcaaccaccggtttcggaacatatgtggtgtttattcctaaagaaaatattggtttagtcatgttaaccaataaacgtattccaaatgaagaacgcattaaggcagcgtatgcagttttaaatgcaataaaggaataa

SEQ ID NO: 46756 - DNA, 234 bp, Acinetobacter baumannii
gtgggagtagggccgacattaggatgtatgaatcagtggcttgaaaaatttaacactgtggtacaagttgagctgccatattgggaagaccaaaaccaatggaacttacggctaaatacacagtggcaatatgccattaatagtaataatgccattcgctttaattgggattatgaaaaacaaaatcatctggactggatgaaatcaagcttaggatatgtttggttcttttaa

SEQ ID NO: 46757 - DNA, 1407 bp, Acinetobacter baumannii
atgagcttaatgaaatcggttgttttaatttttgcctctttggcagtgaatattgcgtattcagcagaaacaaatccatctattcaaaactactggtccattgcagaacaaaaaaaattagaccaagacattacatggcaaaggcttatgtatgccaataaaaatcagaaaagtgaggtcacttatgctggctattttctatcagaaaatggaaaaaataatttaaaagaagaactgaaagcagacatctcggcattatttatacctacgcaagataaccagtcaattcgctgtaaatttccggcacgcagtcagtggcttatacagcaattaggcattcaagaaaatgtattgccgcaagtaaaatgttcagaatttgaaaactggattgggcagattaagccttacaaagcgaccctaatttacgccacagattttatgggtaatccaagctcaatgtttgggcataccttattgcgtctagatcctaaagatcaacagcagttaaatctcgtttcttatgccgtaaactatgcagcaactgtggcaggcaatgacaactggtcatatgcatggaaaggcttagcagggcagtatccgggtgaatactcacttatgccttactatcgtaaggtaaaagaatatggtgattttgagagccgtgatttgtgggaatatgagttaaatctatctccagaagaaacgcggtttttggtgagtcatatttgggaaatgcaacatgtaagcttcccttattactttgtgagtgataactgtgcatatcggttattgggcttagtcgatttagttaaacctgaatctcatctacaagaaaagtttaactacgcttctattccaatggaaaccattaaagcgatgcaacaacagggactcaccaaagctcctgtgtatcgacctgctttagaaactcaattattggcccaagctcaccagcatggcgcatctttagctaaagttgctcatcagttagcaatgaagccaattaaagagtcttcggaaacacttaaatcatttagcccatcagatcaggccaaaattcttgagatggcttatgatgatttatatctacagtttattggtcgcaaagttgaagaaagctttgctcagccacagcttagacagcttttagcactacgaagtcagattgatttagacaaacagcgccaagaacctaaaagaccatcaaccgagccgactcaaggccataatgcacgtaatgtctcgctaaaactgggcgaggtgcaaggtgacaagtttatcgagataggtcataggcaggcttatcatgacttaatagatccacagggcggataccgtgccggtactcaattattatttttaaatggtaatgcacagtggcgagatgaccatttaaaactccgctga

SEQ ID NO: 46758 - DNA, 2319 bp, Acinetobacter baumannii
atgaaacctttggcagctttaccgttaatttttatagcaattcagcaagtgcaagctgaggagagaattgcaattttaaagcctcttgtttttaaggcaaatgcattaaaggaaaaaaattatgtggtggacaaagaaaaagtagaaagttccaatacaataggtgatgctcttaaaaatataacaggtatacaaagtacttcatttggacccaatgcaggtgcaccagttatacgtagtttgagtggaaatcgggttggagtaattgaaaatggagaatttattaatggaatgaatgcatttagtggaaatattaatataccattcgatccaatttttatagaaaaagtgatagtgaacaaaaatacagataatattcgttatggcggaaatgcaataggcgggagtgttcaaatagaatcgggtttaattcctaaaaaaattgaagaaaagccaaacaaattagatattgtctttcggaaaggatttaatgattttgatgtaaaggggttcaattttaacatcaatgatcaaaaaaactggtctacaaatataagatattcagaatatgaaatttcttcttataaaattccaggaaatagtaaagccaaattatgtgaagaccagattttttcaaattcaggtgggatcaatagtgcattagcagcttcctgtcaaaaagatagtagagtccaacatatttataacaagtcgtcacaaccatacatagataaatttatgactgagaatcctgattgggcagatggcgatttttctttttatacagataagcccacatctatatggggaggaaaaacatatataaatccaaaaaatccagagtacatacctaatactccgcaaaatacaataaaaaagatcaatacggatgttacaccaaattattttaaaaaattaggtaacagttatgctcagaatgagaatattgggtttggaacaacatacttttttgataaaggtttcattggattgagtgcagataagaaaaaaagtgaatatggtgtaccaggattttcattacaaaatcaatcttttgctgattcttatgaaacattaccggttggtgtgaaaatagatcaaaatcgttttgtattaaattccaattttatccaaccaatttcctctgcagaagagataagtttgaattttcaacagctttctaataaatctggagaatatgttggtactgcaaaagctaatgagtataaaattgataatcaattaattgaattaataatgaaacagtcatcctttaagggattagatgggatacttggttttagccttaaaaataggaatatcgaaggaagtggtactcagcgctatttacctaatgtaagtactattagtaaagctatattcttacaagaagaattaaatatcaaacaatttactttaaatacgggctatcgttttgaaagaattgaacatgagcttcaagataatgattttaaactagcaagaaatgctagtaattcaagaatagaaaatagaaaatataatttaaaccaatattttatcggaggagaatataaggttaataattttataaatttaaaagttgattatggtatttcagaaagagcacctgaagtgaatgagctctattcaagtaatgttcactattctgttatggcacaagaagaaggcgaccagaatctcaaaccagaaaaatctaaaagtttagagttaggtatgtttttgaattggaataattgggtcatgcaacttgttgggtatcaaatggattttgaaaattatatgtatttatctcattcaggtgttgctgtgcaaaatcgattacctttaaaatactggaaacagacagacactgacgtcaaagggtttgaaattgatttaatttatgattttaatctagctcatattgggaatattaaactaggtggtttagctgattttgttaaaaataaggctgttaatcctacagatataaggttagctaatgatggagtttacctaccaaatatgcctactaatcgttatggcatgtttcttgagtggagaaatgattcttggaaaggtaaaatttcaagtatttactacgatgagccaagatatctaggtaagaatgtaatacaggaagttcctttatctggttacaacttacttgaatttaagatagataaaaaattaaagattaaaaatgcttcatttgatatatttttaaatggtacaaatctgctgaacgaagaggctagaccacaaaactctcctctaaaatatattgcccctctaccagggcgagcatttcaactggggataactatgcatatttag

SEQ ID NO: 46759 - DNA, 1833 bp, Acinetobacter baumannii
atgagttatctatttttgtcgtgtacagagattaactctaataagtatgatgcatttggaaacctgatatttaaatccaatcctggttttagtgctataacaagtggaactacaagcagttatgatgtctttgaccgcccaattactgtcaatgataatggaagtgttgtgacatattgctatcagtcctgtggaggaaaaactggtgcaattgtacaaacaacagatagctttggtacaacagaatctaatctattagcagcaggagattttagtgctgatttaaaaacactggttgcacgtaaaggtacagatggatcagtctttcagacaacaactgaatttgaaaacgcacttttaaaaccaaaagttgctgtatcgggtagttctacacaaagttatacatataactctaatacaactttagcaacagaaaaagataatagtattagtgggcaaaagacatttaaatatgatgatactggccgaattacttcaattacccatccagatagttcagtagaaacgatcaaatattttcaattaaaggacctcatcgcgtcccggacatggcgagaagttgagacaacttatagttattctcttgctgggcgtttaaaaacaacgactaatgcaaatattagtgaagcatttgatcttgatacatatggccgtgttataagtcatacacaaaaaatcaatgccaatgataccaataattcatatgtcgtaagatatggctataatcaattaaaccaagttacttcaattcaatatcctaatggtaaatctgtaaatttatctaatcagaatgctttaggggaagtaacatcaataccaaatgtaatacaaagtttgaattataatgcacggcaacaacttacaactgtgcaagccaataccgatactttatggtcatatacttataatgatagcgggttgctgaataatatctctgctacaagtctggaaaagtgtgtcctcaatgttgattatggttacgataaattgaaccgagttaataagctttcggacaaatgtggatcagtttataacgctacaattgaccgttatggtacaggtttgatgagtactgttgagttagatcaagcacgttatcaatatagttataataatgatgacattactaaagttaatatcacttcaaaaagctcgacagtagcaccagctatctatacatataactatgtaaataacacttctcgattagcaagcgtaagtggctcaacttatagctttacttatgatgcgatgggtaatgtaacaaatgatggtgtgcgtactctaacttatgataattatagtcgcctcaataagaatggtaatgagacctatctttataatgctgatggactaagagtccgtgctgtaagggatgatggtttaacagattatatttatgatcttgatggtaatttattatatgacataaattataaatctggttatagccgagcttatgtctatgtagcgggtaagctggtagcgactttagaacgctatcctgatgccaataaaggttttgactttgttaatgattttgaagctgccgaattaggattaacagatctattaggtagctatacagacactgataatgatggattacctgattatttagaacgttttattggatctgatcctaacaatcctgatacagatggagatggacacaaagatggttatgagtatcgcttattaggtgcgaaaggggtattgagctcttcagttaagccagatgttgctgatcctaatgaaaatcttgcagcatggatgactccaatattagccttgattctggaagatgactaa

SEQ ID NO: 46760 - DNA, 1338 bp, Acinetobacter baumannii
ttgaataaattaaaaaatcctgatcatatagatgtcggacaaattattaaaattccatacaaaggtggatcaagtgattctaagaaaagtcctgataacaaacaatctaagcatgaaaataataaatcatcttctactcagaaagtaaattcacatgaaaataataataaaaatacttcagataaacctcaaaaaagaatagagtcaaaagatataactgatgaatatacaaaagagtcaggaaaaccaatgaaagttgctactaatgcaacttcaccatgtatttgtaaacaatataatttggcttggggatctaaagttagttgcgaatttaggaaaagagttataaaaatagcacaaaatttgtggcctaatgattcagagaatatggcaagccaattaatggctgttatgcatttagagtctgccggaacttttagtccaaaaattggaacttttatcagcaaaaaattaacagatgatgctaaaggtggttatgttggtcttatccaattcggaaaatttgcttcaattgatttaaaagttaaaagatctgatttagcgaaaatgtcagctgtacaacaattagattatgtagaaaaatactataaattaaactctgctcatacaaagattaaaaatctaactggattatatttatgggttaattatcctaaaaatgtcaaagaaaaccgattagaagatgaagatattgtatatgcggcacccaaagacgcagaagtaacttctaaaaaatttttagaaagcccatatcaccaaaatcctagttttatgaaagagaatgaggaatataaacgggatggtaaaaaagttattagacaaggatttaaaaatggttcaactaaagtttgggaggttgaacaagaaattaaaaaacatttaaccgaaggtataaaaagtcaaaatttagagaaaaattataattgtgcatacataaatcatactgagataaaaaatactcagaaaattaatttggaaaaatttgctgaaattttgagaaagagagctaaagaaaaaagtcaacatcaatgtgcaaagtatgtaagaattgcattagaggcaggaggagccgacacttcaggacatcctgtcgcagcatcagattgggggccaactctcaaaaaaataggttataaagaaatacctgaagagtttaataaacctcaattaggtgatatttatatcatcaccaaaactgataagcatcaatatggccatattgcaggctatgatggtagccaatggatttctgattttaaacaaaaaggttatagaatttatagcgatcatgttaactacagatattttagaatgtaa

SEQ ID NO: 46761 - DNA, 459 bp, Acinetobacter baumannii
atgaaacttttaattttagaaattttatgtttaagccttttatctggttgcgcttccgcaaaagaagctgaatgttacaatacttcaaaagctctaattactgatttatataataaatttcctattaatggagatgaggttattgaaaataaaaatattaaaaccttaagtaatttttttgataaaaaccttacaaatttacttataaaagatcaagaatgtagtgcaagaaataatggggtttgtaatattgattttaatattttaattcattctcaagatactcctaataaatataaaatattacaggatacggataatttagtaacagttaaagttgaatatcatcaatattcagaatttattaactttgttattaataaagaatcttcttgtaaaaaaataggaaatataaaatatgatgatggaagtgatttaattaaaatgctgcggaaataa

SEQ ID NO: 46762 - DNA, 357 bp, Acinetobacter baumannii
atgaaatattcaatattattcttaattttactatttgctaattatacatttgcaaatacagaaatatggaatggtacatatcactattatagttcagaggagctacctgatggaaatgttgccacgatagagtcaactttaacagtagcacccaagaaatgtgtgtactctattgtcggctttcaggttgataagtcctatgtatgcaaagtgaaaaagaaaaataatgaactttatttttttgataataaaagtggtaatagattcgggaaagtagtttttaaaaagggaaaatattacctttattctcctgaagttttagatagtaaggataacttatttattaaagatgaatag

SEQ ID NO: 46763 - DNA, 1419 bp, Acinetobacter baumannii; identical to SEQ ID NO: 45943

SEQ ID NO: 46764 - DNA, 750 bp, Acinetobacter baumannii
atggcgggtcattctaaatgggccaatattaagcatcgtaaagcgaaacaagatgccagtcgcggtaaagtttttactaaatatattcgtgaaattgtcactgctgcaaaacttggtggtgcagatcctgccagtaaccctcgccttcgtgctgttgtcgaaaaagcgctttctgtcaacatgacacgagataccattaaccgtgcaattcaacgcggtgtgggtggtgaagataatgatgatttaaaagaagtaacctacgaaggttatggtgtaggtggtgttgctgttcttgttgaaacaatgacagacaacctgaaccgtacagttccagatgttcgccattgtttcagcaaaactaatggtaacttaggtaccgcaggttctgttgcttacctatttaccaaacgtggtgagattacttttgacgatgtttctttagaagataaaatcatggacgttgctttagaagctggtgcagaagatattgaagtttcagaagatgaaattttagtaatcacttctccagagacttttggtgaggttcaagatgctcttgcagctgctggtttaaaatcagacaatgctgaagtagtgatgagcccttctactaaagcagaaatcaccgatattgatcaagctaaacaagtgatgaaactcattgatatgcttgaagatctagacgatgtacaaaacgtttatacaaacgttgagtttagtgatgaagttttagcgcaacttgatgcctaa

SEQ ID NO: 46765 - DNA, 561 bp, Acinetobacter baumannii
atgaaaaagtttttaggcaattctatcttcaaagcagttggttggacctatgatgcagatcctaccattcttgagaaaaaacaagttattatcggttttgaacatacttctaaccttgatgcgatcttatcaatcgctttgtttcaaatattagatttaaaaattcatacactaataaaaaaagaacttttcaaaggtccaatgaagcctatccttgaaaagctaggtggcattcccgttgaccgaaaagcaagcaaagatatcgtctctcaaatggtcgaaaaattccaaagtagcgatacatttaacctagtgattgcacctgaagcaacgcgtgccaaagatgggtcggaacgcaaacctattcgtactggtttttggcatattgctaaggcagcaaatgttccaattgtactgatgtatgcaaatgcacgaaccaaaaaaggcggtattttaggtaagatttatcctaccgacttacaaaaagatcttgaaacgattaaagaactttatgcgcaatatgatattgatgtaaaaattaactacctaactctctcatga

SEQ ID NO: 46766 - DNA, 861 bp, Acinetobacter baumannii
atggataagacttttgaatctttttggattacctgcaaagatggttatcagcttgcagctcaattttatcctgctcaagaaaagaaagctgaataccctatcttgatttgtccagcaacaggtataactaaaaacttttatcactctttcgcaacatggttaagccaacaaggctatgatgtattgagttttgacttccgtggtattggcgaatccctacatggagctttaaaacaaagtaccgcaagtattaccgactggggaatacttgatatacctgctgcaattgatactttattaataaaaacgaaagcaaatcaagttattcttattggacatagtgctggcggacaactactaggagtcgtacctaactataataaagtcgcaaaagtgataacggttgcaggttcaactggacatattaaaggccttaaaggaaaaaccaaggttttagcgccagttatgtttaatcttatcttccctatttctagtcttgttaaaggttatggagcaactcaattcattggtatgggagaaaacctacctaaaaaagttgctcaacaatggcgagagttttgtagccgtcccggatatgtaaaaaacgccataggcaagacaatttttcatgattttcattcagatattcaatgtccaattactgctatttgggctgatgatgatgagattgcaaccaaacgtaacgtacaagaattattaagtttatatccaaatgcaaataaaaaaatgattgaacttagcccaaaagatttaggctataaatcaattggccatatgctgttatttaaaaaatcacatcaaaaactctggtctattttagaacaagaaattaaacattaa

SEQ ID NO: 46767 - DNA, 174 bp, Acinetobacter baumannii
atgggtaatgatacattaatatcaagtttgctaagtgaacgagataattttattgttattggtttgacgggtagaacaggttctggctgttctacaacagcgaaaatattagctactgaagagaaaactagttttcctcatgattatgaagttaactataataaagaaagctaa

SEQ ID NO: 46768 - DNA, 1488 bp, Acinetobacter baumannii
ttggataagaaaagatattctattctgcgtaattatgctaatgctaatcatacacaatttcgattacttaaagttagcgaattaataagtgctcatttacttaatacagagtctcaaatttttatcgaatttataaaaaatgttgtaagcgaagacttaaaaagccaagttgaagaggttcttgataaatctaattttttaaaatttcaagaagaaataaaagatttagatgcaaataattattttttgaaagaagatgctgctggagattcaatacgacgtacaggtacggttacaccgaatccagatgatgttccttttaatctaggaggacttcacgttctacctgcaatgatcaataaaattattaaatactatcgttgggttgataaagtttacggccaaaaaacttatattgttattgatgctattcgtaatccctacgaagcaaagtattttaaagatagatattcagctttttatcttatttcaattaatgcaccaaatgaagatagacgtaaatatttacaagaaaaatttaaatttacaattgatcaaattgaacagatggataagaaggagtctggggagttagtaagaaattctgaagaagatgcgaactgtacaacctgtggatcaaaaaaaacacatccaaaagatccatatcatgaattaataacttcaaatgttaagcattgtattgaaatttctgatattcatatttttaatcccagaaatgaaccgaccaaccataatgtgctcaaagcacaattagcttggtatataagcttaatgaaacatccagggcttacaacgccaacttcattagaacgtgttatgcaaattgcatacaccgcaaaaatgaattcaggctgtatttctcgtcaagttggtgctgttgtaacggatgaagattattctattaaagctgttggatggaatgatgtagctaaaggtcaagtcccatgcggtttaagatctttgcaagagctagatgaattctctagtgaaactgattacagtttatatgaacgaacaagtgaaaaatttagagaagaagctggtaaacaattaataaaattaaaaaatataggtaacaatggtaggcatttagcttattgctttaaatctattcagaataaagtggaaggcgaaaagaaccaagttcataccagatcattacatgctgaagaaaatgccttcttacagttagctaaatatggtggaataggtattaatggtggaaaactttttacgacagcaagtccatgtgaattgtgtgctaaaaaggcctatcagttaggtataaaagaaatagtatatattgatccatatcctggaattgctatgacccatattcttgctattggcgtaaatccgccaaccttaactcaatttagaggtgcagtcggtcgtgcttatcaccagttatatgaacctcttatgccttataaagatgagctaggttatttacaaagtataagttaa

SEQ ID NO: 46769 - DNA, 1584 bp, Acinetobacter baumannii
atgactcagcaggcatgtgtaatatcacaactcactttggagtttccttcaaaggtgatgtttaaagacttgaatttctcacttgagcatcatcaagtatcagccttaattggccgcaatggtcaaggtaagtctttactaatgcaattgcttcaaaagatttcacccactacagaaatgcatataagtggtcaaataaactggcaaacaaaccatgcatatttatctcagctcactcgtctccaatcagacacaattgcagaagctttagaggtcaaccatctttacaaggcttttcaaagagtagaacaaggtgaagctcgatacgatgattatgatttgttagaaggacattgggatcttcctaatatttgggaagctttactacgatctgctcagctaccaaccgatttagactttcctgttaagcagttaagcgaaggtcaaaaaaccaagttagccttatccgcattatttttaaaaactggtcattacctattacttgatgagccaagcaaccatcttgatcaagaagctagacagtggttaattgctcagttaaagaaacatccagtaggcgctcttattattagtcatgatctgactttgttaaatgaagtcgaccatatttatcacttaaatgagcatggcctacagcacactacaggaaattatgaaaaattttatgagcaatatcagtcccaaatcgaggctttagaacagtcagtacatctgcatcaacgtgaagttaagcacatgaagcaaaagcagcatgaagttttaatgaaagcccaaaaacgtgagcgtgctggcaacaaacttcgtgactcaaactcgcaagctaaaattttgctcgattttaaaaaagaacaggctgggcaaagcctaggagcaattcattctcaacatcagcgtcaaatcgatcaaagccagcaagacttgaagagtaaaaaagtacttctagaaactgttaagccccaacaatttatattcccctcttttcaaaaaagaacaggagaaattcttagaattgataacttaaaactcaactatgggacacaacaaccaattcatctcgccttaaaagcttgtcaaaagattcatttggttggccgaaatggtattgggaaatcaactttgctgaaacagattgatcaatctgctgtaactgctacagatgaaattaaactgtttgtaaattgcttttatctcgaccagaacttcagctttttattagaccatctctctgctgttgaaaacttaagaaatattaacccaaatatttctgagttagagtggagaaatttattaggtcagcttcggattcgtggtgataaaagcacatatcccttagctcaactcagtggtggtgagaagttaaaagttgctttactaggtttgagccatgctcagcctatgcctgaacttttactacttgatgaaccagaaaaccactttgatatcgagtcaagagagttatttgcaaatgctatttctagttatgaaggtgctgtgctattagtttcacatgatttaagttttgttgaaaaatgtgggattgttgattcaatttatttaaattaa

SEQ ID NO: 46770 - DNA, 321 bp, Acinetobacter baumannii
gtggacccgtttagtggtgtcgatttctattacatctctcctgttgtaaaagattattttgttgaagcgcgtgctaatgcagaaaaaacacttgcgaaagtaaaagccctatgcgctgaagaaggtgttgatattgaaacacaaattattcaaggtgaaatctcatctgatggcattcttaaagctgtagaagagttgggttcagacctgattgttattggttcacatggtcgtaaaggtttccaaaaacttattttgggtagttttgcgcaagatgttctaaacagcactaaaatccaagttttggtggtaaaagaataa

SEQ ID NO: 46771 - DNA, 207 bp, Acinetobacter baumannii
atgcataaatgcaaccactgtgaagctgagcaattaattaattcgtatggtggtcttccagaagcaaaggcttacatgaggcgttatttcatgctgaatggaggattaagaaataagtatccaagaacaggcgctttgataactcaaaagatgaatgaattgcagagcgcgattttaaatgtagagggcttaaataatggacagtaa

SEQ ID NO: 46772 - DNA, 324 bp, Acinetobacter baumannii
atggacagtaaatggattgaagcgcaacgccgtgaaatggaaaagcttatttcaccagagctaatcaagtcgagagatttagcacgtcaaagttacttcgatcatatggaaaaagaaatggctgaccacgtatcgcgctcaattgaaccactcagcggtaaaaagcaaagcactctggttgaactaagggagtcaattgaaaaactggctcagaagtataaacaagatgctcattcatccagccttttaggtgatcaggataaagcgcgagtttataactgctttgctaatcaattggaccatttgctgaaaggtggtgcttga

SEQ ID NO: 46773 - DNA, 402 bp, Acinetobacter baumannii
atgtcatcagtcagcattgctgaataccgcaagttatttccgataaagaaaaataaaaagcggcgttcagcaaagcaagttgccagacaaccaagtgtgggtgaaatggttctggcaacacatttaaaagcatgcaagatcagttttgaacaggaatataagttccatcctgaacgcaaatggagagcagattttttaataacgggtacaaagattttgattgaggtagaaggcgggatctggagcggaggccgtcacacaagaggcaagggctatttaggggatatggagaaatacaactccgcagcaatgatgggttttacagttttacggttcagcacagagcaagtgaaagcaggcgtggcgattaaacaaattgagcaattggtaggtgaaaaatga

SEQ ID NO: 46774 - DNA, 477 bp, Acinetobacter baumannii; identical to SEQ ID NO: 44640

SEQ ID NO: 46775 - DNA, 174 bp, Acinetobacter baumannii
atgtgtggtgtaaatctaaccattaaatcaaaggaacattacttaatgcaaagaaaaggggcgcttttaacgattgcactggtggcgcttggtgcccaccaccagtacaacacaatatcaactctacaattaattaatatggaggtgacacaaacaaataactatcatttctaa

SEQ ID NO: 46776 - DNA, 1362 bp, Acinetobacter baumannii
gtgggtaatataagtccatccgaaataggtggtataaccgcacaagattttctttggttttatagtgatttgacagcaattaagtattataagaactctaagagtggcttagttaatgctctctctgtggattggacttatgagttggtaaatagctcaagaccaggttttacagaagaaaagtcttttaaagttacaagttctaaatactctatagcgaatgctaattcatatgatgtgacttatagctatagccgagatgactctacacatgagcaaacaacagttgttactagcaaagattctgtaactggactttcaaaggcttatacttatgtaatgcatgcatttttaggtggtggtgctgagaacttcttacatgggcttttgaaaaaaattacgataggtgatcgagaagaaagttatacatggacaaccctatctctaattgggcaaaaacctaagactatagatgataactatactgattatgaggatgttcgtttagtccgtcttgctagtaaagcaattagtcattttggtgagtataaaactacctatagtaactttgaccaatatgggaatgcacaatcagtccagatgactggattgaatggttcaagtactgttcaatttccagcaacaacggctacatattttaatgctaatgctgcaagtgatgatgtaaatacaggaaatttaccttggattatcggattaccaaaacaaaaaatatcaggtagttttacgttacaaactactgaatatgatgcacaaggagcaatacgtagtaatactcaagctggtcgtgttaccaaatataaatatgaaacggtatcattctcaacatgtcttggaaatttagcgagctttcaatggtcaaagtttgttagttgcttatcaaattatgtattaggtgatcaacatgtgggtttaccaattgaagttgatgttggaaatggtaaagaaattactcaatttgctggttacaaaaggggtattccaactcaagttaaacttgcaaatggggcgacagaaacaaatattgtagatgactttggaaatataactcaacatactgatgcagatggggttatttcaagaaaacaatatgatgatgctggccgattatatatagatacaccaattgttgggttaaattactctacattcacttatgatggtttaactgtttctagggttgtaactggtggcgggcaactgagccgaatagaaaaatataatggtgatggtttactgatttcgagtgaggataagatatcaaataaatctattattaactctctctgtacacgacaaatttcacagaacccttatcctatcagggttctgccttcttaa

SEQ ID NO: 46777 - DNA, 435 bp, Acinetobacter baumannii; identical to SEQ ID NO: 26756

SEQ ID NO: 46778 - DNA, 330 bp, Acinetobacter baumannii; identical to SEQ ID NO: 46639

SEQ ID NO: 46779 - DNA, 2115 bp, Acinetobacter baumannii
atggatcttaagcttcgccttctctccctgagtattgcacaactatgctgtattccagctgcttttgcagacacgaacaactcttcaactactcttgcaactatcaaaattaaagcccaacaggcatctgaccagacttataaagtggatagttccagtagtgctacgcgtagtgaaattgcattacaaaataccccgcaatctgtgagcgtagtaacccaaaaagtaattgaagatattggtgcaactcgcttagttgaagcacttgatttagctggtggcgtgactcgtgctaataactttggtggtcaaggtttaactggttttaacgtgcgcgggtttaccagtggtgagttttatcgaaatgggtttccaattaaccgtggctatccaaatgcgccagatagcaacaccattgaacgtgtagacgttttacgtggcccctcttctagcttatatggacgtggtgacccaggcggtacgtttaacttaatttctaaaacaccaaagtccgagcaacaaaccactttaggggcacagctcagtagtgaaggtttatatcgcactaccgtagacacgacaggtactgtacccgatgcagaaaatatcggttatcgcctaaatgtgattgcagaaggtggggatagttaccgtgaccatgtcgaatctaaacgttatggcattgctccagtcattcaatggcaagctactgacgccaccaaagttacttttgaagccgatattttaagaaatcaacatccgcttgaccgtggtcatacacgttatccaacacagaaatcttttaatagctcaccagaaacctatttatgggaaacgggtaaatactacaatcgactctacaatgataacaatatggctcaattacgagttgagcatgatcttgcgaatgactggaagctaaatgctggcgtgcaatatttaaatggcaaattgcatggctatgcagtagaggcaaatggtatccaaaatgacggagaaacattagggcgaaattacaattatcgcgaattaaaatggcaagataccgatgcccaaattaatctcacaggcaatttccagcttttaggtttagcccatactttagtgactgggcttgaatatgaaaattatgattataagtcatacattattcgctcaagcggagatatcggtagctaccctattaatatttataatccggttttagggcaacctttacctgagctcaatcgtgtaaccacacatgaccgtgaaaacttaaaaacaacggccctttttgtacaagaccaaatcgacttaaatgagcgtttaagcgcactcttaggcttacgatttgagcattacgagcacgattacaaaaacctattaccaaatactaccaactggaataccagtcatgatgcatttattccacgtttgggcttagtttataaagcaagtgatgacctttcactctatggcaatgctgcaaaatcttttaaaccaaatactggcgccagccgtaacggagaaggttttgatcctgaagaaggtacgacttacgagttaggttttaaatggcaagcacttgataatatgttatcaattgattccgctattttttacgccaataaagaaaatgtcttaacactagaccctgttgattcagcttataaagtcgctgctggcgaagttcgtagccgtggcattgagttaaatattgctggtcaaattacacctgcctggaaaattattggcgggtatgcttttacagatgcggaagtaactaaagacaatactttgcaaaaaggaacagctctagccaatattccaaagaatagttttaatcttttaaatatctatgaatttcaggttggtcctttacaaggcttaggtctaggcatcaatcaaaaatatattgataaacgtgcaggtcagacagctaatagtacctataccatgaaaggttatgcagttacagatttggtttcttattatcaggcgacaccaaaacttcgtcttaacttagatgtgaagaacatttttgataaagtttatgatgaaagtgctttcaatttatatgcttatccgggtgaatcacgtaccgttcaattaggtatgagctatacgttctaa

SEQ ID NO: 46780 - DNA, 951 bp, Acinetobacter baumannii
atgaatgactttataactagatatttaaataatctggggcagtggcatgaagttgcattgacaatgactaaagcaatagttgcaataggagtgttgtgcttagttgcataccttataacaattggttatatcccttcagaacttagttttggtgatacattcatttttctattgatttttgcggcctgttctattgtctatgctggattaagtatagtgctatttttatttggtatttcattaatgccagtgacatacatcatcttaaatatagttaataaatacttgccttcgcatgaaaaaattagagatgatttaccatttccaaagatcagtattattacatttattgcatctatttggtttatatacattcttcgaaacttacttttaacgtactggcaagtaagtctttatgtggggtgtacggtaagttggattgctttcttatattatgctttttacgttaatcaaaaagatattaaaatttttagtaagaagtttaaaaatatagaggatattattgatgacattggggcaagcgaacatctaaaaatatttgcaagagataagttaaagaaattagaaacgaatattaaaaacagtatacatgtagctatttttcttattgtgactccagttgcccctatgttttttattcccgatattggtgacacatttctaaactacgccatgcaaaaaactggtgtgagaatagaaaaagcgactttatacatcaaagaaccttatgcaaatttaattgaattgccaaaaacaacaactaaggagctgaatcagtataaaacctttatttttaaagatgttaaagtgttatttcaaggcattggtaaaagcactttagtttcttataaggtaaaggatatggaaaagcagttagtgattccaaatgaatatattactgtagagcgaagcaagaaaattgaagagtaa

SEQ ID NO: 46781 - DNA, 1344 bp, Acinetobacter baumannii
atggcagttactgataaacatccgcagtatattgctgcacaaaaaagttggttaattatgcgagacgccgttgctggtgaagagcagattaaacaggcacaaactaagtacctagctaaatcggccggaatgattgaggctgaaaagcaaggtgatacgactggagagatttataaggcctatctaagtcgagctcagtatccgctatgggttcaggacgcattacgcacaatgatcgggttagtttcaaagcttgagccgaatattgtgattgaaagttctctacttaaaggattgatagagaatgcaacaaatgacggttttgggcttaaacagctctttattcgcatttgttcagagttgctagagtttgggcgctgtgggctgcttgtcgatgttgatgctaaaggagtgccatatttcgccttatatgatgcgttatctattatcaactggaaggaaaacagtatcggtggtcgaaaggatttaaaactgttagtgctcgaggagcaatttgataatagtgaagatgaattcgggcacgaaactaaaacggttcaccgcgttctatctatggatgatggagcattagcggtccgattgttcgatggttcaaatgtggaggataaaactcccgatctcggcggtaatcaactttctttcacaccatttgttttctgcggtgccactagtaattctccggatgtaggtaccataccgcttttgacaatggccaaggctgctctgaagtattaccagctcagtgcagattattaccagtctcttcaccatacggcccatccgcaaccttggattagtggccttgatgatgacgatgatgatattagcgttactggtgttatggctgtctggagtcttcctccaaattcacaatgtggttatttggaaatttcaggtagcggcattgaactcactaaaaaggaaatggatgcgcagaaaaatgcagcattagaggctggtgccaaggtagtcgataccaatacacaagaatcaggtgaggcacgccgtgcacgtcaggatgaccagcaggcaagtcttcacagtatcgtgatgtgtgcagctgcagcaattgaacaagccattaagtatgcagcgcagtggttaaagcttgattcgacaaaatattcatttacagttgaacctgagtttattgtgcaggtcacggatattaatcttgcaaaacagctttatgagggtgctatttcagggaaaaactctttccgcacatattgggaatacctgatgacaggtaaattaccagctcacgactatcaggaagaagtgaagcgggtagaaatagagcgtgataacactcctttgtag

SEQ ID NO: 46782 - DNA, 960 bp, Acinetobacter baumannii
atggccgagtcttttcaatacccaccagaactattcaaactacttgtggatacaatccctctgctctgcaaaagtaagagagatgtaatcttattttttcggggagcaggagtaatacagtcggatcttacacacgttgaaacaactcttagaagagatcaaacatcaattaataaatttgaaattgcacgtgatgttttaacaaaagtgaatatacgtggtgataatggacttgctgttcgtcgtgaaattcttaaacgtgttgttgagttcgaaagttttgaaacatgttgggaaaatgatcagtataaagctaaaggattagtatcaagtatacgtgaacttataaataaaaaagactcatttactcggatgaaacaggaacgagatcttgagcgtcaacaaaaccttgctaagcgagagcttgaacgcaatcaaatattaaaaaaacaggagaggcttaaagaaataagtcaaagattaaatactttattcactatggatgataaaccgcatgaacgtggtaagttattagaaagtattttaaatgatttatttcgtacatatgatatacatattcatgaggattttagacgtagagatcctgaaacaggagtagttgtcgaacaaattgatggtgtaatagaactgaatggtcaattacatctagttgaaatgaaatggcttaaatctccagtcggaataccagagtttactcaacatattggtagactttttttacgtgcaaatgctcatggaattttaatagcagctaatggctatactgaggctgtaatatctcaatctagagatgcccttagtcaaaaaactttatttctctgctctcttcaagaaatagtaatgctcttatatcgtcaagatgatctagtagagtttttgaaaaaaaagtcacgcgcagctattcttgataaaaatcctttcttagaaatcttatattaa

SEQ ID NO: 46783 - DNA, 324 bp, Acinetobacter baumannii
atgactaatttcaaaaaacaccctgacggctacaagtcatttttaggccgtgacgaccaaggtctttattccgtacgtattaagtgggctatctatgctgcaaacgctaacggctcagtactttacgaaattaaagatggctttaaaaaaccgcttaatgttgagcaatttaaagctaaggaaccaaaggttttcgcttctcttatgcaagaaatcgatttccaacgcagaaagcagctcgcaataaaactacgtgaaacaaatatccctacttatgaccgcaaggcttacaagcaaaaacgtggcttcaccggctctagatga

SEQ ID NO: 46784 - DNA, 768 bp, Acinetobacter baumannii
atgacaactgaaaactcaaaagacaacttacatatctggaatgcagttaagcaaacgcctaccaattttcttaaaaaaattgagtttggttatttaaaaggtaaatcagatattaaccctcaatggcgattaatggctatgactcaggcctttggacctgttggtcatggctggacttatagacatgtacgtttatggtctgaaaccgcgccagatggaaccattatggcttttgctgaagtagcagttaaaaccaagattgatggtgtttggggtgaggaattttttggcaacggcggttcagcaattgttgaagttcaaaaaggcaaattagtagcgattgatgaaggctataaaaaggccgttactgatgctcttggtgtagcgtttaaagctattggtgtggcagctgatgtttacctcggtaattttgatggtagtaaatatctatacaactatgactatgcatatctagagcaaaatgcctcaaccccagcaggtcaaaattcaaaccagaataaccagacaactgctcagggtggtaaccagaagccacctcgtactcaggaccaactatatcaagatgctttaaaagcaattaaagatgctccagacactaacatcttaaatgctgcaattaagaagtttaaaggtactacatatgaggcgggtatcaatagagcatgccaagcacgtgccgatcagatgggttgggtccctaaaaacaatcctcagcaagttcaacaacaacagtcgttacatcactaa

SEQ ID NO: 46785 - DNA, 750 bp, Acinetobacter baumannii
atgtctttacactctcgaattaggcaaaaacttgaagaaaaaaaattaagagccgctgatttagcaagagcaacaaaaaaatctcctgttgctgtaaagaaatggctagatggcactagcgttcctacagcagaaaacttgaaagtcattgcgaaatttttaggtgtgagtgacgattggttgctttatggtggaccggttgaacaggaatcgaacaatttacctcaattaaatgttattgacattgaagcctttaagcagaagtacaatattccagatagtgaagatgctgttaagtttgttcaaacatcagataaaccattccctattcaaaaaagatacgttcccgtcaaagcttattcaaagatgggaatggatgggtacttcactgatatggggtatgacggaaatgcgggtgatggctatgttccaactcatacagcgggtccaagagcttatggcattaaaggcactggcgactccatgtttccagcaattcgtaatggctggtatgtagtatgcgaccctgatgcggaacttgtgccaacagaatttgttcaggtgtgtttgaaggacggaagatgcacaattaaggaatttgtaggaataaatggtggtgttttaagtttattggctgttaacggtagcgaacgcctatcttttgacatggatgaagttgaaagtattaccgctattacagatatcgtgccgccaagtcagcacagacaagaacatcccaaagctaattaa

SEQ ID NO: 46786 - DNA, 357 bp, Acinetobacter baumannii
atgagcaaagtatcaaccgaattgagtgcaagtgccagaaatggcgtatcccgcatattgcatggccttgatataagcaatcaaaaagagattgctgaacatttaaaggttgatccaagcactattactcggcttaaaacagacaagaaaaacaatggtttgaatgagattgaaatgttttgcgagctattgagtttgcttggattaaaagtcgttcctaaagattaccagagcattgataaggaacgtgttgctgcacttttagtcatgtctaaaagttggatgaaccgtatagaaacagttgatgacctatttcatgacgaaatcagtggtcaaaaggaaaaacttggatattaa

SEQ ID NO: 46787 - DNA, 345 bp, Acinetobacter baumannii
ttggatattaaaaaaccactacctgcgcaaacaggagtggtttataggcattcagtcgagatgaatcaaatgaataaaactaatttatcaaatcaaacaaccgaacgcaaccagccagaatttttagtgggtgacgttgtagtacttactaaagagtgtcgaagttttaaatcaaatgatttgtttgaagtcaaaaataaaaccctgactagtttatggactatcaaatcacaaaatcatttgtttctggtttcatcaaaagaaatacgaacagcaacagttgctgaacttaacgccaaacgccgactaacaagcgctgagcaagcattagcggaggtgtcatga

SEQ ID NO: 46788 - DNA, 696 bp, Acinetobacter baumannii
atgagtcagaaaattttaaatcggtttgaagagctaattaaagaagccaaatctattgctcaacataaaagaaataaaacagttcagagagctggcatttctaaatcagtagattattttgaagagccaataaatgaattatatttaacatggaaggttaaaaccgaaaatcttttacgtgttgcatgtggggaggactcagtacattatcaaacttttttacgagaaaaagaaaatggattatatgctcccattaagttacagaactctataccagtaattttagcagcatatgatgatcttaaaggcggttttttaatatctttcaagcagatagtacaggctgaagtttttgatagtgaacttgagcaagctaaatcgctacttgaaaatggatataaaaatgctgctgctgtaattgcaggggttgtattagaaacagctattaaagagctttgtaccaataatggaatagatatttatcttcctgatggaaaaagggagaaaaaattagaaaaactaaatgaagagttaactaaagcaggtatttacccactaacacaacagaaaaaaataacctattatgcagatattcgaaataatgctgctcatggaaaaccagaaaatttcgattctgatgaagtgaaagatatgataaaaggtgtcgaaaaattcttaatagactatctatcctaa

SEQ ID NO: 46789 - DNA, 363 bp, Acinetobacter baumannii
gtgagatatgcagcaaaaagaaaacaggatatttccgtttctaccacaccgcttgaggtggtaattccactggaacaaccagtaaagatctattcggctaaagaattagcagctatgccactttcagttatgaatgccgcaattgaggctcaggaaagattttatcaacttgaagaattaacccatatgggggggcaggctatagcagttcgccgtctcatggaggatgggcacaaactaattcaggtgaaagaaaagtctcgtattcgctacaaaatcaacaacgaatttattcctccaagaattattcgtcagttggaaatgcgcggtcttgtaaaattaggagtagtcactgatgtataa

SEQ ID NO: 46790 - DNA, 522 bp, Acinetobacter baumannii
ttgatcggatcaagcaccggtgcatttggtgcaaccgtatcaactgtatatgtgtgtgtatcgttaacactgctgctgttacctgctgcatctgtaaacgttactttggcatcaatcgtcttatctgcatccgcagtcaagtcactacctggtacgcttactgtccatgtgcctgctgtgctatctacagttgcagtatacgtctggccattgatcacaacagtgaccactgtatttgctgcatctgccggaacgtttttcaatacacctgtaacagtaacgttgcctgatgcttctgatgcattaatcacattgtcagctgttactgaatcaaccgtgaaattaacaccatcggtatttggaccaactgcatcaacagtagctgtacctggtaatgatgggttgcctgctggatctgtagcaattgctgtaactttatcgccatcatttaaacctgggtttggtactgtccaagtgccatccggtcctgcaacaactgttgttgtactgccatctggataa

SEQ ID NO: 46791 - DNA, 219 bp, Acinetobacter baumannii
atgtcatgtatgctgactttagaagaaatcgaaattaaacggcaagaactggaaagacatcttgaagatgttatgtctgttgaacttaagaagtggcaaagcgaaaacaagctatgtgtttccgatgtgaatatacgtttggccaatgtgaatagtcttggtggaactaaacataatgtagttactggagtaagtgttgatttagattacaaaccttaa

SEQ ID NO: 46792 - DNA, 444 bp, Acinetobacter baumannii
atggcctcacgtttaactttatttctcaaaagtacggtggctaaaatggcaatgactttagagcagacaaggcaagctattattgatcgcatgcaaagctttacgggtattgctcaggaacggattcagtatccaaatgcaccaggctttacggtgcctaaagaaggtttatggtgccgtttaacgattgcaggtgggccgagctttatttcaggcattgctgatagtccttgtacacgccgtaccggtaatatcatgattcaatgcttttcacgtcccaattcaggaataatggaaatcacaaaactgtgtgatgcttggcttgcccattttgaatattactcaatcgatcatctagaatgtttagaaggacaatcaatttttgtcgggcaagatgctgacttcattcagtataatgtgagcattgggtttaaggtgaattga

SEQ ID NO: 46793 - DNA, 369 bp, Acinetobacter baumannii
atgggatggaaggggaaaaagccaactgattttagttttgatgtggctaaaacggcagaggaaaaggtaaagaaaattacaatggatgctgttcaatctttagttgtttcaagtcctgttgatactggcgcttatcgtgcttctcatatcgtctcaattggatctggtgactatggtgtacgtggacctgaaactaatgcggtgcaggatgcagctcttcaagccgttaagtttaagctgggtaatttggtctacatacaaaacaataagccatatgctgaacgcttagaaaacggctggtctgatcaagcgccacaaggtatttatggcctcacgtttaactttatttctcaaaagtacggtggctaa

SEQ ID NO: 46794 - DNA, 531 bp, Acinetobacter baumannii
atgtcaaaacaacctaatttagataatctagaaagtcatatccaagaatctttaaatggaataaagcttttatataaaaatagatgtttctctcaagctaaatattgtacatatattctcattgatcaattagcatggttaattagtgtttcagaaacccaagtaaatatttattttaaaaattggttgaataagtattttattaaacattatccagaaataactgcagaagaaatttgggcatcacgaaatggtatgcttcataatcattcttctatttcacgagatatagttaataagaaagtttctcggcaactatggtttgtggataatttaaatcatctaaatgacgtgaatacagaatttaactcacccgattattttgtagttaatactacacgttttcttcaatttgctttactaaatgctatcaatgaatttatgagtgatctgaagagtggtaacgttccagatatgaatgatcttgctgaaaagctagggaagctattggctgaagtgaaacctgattga

SEQ ID NO: 46795 - DNA, 690 bp, Acinetobacter baumannii
atgacggatcatacaggtgtggtcatttggaaagctcaatataaagcttggggtgagtgtaaggtagaacaggctaaatcagatttctttgaaaattcagaaattattagtaataacatccgtttccaaggtcagtattttgatggggaaactgggcttcattacaaccgttattgttattattcgccttacgttggacgttttattagtaaagacccgattgggttgctgggtggctctaatatttatgcttatgcacctaatcccgtgggttgggttgatcagcttgggctagcaaaaacaccaactcgaactctgcaaaaaaattggaaaaattatgtaggttgtaaacatactaatttagatattcatcatggttttcccgaagaatatgcagaaagatttaaaaatatagctggtatcgatgtgaataatccacaatattattataatcttccaaaagaaaagcatactaaatctcctggtattcatactaacagttcgcgtactggtcagaattggaataaaacttggggaggaattttaaaccaagttgaagctatgaatttatcacaagctgaatcgaaggaaatcttggagcaacgcttgagagcattagcaaggaaagagcgtattggaaagcacaatgctacagctgttaagggtgcaaacttttgtcaattacagtaa

SEQ ID NO: 46796 - DNA, 714 bp, Acinetobacter baumannii
atgaaggaagttgaaagtgatccactatctatttatagaaaagtaaatgtagaaggaacactgaatttagctaaaaaagcagctaaagctggtgtaaaacgatttatatttatgagtagtattaaagtaaatggtgaagtgagtgatcaagtaccttttactcctcatgataatattataaatattaaagatccttatgggttatcgaaatatgaagctgaacaatctctattaaatttagcgcaaaactcgatgatggaggtggtcattattcgcccagctttaatctatgggccaaatgttaaggcaaattttaaaagtatgatcaatctggcggctaaaggaattcctttacctgttggatgcctcgataataaaagaagtatggtcagtatttataatttaagcgatttcattaatatttgtttatcacatcctttagcaaaaaatcaggtttttttaatcagtgatcaagacgatataacagttaaagaattatttacgaagttagctaaagttcagggtagaaatcttattgctgtgcctatacctaaagtattaattaattttttagctaaacttcttaataagagtgctgtcgcttcaagactttgttctgtattgatcgttgacacctcaaagaatatagaactattaggatggagagctccttttagctttgatgagagtttaaaattgatgttcaaaaagtaa

SEQ ID NO: 46797 - DNA, 402 bp, Acinetobacter baumannii
atgatccaagctagaaataacttaaagtctatttttaaagcatataaagctaatacagcgaataaaaaacctaaaaaactactacctacatctcccataaagattttagcttttggaaaattccatacgagaaaaccacagacaatagaagtgattgcaagtaatataaaattattgatgtcataccaactgtataataaagctagacttagcccgactgatattgcttcgatacttgcaataccattaataccatccataaagttatataaattaagcatccaaaccagaaaaagaatagcaagaatgttggtaaaaaaacctaagtttaaattattaaaaacagagacttgggcaaagccatttaaactaaatacgataaatgttgcagtaataaaatga

SEQ ID NO: 46798 - DNA, 780 bp, Acinetobacter baumannii
atggaattgcccaatattattcaacaatttattggaaacagcgttttagagccaaataaaattggtcagtcgccatcggatgtttattcttttaatcgaaataatgaaactttttttcttaagcgctctagcactttatatacagagaccacatacagtgtctctcgtgaagcgaaaatgttgagttggctctctgaaaaattaaaggtgcctgaactcatcatgacttttcaggatgagcagtttgaattcatgatcactaaagcgatcaatgcaaaaccaatttcagcgctttttttaacagaccaagaattgcttgctatctataaggaggcactcaatctgttaaatgcagttgctattattgattgtccatttatttcaaacattgattatcggttaaaagagtcaaaattttttattgataaccacctccttgacgagatagatcaagatgattttgaggctgaattatggggagaccataaaacttacataagtctatggaatgagttaaatgagactcgtgttgaagaaagattggttttttctcatggcgatatcacggatagtaatatttttatagataaattcaatgaaatttattttttagatcttggccgtgctgggttagcagatgaatttgtagatatatcctttgttgaacgttgcctaagagaggatgcatcgaaggaaactgcgaaaatatttttaaagcatttaaaaaatgatagacctgacaaaaggaattattttttaaaacttgatgaattgaattga

SEQ ID NO: 46799 - DNA, 897 bp, Acinetobacter baumannii
atgaatttagaagtccgttgggtagaggatctcctcacattagaacgtgaacgttcaatctcaaaagcagcagagaaaagatttattagccagtctgcatttactcgaagaattcaacaaattgaagaaatgattggtgctgaagtcattattaggaacaacaaaaacaacatcgaatttacagacattggtcgaattttattagtgatgtctaaaaatattgaaaaacaggtagaggagaccgcaaaactcattaaaaatattaaaaatgaaactgaatcgaccattcgtttctgcgttgttcattctttagcctctggatttttaactacttttttaaagaaatttcctacacttattcgtgatttaaaaattgaaattgtcgcaacgaatagtggagaaggcctatctttgttaaaagaaggtgcttgtgactttatgatttgctatgcagataaaagcaatattagaaaagttggggatgatattttaagtggtatcaaaattgctgaaacggttattgtaccggtttctgcaactgaacccgaccatagcccgaaacatacaatacaaagtaactttgctctgctagcgtatagtaaacacgcgtacttaagaaaattggtagatcaactgattgaaggtaagcttgtatataaaacgttatatgaaacagataatgccaccaatttaaaagagctggttttacaaggtctaggggttgcttggattccaaaaattaatgttgaagaagatcttgcagccggaaaattagtcattttagaccaacaagaatattgccttgctcaagatatttatatcttcaaaaataatttgagtgataataagtcggtacagaaaatatggaatggttttaaaggccagcaagacctataa

SEQ ID NO: 46800 - DNA, 1032 bp, Acinetobacter baumannii
atgaaagcccatagtggacacatggccacagcagactttgtagcgcaggcaattgagcgtgccgtagaaaaatcaaatatgccaaaaggtgtgtttaatatgatctacggtaatggtgtgggtgaaccactggttaagcatcctttaattcaggctgtgggttttacaggttcactgcgtggtggttgtgctttatgtgatatggccgcagcccgaccacaaccgattccggtgtttgctgaaatgagtagtattaacccgatgctgatgttgcccaaagccttaaaaaaccgtggtgacaaaattgcacaggacttggcagattcagtagttttaggctgtggtcagttctgtaccaatccgggtttaattttaggtattaaatcagctgaatttagccagctcattagcaagctgactgaaattatgggggctaagcctgcacagactatgctcaatgccggcaccttaaaaagttataccgctggtcttgagcacttaaccgagcatcaaggtattgaacacttggcaggtcaaactcaacaaggtaatcaggcgcagccacaactgtttaaagctgatgttgagcttttactggcaggtgaccagcttttacaagaagaaatctttgggccaaccacagtcatcattgaagttgaagataaagcccaactcattcaggcactacaaagcatgaatggacaactgactgcgactttaattgctgatgaggctgacttaaccgagtttgcagatgtagttcctgtgctagaggaaaaagccggtcgattaatcataaacggctacccaacaggtgttgaggtgtgtgatgcgatggtacacggcgggccatacccagccacttcagatgcacgaggcacctcagtcggaaccttggccattgaccgttacttgcgccctgtgtgttaccagaactatccacagagtttattgccagaagccttaaaagacagcaacccattgcagattttaagactggtgaatggtgagatgaccagagaagcgatctaa

SEQ ID NO: 46801 - DNA, 519 bp, Acinetobacter baumannii
atgacgcttaaacaactaaaagcttttttggcccttgcgcgtacactcaactatgccaatgcttctttagagttacatctcagccaatctgctttaagtctcaccatcaaaagcttagaagaagagttaggcggtaaactgtttaaccgtaatacacgccgagttgagcttactcaagaaggcaaatcactcattccatatgcaaaaaaattactcgccaattgggatgaaatggaaaacgatgttaaacaacgctttaaactcaatcgtggaaccttaagtattgcatctatgccctttgtgacccatgcaattttgccagaggtgattcatcaatttttagcagtccatcccaatcttaatttttcaattcacgatattccaaatgagaccattatagaaaaagtacaagacggtatttttgagcttggtatttgttttgaacctgatctcaccgaaggtttagagtttaaaccgttgtttgaagaagacttcttagctcggcgaattcaaacatga

SEQ ID NO: 46802 - DNA, 435 bp, Acinetobacter baumannii
atggattctacagaatacttttggcttactcggaaaaaagaacctaaaactaaacctaaaagccggccattgcctaaggcgaagcaaaaatatctcgaggctgaggcaacacttaaggaagagcttgaggatttggcgattggatttgaaagtaagtttcagccgatccataccaaacactggcgctttgattttcatatagtgaaattgcgtttgctcattgaaattgagggtggtccctggtctggtgggcgtggtggaaagctgtcaaataaagcatggagtcttaatcgatatgatcatgctgaagagatgggttacaaaatagagcgctttcatccagattctattttgtcgggatatgtcatcaactggataaaaagtgaattagcgagaattgaagatggagcagatcagaccatttccaccgactga

SEQ ID NO: 46803 - DNA, 441 bp, Acinetobacter baumannii
atgtttgcggaaaatatttataacaaaattaaagatgaggaattgttttcacatgactgtattgaaaatatgaacttacttatgacatgtatacgcagagaaattgagggaacagaatttaaattaaaatttaattttattgattttgttgaattgtttagtagaccattagatgaatgtaaagtaaaaatagatgttagtttgattcctcctcataattcagaaggtgagtatattttatggttagctggattaatcgaaaaaattacagaaggtggacctaaaccacctccgcctataaagaagtttattccagagtatatgagcttgaaatttgaattagattttttacccttaaatgaggaaaaaattcaaaacgaaggtaaagaaattacggattactttaattcaaagctttataaggcaacttttaagaagtaa

SEQ ID NO: 46804 - DNA, 759 bp, Acinetobacter baumannii
atgttagcattagttacaggcgcatcagcaggttttggttatagtatttcaaaaaaactgattgagtcagactataaagttattggatgtggaagacgcgcagaaaaattagaagaactacaaaaacagcttggcgaaaatttctacccactcgtatttgatatgactgatacggcagaaaatataaataagttatttaaagaattaccaaatgaatttcaaatcgatcaaattgacttattagtgaataatgcaggcttggcattgggtctagagccagcagataaagcggatttagatgattggtacaccatgattgataccaatgttaaaggccttgttacggttacccgattaattttaccaagtatggtaaagaagaaatcaggcttaatcattaatatgggttcaattgcaggtacatacccatatccaggtggtaatgtatatggggcaacaaaagcttttgtagagcagtttagtttaaatctacgtgcagatttggctggtactggcgtgcgagtaacgaatattgaaccagggttgtgtggtggtaccgaattttctcttgtacgttttaagggagatcaggagaaagctaacagtctatacgataagaaaaatccaattttgccggaagatattgcaaatacagtagcatggatcgcatcacaaccaccgcatattaatattaaccgtatagaaatgatgccaacgactcagacttttaaccctttaaaagttgtagaagtggaataa

SEQ ID NO: 46805 - DNA, 1011 bp, Acinetobacter baumannii
ttgtcataccatcatcttaactttgaagatcgtactgcattaatgcttgagtcaagaaaagaaggcttttcagccagaaaatttgctgaacttattaaaagacatcctagtacgatctatcgtgagcttaaaagaaatagcatcaatgacgtttatcaagctcgatatgcttctgataacacttttgctagacgtagacgtggtcacagaaaactcaaaatcgattcaatcctctggaaatttattgttgaagcgatccgttgtttatggtctcctcagcaaatagcaaagcgtttaaagacatttcctgatttggatcaaacaatgaatgtaagccatacaacgatttattcaacgatacgagcattacccaagggtgagttgaaaaaagacttattatcctgtctacgtcatgaaaataaaaagcgaaaagctaacggtgaacctaaaaaagattctatattacaggatattaaaactattcatgagcgcccagccgaagttcaagaaagaaaaataccgggtcattgggaagctgatttaattaaaggtaaagacaataaaagttcgatagcaacacttattgaacgaaatacacggctctgtatcttggcaacattacctgatgcaaaggcagaatcagtgcgcaaggctttaactgaagctctgaaatatttacctgcagaactgcgtaaaacgttgacctatgaccgtggacgcgagatggcagaacataaaatacttgaagaagatttaggcatagatgtatatttctgtgacccacattcaccctggcaaaaaggcacatgcgaaaatatgaatggtttaattaggcaatatttacctaaagggattgatttaaatcaggcagatcagcattatttaaatcaagttgccatgtcactgaatactcgtcctagaaaagcgttagattggcttacaccattagagaaatttgctcagcttgttgattatcataagacttttcaaactgtcgcacctcatgtttga

SEQ ID NO: 46806 - DNA, 519 bp, Acinetobacter baumannii
atgttgcaattgattttaggtggtgcccgttctggcaaaagccgattggctgaacaaacggccatatctatgcaattagctgtcacttatgtggctacggcacaagcgcttgatccagaaatgcaaagccgtattgtccatcatcaaaatcagcgtcctgctcactggtctttggttgaagaaccattatttttagcaaaaactctgcaagaaattgatcgacctaaccaaattattctggtggattgtttaacactttggctaaccaatttgttacttttagaagatcaaaatactcaacaatttgagtgtgagcagctgttaagagttttacccacactcgagtcacaaattattttagtaagtaatgaaacgggtttaggcgttgtgccacttggtgaaattagccgccgttttgtcgatgaagcaggaaggctacatcaggctttaggacaaattgcagataaagttgtgttttgtgtggctggttttccaatgattttaaaaggtgagaaataa

SEQ ID NO: 46807 - DNA, 918 bp, Acinetobacter baumannii
atgagttcaggcgcaaaaattcgattatatgcttgtgaggaagcagttttaggaactactccggcaaatccagtctggtacactgttcgccgtgttactgatagtttgactgaaaacgttactactgaagatagcagtgaagtagttgattcacgttttcgccaaggtgctgtagtaacggaagccgaagtaactggtcaactagagtttgaattatctctaggtacctttgacttattcttaaatgttctagcattcaacaactgggctggtaatgctttaagttttggtggtggagtccgtaagtcacttaccttagtaaaagtctttgaagatattggtcaagtctttatttatcgcggtattcaagtgaatacaggtgaaatgacgatccagaccacaggcaaaatcaccggtaactttggtcttgtaggtaactcatttacgcgacagcaggttaatcctgttaccaatcctattccagcatcgactcgccctctggtgagtatgccgaacgttgaaaagctacttattaatggtcagtcaattcaaggtaaagcttgtctgcagacactcaccatcaactttagtaataatctggaagcgatccgttgtatcggttcgggcaagtacacgcctgagttctacttagaaaaaatgatggatattggtgtaaatgccaatttcatgttttcagcaacatctgctgcttggatagatgccattaaaacccgtgatgtatttacattgacctttgatattacagacagcaaaggcagtaagtactcgtttaacttcccgcaacttgaagttaaggaagcaaatcacccggatggtggtggcgatgacatcattacaatagatatcaattttgcccaagtgcgtactagtccaacgattgtacgtgctcttgtgtaa

SEQ ID NO: 46808 - DNA, 918 bp, Acinetobacter baumannii
atgagttcaggcgcaaaaattcgattatatgcttgtgaagaagcagtattgggaactactccagcaaacccgatctggtataccgttcgccgtgtgagtgacggtttatcagaaaatgtctcaacggaagaaagcagtgaggtggtagattcacgtttccgacaaggtggtgtggttactgaagcggaagtgacaggtcagttagagtttgaattatctcttggaacatttgacttattcttaagtgctttagcctttaataactgggcggcgaatgctttaagctttggcggtactgtacgtaagtcattaacgctggttaaagtttttgaagatattgggcaggtgtttatctaccgtggtgtgcaggtaaatactggtgaaatcaccattcaaacaacagggaaaatcacaggtaactttggacttgttggtagctcatttacccgtcagcaagtcaatcctgtcactaatcctatagcggcttcaacccgtcctttggtaagtatgccaaacgtggaaaacttgcttattaatggtcaatcaattcaaggtaaagcgtgtttgcagtctcttacgctttcaattaataacaatcttgaagcaatccgttgtatcggctcaggcaagtacacaccagagttctacattgaaaaaatgatggatatcgaagcgaatgcttcattcatgttctcggccacagctgctggttggattgatgcaatcaaaacccgtgatgtgtttacactgaccttcgacatcagagacagcaaaggaagtaaatattcgttcaacttcccgcaattggaagtcatggaagccaatcacccggatggtggtggtgatgacatcattactgtagatatcaactttgcccaagttcgtacagcgccaacaattgtacgcgctcttgtgtaa

SEQ ID NO: 46809 - DNA, 459 bp, Acinetobacter baumannii
ttgcttcgtttaggtgatttatttgacttggatgataatcgtttttgcccagtgatggctaaacatgtgggtcatcaaccaagcttaagcaaagtacatgaagataaacatttatctttacgagagttccaacttgataaaagaactgtaaaacttgttgcagagtgcccaaatgagatggcatatgtagaaactcagaattggtttggttggatacgtgaagagtttcaaaatcaaatgtcacaatggaatttaattgtacctaatgaaaaatttagtgcattaccaactattgaacaattagatgtaagaatggaaataaaaaataaagagggagtaaaaatagaaaaggtattactagataataagcctatgaaatttagtgtggatgagggaaaggtaatagaattaatacaaggtgctaattttttcaaaatgctgtggatgcaacattattaa

SEQ ID NO: 46810 - DNA, 174 bp, Acinetobacter baumannii
atgccacttgaggaattgaaatatctacacgtaaacgagacgtatcgaattcataaaatgcgttttctacccattcttcaattttataacaactattattttctttttgaaggggagcatgcttggttaaaatttcttgttttacgccgtattcaagaaggttcattccagtaa

SEQ ID NO: 46811 - DNA, 180 bp, Acinetobacter baumannii
atgacttctgtttatcaaaaggttggagataaaaaagttgatttattgcctcaagggctaatggttaagcctttttctgaagcttctattcagcttaagaatagcaaccttcaggatatgagttttattaatgtcaacgactatggtggtcgagttgaacaccaaataaaacttcaataa

SEQ ID NO: 46812 - DNA, 504 bp, Acinetobacter baumannii
ttgatagaaaaagtagatattaagcaaaaattagtaggaaaaattagggagctttccccacaaggatttgaaaaattttgtttagtctttctttcaaaaattctatcttataatggtggtaatgtatctattgaccatttaggtaagattggtgatggtgggtttgatggggtaataaccaatcacaatatattggatggtgatgcaacatactatattcaatgtaagagatataaaaaaaacaatattcaaaggtcagaaattcaatcatttattggtgcgatgagtgataaaactatctctgcaaatagaggtgttttcctgactacttcgaaatttgcaaaaggtgcaagagaatactcaatgaactctataaagcaggtaaaactttttgatattgatgaaatagttttattgatgatagaaaatcaaattgggctctcagctttaactaatatccaacttcaaattgatgaagatttttttgaacagttttggctataa

SEQ ID NO: 46813 - DNA, 408 bp, Acinetobacter baumannii
atgcctgaatgtattcaggtacttctttttgctacacataataaacctacaccaggctttagtcgtgatgatggacctgaaacaaaccttccattgatgggtgcaatagttttagtggaactagaagaatttaatgcttatgtaatttttgacggtttgtttttaacagctcaaagatacccaagatatagagaagtaaaagaagtattagatgctgctgtaacttctgataaagcttattttattaatattcctgtaccatttacttcaagttggggccctgtaggtgcagttgatcaacttatacatttacctcgtgaaaaacttacttcagaatctagaaggaattactttaatttgctatgtaaccttactgaaaaacagtacgaagatttatatcgttcttga

SEQ ID NO: 46814 - DNA, 828 bp, Acinetobacter baumannii
atgaataaaattattcttggattaatggtagtaccacttgtattgagtggatgcataaaaaaagcagaggaaaaaccaacagaaaaaacggaaaaaacctctactataaaagcaactgaacagcccccaaaagaagaaaatataattcctgctatgctagtacgtaattttcttgtgaagtttcaacaacccaaaatttgtgctccaaatccagatgttgatggaattgtatgtacctctaaagaagcgattacacttaaaagtaatattgaatggattgatcaagtaatcgataaggaaatccgtaaagattatgcagatgctcttacacctccttcagaaaagcaaaagcaactaaatcaaacccaagctgaagggtttaataactggtcacagagtgtggtttatcgctttaatggacagtttggccaatatgtgcaaatttcgaaagtaagttcagaatattctggcggggctcatggtatagcaacttttgaagattatatttttgacttaaaaagtaaaaaacgcattgaattaaaagatattgttatcaatggaaagatgaatgcgcttaaagaagaattgtggaaacaatacggatattggtgtcaagaaaaagatatgcagccttatattagtaaagaagactttaaagtaagtgaaaatttctatattaatcaatcaggcgggattacatttgattttcagctttacgaattggctccatatgccgcaggtcctgtgagtttagaactctatgatacagatcaactgataaaatcagattttttaccgccaatgcctactttaaaaactgaagtgtag

SEQ ID NO: 46815 - DNA, 192 bp, Acinetobacter baumannii; identical to SEQ ID NO: 45978

SEQ ID NO: 46816 - DNA, 570 bp, Acinetobacter baumannii
atggagtcattaattgagtctaatataaacttttctatattcttttataatcctaatattcatccggtaaaagaatatctcattcgtaaagaagaaaatatccgcttcgcagaaaaacataatattccctttattgatgcagattatgacaccgataattggtttgcccgtgctaaaggtatggaaaatgaacctgaacgcggtatccgctgtaccatgtgttttgatatgcgcttcgagcgtaccgctttgtatgcatatgaacatgggtttagtctaatcagcagctctttagggatttcaagatggaaaaatatggcgcaaatcaatgactgcgggattcgcgctgcttcacactatcccgatattcagtactgggactacaactggcgaaaaaatggtggctctagccgcatgattgagattagtaaacgtgaagaattctaccagcaagaatattgtggctgtgtgtattccctacgtgatacgaatcgctggcgtatgagtaatggtcgagatcgcattaaaataggtgttaagttttatagtaatgtaatggaaaatgattaa

SEQ ID NO: 46817 - DNA, 132 bp, Acinetobacter baumannii
atggccatggctgctgatgtcaccattgcccaggtctctgaagtggttgagttaggtggattagacccggaacacatcattaccccaggtatctttgtacaacatgttgtacaagtacagcccgcacagtaa

SEQ ID NO: 46818 - DNA, 516 bp, Acinetobacter baumannii
atggctttaaaagtcggaattattaaaagctcggatgtttctaagtggtgtgaatataaaggtgctgatggacaggtacaggcagaatttaaagtccgtggtatcgcttataagccttttcaggtagcaatagagcgagcaggtaaccagatctcctctaagggttatgatgtaatggtcaaagatgaaaacgctaagctctaccatgagctgttgatggatgcctgtgctgctcatttaattgaagactggaagggcgtggtatttgccgaaatcgtagccggtaaaacagtggagtccgaaaaaccttatacacctgagaatgcctcaaagcttcttaatcttggtgatattggtatttcaatctggctattcattaaagagcaggcccagaagattcaagaagaagccgacaaggacaaggctttaattctgggaaagtcattgagctctacaaataccaaaaaacgtatgcgtcgaaaacgccgcacgaaatcgagcaaatcaagttcttag

SEQ ID NO: 46819 - DNA, 468 bp, Acinetobacter baumannii
atggatgataaagaatacttctggcttacaagaaaaaaagaacctaaaacaaaacccaaaagtagaccattgcctaaagctactcaaaagtacttagaggctgaagaagaatttactcaagctttggataatctggaaattaaatacgaaaagaaattccagtttaaatcaacaaagcattggcgttttgattttcatttaattgaacatcgtattttagttgaaattgctggcggtccttggtctggtggtcgaaagggtaagctggcaacaaaggcgtggagtatggaccgttacgatgttgctgaatcaatgggatataccgttgttcggttagaggcagtaccaagatttaagattaatgaatctggtccattgcagatccaagctcatttcgctagccaatggcttaaaaatttaaagaggcaaatatttaatggatcagatcagaccatttcctccaactga

SEQ ID NO: 46820 - DNA, 162 bp, Acinetobacter baumannii
atgtctgcagagactgtgcctgtacctggcaatgatgtattgcctgcagggtcagttgctgttgcagttactgtatcaccatctaccaggttacctgggtttggtactgaccagctaccatctgtgcctgctaccacggttgcagtggtgccatcaggataa

SEQ ID NO: 46821 - DNA, 294 bp, Acinetobacter baumannii
atgtcagaagcttatctattagcacgtaacgttaagccttatgaagatgctacccaagtacctgaacctttaaaaatggcctcctatcaaatcatcaagggcattattaaaggtgatctatatcaagggcaagaacaggcactaaaacgtaagaaagtcaaagctgatacggttgagaccgaaaaggaatatcaggacggatcagtaaagcttagtgcaatcgagcaattcattcttgatttgataaaaccgtattgcaaacggaaatccgtcttttttgtcaggaaaatctaa

SEQ ID NO: 46822 - DNA, 522 bp, Acinetobacter baumannii
atggcagtcctctatggaatttattttaatgaagaaagggctgtttcagaagaactttcctatattccaagagaaagaatggattttattgagaaagataatggagcatcaattcaactcggtttttttacaacttcggagtacgagtacattagtggcgtaatttataatccatatgctaactgggggaaagtccaagcattagctgaattatctgaagcaaataaatatacatattttaatgcgctttacactagggatgaagtaaatgaggaaacgttaaccccagatatccgtcaaggtattcctaaagaagaatattctgaatcgatctttgatggtatgtatatttttcataatcctcatgctaaatatccaattcctaaatttttatttaaccatcctaaaattgctcatttcagtttggataaagccgggaatattattgaaagaattagtggtaaatttttactttcacgaagtttaataggtgcacgtgtaagttcaatgtttcccaaataa

SEQ ID NO: 46823 - DNA, 354 bp, Acinetobacter baumannii
atgaccgcttataacgtgactaaagctggtgttcgtgcgttgtctgaaacactttcggctgagcttcgtaaattcaacattaaagtgaatgtgctctgcccgaccttggtgccaaccaatatcattaaaaatggtcgtattccgggccattattcaaaacttgcagaccatgcgctcatgaactacgcactcaccacaagtgatgatgtagccaaactgacacttaaccgtcttgatcaggatgagctttataccatccctcaaatcgatgcgaaattgttctggctaatgaaacgtgcatcaccaagtttgtataccaagtttcttggcacatcgtacaaattatttaaataa

SEQ ID NO: 46824 - DNA, 162 bp, Acinetobacter baumannii
atgtctgctgaaactgtgcctgtacctggcaatgaagtgttgcctgcagggtcagttgctgttgcagtcactgtatcgccatccaccaggttacctgggtttggtactgaccagttaccatctgtgcctgctaccacggttgcagtggtgccatcaggataa

SEQ ID NO: 46825 - DNA, 561 bp, Acinetobacter baumannii
gtgggattaccagccgaattaagccaagctgtgattgattggcaagatccaaatgatgagccaactgggccaatgggggcagaaagtagttattatgaaggtttggatccaggttacatggctgcgaatactaaattccaccgtattgaagagttaaagctagtgagaggctttgatggaaaaaaatttgatctaattgctccatatatttctgctttaccagaaaactcgaagttaaatattaatactgcttcgccattggttttagcaagtatggatgaaaaattagatataggagctattgaaaaagaattgcaaacacgccaacaaaatttaaagttcttccaaaatgtagatgaattgtggcaattgaatgctttttcagcggttgatagtcaaaagaaaaatcaagtaaatagtcttattgatgttaaatccagcttctttcaagctcagattgaagttgttctaaataataggaagcgacagtttactagtgctttaatgagaaaagataagcaagtatatgtttattcaagaagcatggctccatttaactaa

SEQ ID NO: 46826 - DNA, 336 bp, Acinetobacter baumannii
atgggactttcatcatttaaccgtgcacgggaaagacaacaaatgacagaaacaaaaattgctgaactcgaagaacaactggcaacagtaaagggcgaatttattgcctttcaaaatgatacggaagcaatgaaagcacgtattgctgaacttgaatcaggtgaaggtggtcaaacacctgaaaatgaccaaaaaccaagtgatactcaaccacaaccaattaactatgctggtctaaaagtagatgagcttcgagctgtactaactgaaaaaggcattgcatttgaagcaggtgctaaaaaagatgaacttttagcattaattccaaaggaataa

SEQ ID NO: 46827 - DNA, 426 bp, Acinetobacter baumannii
atgagtaacatcggttcttgtttatgccataaagtaaaattttctgtaccttgtgaaatcaaaacggtttatcactgccattgcagcttatgccgaaaacaaacaggtactggagcgaatgccgctactttagtaaaagaaaatcagtttaaatggttgatgggtaaggaatatgtggctacctataaaaaagaaactggttttacttcatcattttgtaatagatgtggctcgcctgtccctaataaaattaatggtacaaactatatgtggataccgttggggcttcttgaacaaccgtttaaaccagatttaaaacttaatttttgtatagagtcaaaacatgattgggttgtgttaggggatgctcataaaaactttgcacatttacctgagttagaagagttcttaaaatattttgaataa

SEQ ID NO: 46828 - DNA, 219 bp, Acinetobacter baumannii
atgaatatctgtgttggtggtgagttagacggccagaagattgaaaaagaaggtcgtttgttaaaagcttctgaaatcgacccaacattcacaactgagtactacaagcaggtttttaaccgcgacaacatcaattatcatttttggcttccaataggatccaacttgcacgaaatgtctgagcgagttttggatattttgagagcacctaaaatttaa

SEQ ID NO: 46829 - DNA, 399 bp, Acinetobacter baumannii
atgaaaactgtaggtaatgatttggttcgtaatcagctacatgctgatcgtaaatggtatctaatattaggctttgtgctcattattttcggtttggtgttatttagctcactgccatttgccacattttcggttgtttttctgtttggtattttaatgatggtgggtggtgtattacatttaattgctgccttaagtgtatttaaaggcggtagccgatggctgtgggcactttttggagtgctgtatttaatggcgggctattatgcattttctacgcctgttactacggctgtggttttaacaagcttattatcaattgctctgattattgcgggtgtaatccgcactataaatgcatttctactaagaccaattgcagggcgaattcaaacatga

SEQ ID NO: 46830 - DNA, 273 bp, Acinetobacter baumannii
atgaagcctatccttctcgccactcacaaacgtcttgaagagctagaaaaagaaaaggcatctgcgaatgagccaccctctttaatggttcaaatccaaactgcaccagaccttacaacgctagatgctttggaaatagacgtggctgcacgagatccgcagattcaaccgaagctaatggggtatgtgagaaaacgccgctatgaattagaaaatccagcagtttctcaaccagaagcagagcctgattatctattagtggatggcttctaa

SEQ ID NO: 46831 - DNA, 237 bp, Acinetobacter baumannii
atgacaattatcacattgctcgatgttaagacgaagaagaaggtgatagttcggtccgtaatagacccaatagcaagaaaagacaaaaaagggaatatacaaattattcaaattcataaatggctatatgatgaatctggagatttcgttgatgaagacttatatgaggcactcaacaatggagaagttggaatatacataactttgcagtatatgatcattaatattgaaaattaa

SEQ ID NO: 46832 - DNA, 330 bp, Acinetobacter baumannii; identical to SEQ ID NO: 46639

SEQ ID NO: 46833 - DNA, 273 bp, Acinetobacter baumannii
gtggcagttgatgaaaacggggaagtagtcattggtaaagacggccaaacaccgatgaccccaaaagaatgggttgaatctctacgtgagcaaaaaccgtattactggcctaagcctaatggtatgggcgcatcagggagcaacaattcaaaaggtcagccagacattctcaaagcagatggctcggtaaatatgaccaaattggcgcaattacgaaatgaaaacccgcaactagctaaagagctagcggcaaaacacggtattaaactttaa

SEQ ID NO: 46834 - DNA, 162 bp, Acinetobacter baumannii
atgtctgctgaaactgtgcctgtacctggcaatgaagtgttgcctgcagggtcagttgctgttgcagtcactgtatcgccatccaccaggttacctgggtttggtactgaccagctaccatccggtcctgctaccactgttgcagtggtgccatcaggataa

SEQ ID NO: 46835 - DNA, 726 bp, Acinetobacter baumannii
atgaaaaaaataactgctttactctttgctctttgtgcaactgtgactcatgcagagttacagaccttggataatgatgcattacaggcaatcaatggccaagctggtgctgatttatcactcatgcttaatttaaaccagaccagtaacggtatatttgataatggcagtggtggcgtatgtgaaaacgtagagttttgtcacattggtttagcaattaacaaacgttttgtgcaagcagacacgactaagccaagtggttgggctgaaaatagtgatagcggtaataaactttggttagtatttaaaggcgtacaaggcactttaaatattcaaaaaatgggtttagatggtgctgatttaaagtatcttgataaaagtaatactgaaattataaaaccggctattcaacttagttttagtgcagcacagccaattttaattcgtaattttggttttaatgctctgtcaattgagcaagataactttacgagctcaacaacaacgcaaggctcgagtgcaaatatgtatgattatgcatatttcaaaaaaccaacctatgcagcgactgctaatagtgcgaaccagcaagtagctactgcgaccccatcggcgtatgactatggtcgtgaaacaggttttatgggcttaatgatgaacggtaacatggcaattcaaggaaaagtcatggtctttagctgtgatggtagccatccacgttgttaa

SEQ ID NO: 46836 - DNA, 756 bp, Acinetobacter baumannii; identical to SEQ ID NO: 46354

SEQ ID NO: 46837 - DNA, 2604 bp, Acinetobacter baumannii
atgtcttcaaatagctttgaacaacatcaacttttccaagaagaaataatatttgatcaatttctctatacttattgggataaacatagtcgtcttggtcaaatccaagaattagcattacctgaaagaaaaaatactttcgccatctgttatcaagataaaagtacatatactttaaaaagtttaagtacaaatcttttatttaaggccaccttgaaaagaaatcaaggaatactaaaagttgaaaaaaatctacttattccattatttgaatttattactacatcctctgcaattaatatcaatgcaattaatgaaaatggagaaagattaagagcagctcaaattggtgctctatactcattaatagcacattggactctatctaaagagcctgcaacggtagtcttacctacaggcactggaaaaacggagactatgctattaacaacattagtcgaccaatctaaaagaacattagtaattgttcctactattgaattaaaagaacaactctttcaaaaatttagtagttggggaatccttaaagatctaggtgtgatacctcaaaattttcgaaatcctaaaattattgctttaaaagagactattaaatctgaagaagaagttgaatatttattaaatgcagaagttattatttctactccagctcttttagcaagaagcccatctgctataaaacataaattaaaaaacttttttagtcatgtatattttgatgaagcccatcatgtaacagcaaaagaatgggatatgttaaaacaattattctcagcttcaaaaattgtccaatttactgctacgccttatcgattagatagacacccgattcaaggaaaagttgtttacaattatcctttatcacaagctcttaatgataaatgtttttctaaaatttcattaatctcagtagatgaacgtcatccaagtaaaaaagattatgaaatagctcatactgctattaatcaattatataaagatcgccaaagaggtttttataaccataaagtcatggttagagcagagactagagaaaaagcagaagacttactaagcaaatatcgtatgtggtttcctgaagaaaaaataactcttgttcattctaaagtttcaggaaaaaaacaaataattgaatctattaaaaatcatgagtttgatattgttatatgcgtcgatatgttaaaggaaggttttgactatccgaatttcaaaatagcagcagttcatggtatgcataaatctatttcggtcttgctacaatttattggacgttttacacgcacgaaagacaatcttggtgatgcatcatttattgtgaattttgcagaagaaaaactcacaatggaattagagagtcttttccaagaaggaactgggtgggaaaacgtaattagccaaattgcagataccagaaaagaacaagctgcctccttactcgcctttttacaggaatgtaagcctttatccggttttgattctcctgatatagatttaaatcctaaaatcgtttttccggccctaagctttgtatgtttccacgcccaaaaagtagattggtataaatttagagaggcttttaatacaaaatactattctctttctcagccatttattaatgaagtggaaaatgttttttactttacgactcaatgtagagataaagtgaaatgggctaaatcagatcatattaaagatcaaatttggggtttagtcgttcttcatttcgataaatcaaaaaaattattgtatttaggttattcagataaattacttgatatagataatttagtacaaatcatttcactgggaactgcaaagaaaatagataaagatgatgttttcaaatcttttaatgatatcaaacgcctaagtatagttcatgcaggtgtgttcaaacctgctaatcacttgcatcgatattcaagattcagtggtgctgatgtcacaattgaattgagtaagattagagaaggtagtaaatgtaagaaatctgattttgtaggtataggttatcgtaatggaaaacctataagtattggagcttcagccaaaggaaaaatttggagtcctgcgaaaattgcagatttaaaagaatggaaagaatggtgtattcaaattggagctttaataactgatccgaatattaattcagatcaaattcttgaagactctgctaaaaagcaagatatcgttgaatttcctgaaaacatcaaaattttagccgctgattgggccgaagaattgtatgaaaaaattcatcgaattacgctcaagactgaccaacatgaatactgtctttatgaaactaaacttatcataaaaaatgtgagttctaaaaagattgatctcgctataaaaacagaaatagaaactttagacttttcaatagagctgacaggtggtgaaaatggttttaatattcaaaatctagataatgaaaaaatttgtatttcaaatttaaaaagggaagatatccgccaacattatttctatcaaatagtgacacaattagtggctgtattcataccatttacaatactcaacctacttatagaattccttccgatcaaatccatattctag

SEQ ID NO: 46838 - DNA, 1848 bp, Acinetobacter baumannii
atgctgaagtggtttgaaaaacttgtagatccttatccaaccaaaggcttggatgagcccttaccaacacgctttttcccatttgtttggcaagctactgaaggtgtgcgtccatatttattgctacttattatatgtacagctggtgcagctagctttgaagccctgctcttttcaaaaattgggcaacttgtagattggcttagtaatagtcagcctgaaagtttcttgagccaacatgcttcaaacatccttattctcattagcgtgttatttgctaatattttatttgttaatattcaatctgttataaaacatcaaattttatatagtacttttccaatgcgcttgcgttggcgtttccataaccttttattaaaacaaagcctagactttttccataatgattttgctggtcgactttctgcaaaggtcatgcaaacagctttagctgtccgtgaattctggattattttaggcgacatgttggcttacgtcagcatttactttattaccgtaagtattgttcttggtgcaatctcacccacattacttattccacttatggtttggttagggttatttttattaagcgcatggttctttattccacgtttaagcaaagtatcacaacaacaagccgatgcacgcgctgtaatgactggccgtgtaactgacgcctacactaatattcaaactgtaaaactctttgcgcatgctgggcgtgaaagccaatatgcaaaagcgtcaatgaaagagtttatgaccacagtctatgcgcaaatgcgtctaggcactctttttgaagttagcattaatttactgtctgctgttttatttgttggggtaattggtaccgcagtttggttatggactcaaggtttagcagcgttaggcgtaattgctgctactactgccatgattttaaaacttaatagcatggctgagtttatgatgtggcatatgtcagcattatttgaaaatgttggtaccattcaagatggcatgcaaacacttggtaagaaaatcaatattcaagacaagccagatgcaaaaccacttgcagtcacacaaggtgagattgtatttaaagatgtgacctttgcttataacaataaaaatgtcatcgatcactttaatctacacattaaagcaggtgaaaagattggtatcgttggccgttcaggtgcaggtaaatctaccctcatccaattacttttacacttttaccatcttaaagaaggtgcaattttaattgatgggcagaatattgaagatgttacacaagatagtttgagagcaaatattgctttagttactcaagacacttctctactacatcgttcagttgccgaaaatattaaatatggccgtccagatgcaactgatcaagatatgcaaagtgccgtgcataaggcaaaagcagctgaatttattcctcaacttgtcgacttaaaaggacgttcaggttatgaagcacaagtgggtgaacgtggtgtcaaactgtcaggtggtcaaagacaacgtatcgctattgcgcgtgttttcttaaaagatgcaccaattttaatcttagatgaagcaactagcgctttagactcagaagttgaagcagctattcagtcgagtttaaatgacctgatggtagataaaacagttattgcaattgctcaccgtttgtctaccattgctcaaatggaccgtttaattgttcttgatgaaggtaaaattgcagagcaaggtactcatgaagaattaattgctaaaaatggtatatatgcacaattatggaaacgtcaaacgggcggttttcttattgagcaaaaagtagtacagggtcaagattaa

SEQ ID NO: 46839 - DNA, 852 bp, Acinetobacter baumannii
atgacaatgttaaatgttgataaagcagaccaaattgccgagttgcaacaacgtgcctaccacattcgccaacatgctttacgtatggggcaagtacaaggccaaggctatgttggacaagctttaggtgcagcagatctactggcagtatcttattttcatgccatgaaatatcagcctgaaaaccctgaatgggaaggccgtgaccgtttttatctttctattggacattatgcaattgcactctatgcagccttaattgaagcaaaaattatcccacttgaagaacttgaaacctacggtgcagatgacagtcgtctaccgatgtcgggtatggcttcttacacaccgggtatggaaattacaggtggctcattgggtcatggtcttggaattgcagttggtgcatgtctagggctgaaacagaaaaaatcagatgcttttgtttataacttactttctgatggagagttaaatgaaggctcaacatgggaggcagtgatgtctgcttctcattggaaactagataacttgattgccattattgatgtgaataatcagcaggcagatgggcactccagcgaaattttagcatttgagccaattgttgatcgttggcagtcatttggttggtacacccaacgtgtagatggcaacaacatggaagctctgcttgaggcattcgatcaggcacgaaaccatgagggagcatgcccaagagtcattatttgtgacaccaaaatgggtaaaggcgtgtcgttcttggaaagccgcgaaaaaacacatttaattcgtgttgatgaacatgaatgggacgatgctttaaatattttgacccactacggacagtaa

SEQ ID NO: 46840 - DNA, 756 bp, Acinetobacter baumannii
atgacaactcatagcctcaaagataaagttgtattgattactggcggtgctaaaaacctaggcggactcattagtcgtaaatttgcagaacagggtgcaaaactcgcaattcattataatagtctggaaactcaggcagatgcagagcagaccttagcagatattaaagcattgggtgcagatgcaattctaattcaggcagatctaactcatattgaaaatattgaaaaactgtttatagatacgaaacaacattttggtggtatcgatattgcgattaataccgtcggaaaagtccttaaaaaaccgtttttagaaaccaccgaacaagagtttgatagcatgagtgatatcaactcaaaaattgcctatttctttattcaatcggcaggtcgacatttaaataacggcggaaaaatctgttcaatcgtaacttctcttcttgctgcttacacagggttctattcaacctatgaaggtttaaaagcacctgttgagcattacacccgcgctgcatcgaaagaatttggagatcgccaaatttctgtgactgctgttgcaccgggaccaatggacacaccattcttttatggtcaagagtctgccgaagcagtcgcttaccataaatcagcttcagctttaggtggacttactaaaattgaagatattgagccattagtccgtttcttagtcaccgacggctggtggattacaggtcagacgattttcgcaaatggtggttataccacccgctaa

SEQ ID NO: 46841 - DNA, 288 bp, Acinetobacter baumannii
ttgtctgatgtgtatcagtttacgttccataaccaactagagttggtaacatatttttttgaacaaactgaattaaacgcaacagtttgtcattttgccgatataataagccttcggcgtcggcataattctttaggacctgtccgagctggtgatgaaagcatcattttgattgaggtttcaatcagggaaatttcccttcagatgttcacttacggtggtatccgtgcgctgactatatcaaaccttgcagcatctgcctatgggctaagcttagatttcttgtga

SEQ ID NO: 46842 - DNA, 606 bp, Acinetobacter baumannii
atgagtcttaaactttatactaacaatgaatcgcgtggtgtcgttatagactggcttttggttgagcttggcgtggaatgtgaacgtattgaagtagcataccgaaccgagatgaaatcacccgaatatttaaagcttaacccatttgggaaagtgcctgtattggtagatggcgatgtcgttatttatgaattaggtgcaatttgtgcatatttggcagacaaatttagtgacaaaggtttggcacctgctttagatgatccgaaacgtggtttgtactatcgttggctctttatgatggcaggtccttgggaagctgctggtgtcgataaagctttaggaatagagatctcacctgagcaaaaaatgtttgtgggttatggtgattataacgatgcttatcaagctttagttcaaggactgagtgaagcaaatccgtatgtatgtggtgaacaatttaccgccgcagatgtaagtgttggagccatgctattatggcaattaaaaatgaaaacgattgaatcgcacccagccattacacgttatgttgaaacgatcaaacagcgcgaaggcttaaaacaaagcagtatgggccaactgttgtaa

SEQ ID NO: 46843 - DNA, 390 bp, Acinetobacter baumannii
gtgatttcaaaacctgacgatgagttaaaacaacaagttgctgaactcatgatggaagaacatccgtttagagagcaactcaaacgccatgtgtactattcaactgaacctaatgatgtcactggccgtctagagcatacgttccaaatgttaagaaccattgaacccctttgggataagtttaaaaaagctgaatctaaaggcaagtttacgggtcttacttttgaagagaatattgctcaagcgataaaagaaggctttatttctgaaagcgaagctcaacaattattgcagtacaacgtaattcgattcgatagcatgcttaccgatgtttttgatgaaaagttaaataaagacctacctttatcaaatcctcatcaaatagtgtga

SEQ ID NO: 46844 - DNA, 1383 bp, Acinetobacter baumannii
atgaacgcggttaatgcttcatttacagattacaaagttgctgacatcacacttgctgactacggtcgtaaagaaatcaaacttgctgaagcagaaatgccagctctgatcggcttacgtaaacgttatgcagcgtctaaaccacttgctggtgcaaaaattcttggttgtatccacatgaccattcaaacagcggttcttattgaaacgcttgttgaattaggtgctgaagttcgttggacatcttgtaatatcttctcgactcaagaccacgctgctgctgcaattgctgctcgcggtattccagtttttgcttggaaaggtgaaactgaagaagaatatgtatggtgccttgaacaacaaatcaatgtaaatggccaaccttgggatgccaacatgatcttggatgatggcggtgacttaactgctcttgttcatgaaaaatatcctgctcttttagaacgtattcacggtattaccgaagaaactacaacaggtgttcaacgtcttatcgaaatgtggaaagacggcactttaaaagtaccggcaatcaacgtaaatgactctgttactaagtctaaaaacgacaacaaatatggttgccgtcactcattaaatgacgcaatcaaacgtgcaacagatatgcttttatctggccgtcgtgcgcttgtgatcggttacggtgacgtaggtaaaggttctgctcaatctttacgtcaagaaggcatgatcgttcgtgtaactgaagttgacccaatttgtgcaatgcaagcatgtatggatggttatgaagttgtatctccatacaaaaacggcgtacaaacaggtaaaaaagaagatattaaccacgatcttcttggcaacactgaccttgttgtaacaacaactggtaactaccatgtgtgtgatgcagcgatgttagacagcttaaaagctggtgcagttgtatgtaacatcggtcacttcgatacagaaatcgacacagcttatttacgtggttacaagtgggttgaagttaagccacaagttcaccaagtttatcgttcagaagacgaaaacaactatcttatccttctttctgaaggccgccttgtaaacttaggtaatgcaactggtcacccatcacgtgtaatggacggttcttttgctaaccaagttttaggtcaaattcacttattccaagagaaatttgccgacctacctgcaagtgaaaaagctgcaaaaattcgcgtagaagttcttcctaagaaacttgacgaagaagttgctgctgcaatggttgcaggtttcggtggtgtacttactcagttaactcaagagcaagctgattatttaggcgttgctgttgaggggccattcaaatctgacgcttacaaatactaa

SEQ ID NO: 46845 - DNA, 837 bp, Acinetobacter baumannii
atgactaaacgtacacctatttcttttgagttttttccgccaaaaactgatgccggtgctgaaaaacttcgcattgttcaccaagaattacagcaattaaatccagagtttttctcgattacttatggtgctggtggttctactcgtgaacgcacacttgctgctattgaagatttcaatggtaaaggcactcctgttgcccctcacctttcttgtattggtgatgataagacgcgtattgctgaactactcgatttatacaaagctcaaggcattgaccgtattgtcgctttacgtggtgacttaccatctggacaggttggtcttggcgaacttccttatgctcaagatttagtacgttttattcgtgagcactcaggcgaccattttcatattgaggttgcggcttatccagaaatgcatcctcaagccgaaagccttgactcagatatccaacgttttattgaaaaagtacaagctggtgccaatgcgggaattactcaattcttctttaatccagactcatacttttattttatagagcgtttggaaaaagctggaattaacattccagtcgctcctggtatcatgcctattaccaatgcaagtaatttaattcgctttgcagatggtactggtgctgaaattcctcgctggattcgtaagcaattacaagcctatggcgatgacagtgaaagtattaaagcttttgggcatgaagttgttgttaagctatgcgaacgcctcattgcaggtggtgcaccaagcttacacttctactcaatgaaccaagtcgaaccaactcgtcagcttgttgttgaccttggtttaaattaa

SEQ ID NO: 46846 - DNA, 600 bp, Acinetobacter baumannii
gtgtattcagatataaaaggctatatcagtgataataaaaatgaagttaaatatcttgttgatactcaacgtttttggttgaaaaatagaaatttaaaatgtaattttaatggaaaagaagcaaatagtggaaactataaatgtttaagtgattttaataattctaaaataaaagatttgaaaaattcatatttggaccttgataatttagaaggaaagctaataaaaccatttagatatacaaatggtatcatgaaagagttggaaacaggtggatgttattgtagtgaaagtacaattaagattttaaaagataaaatttatatatatcaagcttgtgatcaaggtttaaaggagccacgtatatataatattgttggtaagaaaaaagatagtttttctgtagaatatcaaattgacactaataataaagttccggaatttaatttagcatttgttactaacggtaaaaatgtttggaatatagttccgaaaatttttagaaaagaagatttaataaatttaaattttggaattaattatataactgatatgaatataaaaaataagaaaaatgattgtcatgatgatgaagagtaa

SEQ ID NO: 46847 - DNA, 726 bp, Acinetobacter baumannii
atggaaaaacattttaaatttataatttccactgttcttatgatggggcctgtaggatcctcctatgctgactttggttttattcaagataaggatgggtacgttaatgtacgaggaaattcaagtttaaattctaaagttacgtccaaattaaataataatgaaattgtttcttgtgtgatggatgaagggacaaataatttttgtttagttaatgcaagcaatggtgtaactggatttgtctataaaaatagagtaaataattttagtggttacaattctattaagctatctcaatattctagagaaaaatctgtttataatgataaaaatataatagtagaagtgtatgcaaaaaaagctattttagatcctaaactttataaaacttttaaaggtgaatataagtattttaataataaaaaattctttggtactgatggtactttgcctaataataattttttacaacttgataaaatcattattaagagtaaagatatgaaaatagaaattggtaaaaatgatatagagcaatacttttttcctaaaaatggtatagacggtgacaagaacgagcttgctgattttaaaatatatttcttaaataataatatttttattttaaatacttttaataatggtggtgcagcagcatataatatcgttttaaatataaaaaatggaaaactagttgccaataaagcttggaaggttgaaatttaa

SEQ ID NO: 46848 - DNA, 1665 bp, Acinetobacter baumannii
gtgaaatatcctaaattatgtcctttaacggcggcaattgttatctccggtttttctagctttgccaatgctcaattaggacaaaacctagctgttgatattcgctccttatccatggggaatgcagtaactgcagaccctcctggtattagtgcagttcattttaaccctgcagctttagcaaaaattgatgggttgcaaacagatgtacaagggattcttgcaaactttgatattcaaagagaattctcagcaccgcctggatataacgtttttggttattcagatgacccgattgtttgtaatgatggcccagaagtttcagccaatatttgtacagattttaaagactctgttcacggtgatgtggagtacgcgagcctgtatgtacctattcttaaaaaaatggtagatctcggagctggttatccactagttgcccctacagcaggaattgcctataagccaccaggatcaaaagtaacctatgcaacagccgtgtatgcaccgttggttgcaggttttggagctgaaaatggaaaccctggtaactacatgggtcagcaagttgctgttgagcggatcacctatttatcaccatcttttggttatcaggtaaatgatcatttatcgattggcgcttctgtagggatgtcatataacgcccttgcattaaaaaccgacttacgtttccctaatgagatgataggggtattacgtatggttgatgaggtggtttgtaaaccttttaaaaataatagtgacatgatcaccgacttactattatttgggatttgtaacacacaagaaggtatgaatccatttggtaagatgggagcactacaggtttcattagaacaatctttaagcccaagttacaacttaggattgctttgggaaccaacagataattttgggtttggtatggtataccagagctctgccaagatgcgtttaaaaggcaaatatatgattgataatgccaaagcgcctcagcaacttgtgtcaggacttaactcatctgctacgggtcaaattttagctagaattcttgggttgccaggttatgttcctgatattgagtcaggcttagtagcaatggatttagaatatccagcccattttcaggcgggtattaaatataagatattgccagatttacaattgaacttagatgttggatggactgactattcagcatgggataaatttaaatttgaatttgatcgccagatttcattacttaaagttgcaaaattactatctaataatgtgactgataactccttggcattaccattgaagtttacttccccatggagttggggtattggtttagagtattcagcaacagatcgtttgaaattacgtgcaggttatgaaccgcgtgctagtgctattcctgatgataaacgtaataccatggttccaattaataatgcgcaattatttggtctcggtgtgggttatcgttttgatgcggatacagatctagatctttccgtcggtttcctacgtagtcgtgacaatattccagcttgtacgagtacattatcgaataaatgtggtgtcgataatatcttattaaacccatacgttggtttggatgtgaaaactaataccaaagttacagtacttggtttgagctatagaacgaaatggtaa

SEQ ID NO: 46849 - DNA, 642 bp, Acinetobacter baumannii
atgacattacgattaggcgacacagcccctgattttcaacaagaatcaagcgaaggcactattaatttttatgattttctaggtgatagttggggcattttattttcacacccggccgactatacgccagtatgtacaactgaattgggttatacagcaaaactaaaagatgaatttgaaaaacgtaatgttaaagcaattgccttatctgtagatgatgtagagtcgcacaaaggctggattaatgacattaacgaaactcaaaatacaacagtcaattttccaattattgctgacaaagaccgcaaagtatctgagctatacggttttattcatccgaatgccagtgaaacccttactgttcgttctttagtgattattgacccacataaaaaagttcgtctaatcatcacctaccctgcttcgactggtcgtaattttaatgaagtcttacgtgttgttgactcattacaattaaccgataagcataaagtggctacaccagcaaactggcaacaaggtgaagatgtggtcattgtcccttctttaaaagatgaagaggaaattaaacaacgcttccctaaaggttatactgcggtgaaaccttatttacgcctcacaccacagcctgagcaagattaa

SEQ ID NO: 46850 - DNA, 930 bp, Acinetobacter baumannii
atgattaagcaaaaaaatattattattgggtcagctacaggatacaacgctgacctgatctcttcttttgtatattctttgggaaagacagactttgatggcatattgactttaattatatataaagagcaaatgacagagtttgtgaatgcattctcagacgtcaaaaattttaaaattgaatttaaagtttcaactattggtaaatttaaatcaaagtcaaagtattcaggtatttataaatataaatttgtgaaaaatatctttaagaaaattattgacttaaccgtaaacgaagaaaaacccgaaacaaagataaaaggtcttaaaatcacaggttatcctcatgtgagccgtttctttgaatataaagaaattgtagaaaaccatcctgatgcttcacatgtattgctaactgatgttcgagacgtttttttccaaagtaatccttttaagaatcttggcaaaggtttatttgtcggaatggaaaatccagactttacgataggtactgagcaatataaccaaaagtggattttggatgcatacggtgagagtttttataaccttgcaaaagatgagcaagtctcttgttctggcgttactattggggatcatgaatcaattaaagtctatatcaataaaatgattgacgaattctgtaaacagccatatcaaaaaatgtctaacagaatttatgatcaagccatgcataataaattattaattactaatgagttggtagaggtaactcgttgtcagccatttgaatctattattgtaactcttggattatatccaatagagcaaatttctattaatgatcaaggttttattattaaccgtaaccaagaaatcattcctattgtccatcaacatgacagacatccggaactgattcagttatgtgataattatattggaaaataa

SEQ ID NO: 46851 - DNA, 756 bp, Acinetobacter baumannii
atgaaaaaatatttaatcagtattgaatctacgaatagtgaacgtttaaaaaagttgtactctcaagcaacattttacaaatatcgcgatgaatttaaacaatttggggtaattgggaaaaatttaagtgttagtgagtattttcaacaaggggtagcaggcaagaagaaaccgatgacgcctggtgaactaggctgtgccatgtctcatattgctgcattaaaagattttttaagctctgatgaagaatatgccattatttttgaagatgatgtaatcgaacgttttgaaattgattttcaagatttagaaaaacacattcgttctttgaattttggtccttgctttttcctaagcttgggcggtattcaaatgaaaatatgtaatcgggttcgaggaaaacttttacctgaagaattgtataaccaaaaaattcttaaagtggattacgattatcttgaaaaacttgcttatgcttatgcatatgttgtagatcgtaaaatggcacagatgttggtcgactatcatcaaccgataaaaatttacgaccattggcaagaccttgtagggcgtggtgaatttagtttttatgtcagtttcttattcgatcatcccattattgagaacaatgatgctttaagctatttggagaaagaaagaagtttagtcggttcacattctcaagacgatagtgattttttgcgataccttagagttaaattaaagaaatatatacttaataaatatataatttag

SEQ ID NO: 46852 - DNA, 891 bp, Acinetobacter baumannii
atgctaaatcgcctaatccaaaaaaaatggtacaagtaccaacaagcaaaaaaagcaaaaacttttgactctcattggtatatgcgttttggctggttagaacaaccttttacaacacttgagcaattagattctctctttgaaatccattctcctggaaagtttacctttgccgatagcttttatgctcatgaaaatggacgacattttattttctttgaagaggtggatgatcaacatccggtaggctttctttcagttttagaagtctttaaggatggcacttacaccccgcccgaaactattttaaaactcgattaccacctctcatatccttgcgtctttaaaatagatagcacttggtacatgattccagaatcttctgccaacaaaactattgagctttggaaatgtactgattttccaatgaaatgggaaaaacattctaatctgatcaagaatatcgaagcagttgatagcacccctttttatcatgagggcttatggtatctttttacctcaacgcgtcgtgattgtaaaaagtttggtgaccgtttagatttgttctttaccgaagatattttaaatcctaactggcaagaacatccaatgaatccggtatgccgaggcagtcagcagttccgtatggcaggcaaaccttttatttataaagggcaactggttcgaccaagccaagattctttaaaacgttatggcggcaatatcgaattaaaaacgattactcagcttagtccagcagcttatgaagaaaaattactagaagtagttttaccaaattggaatcaggcagatgacggttgccataccattaatgtcgaagataatttcgtggtacttgatgccatccgccttacaccaaaaaataattaa

SEQ ID NO: 46853 - DNA, 3831 bp, Acinetobacter baumannii
atgtccatcttaaagctcaaaccaatcactaaagacacagtattggttgcgatttattacatgattgatttcatgcattatcagagcaatattgctcgatttttccttcttataatccataagcaaatagaacttaacttgtctgtagcaaagcaagctttagcttttgcccgtcaagaaagtgactttccaaaattggatgaagttattgaagtcttatataacgaggctatcaaaaacattgatgaatcagttatccaacaccttaataacagttccagaaatgttattgaacagctagagactattgtcagtctttttgcttgcgataaagagctgaagccatacaccactaaaaagaataaaacactacaggttattggtcttaaaggcatcaaattaaccaaagctaaagagtttgacccctatgccttttattatcagggtgaaattcttgtacgctcaaaacatcttaaagctattccagactctcttctttcagaagatcagcaacttgtaaaaggattattcttacatgtatcaaataccaattcagatgtggaatcagttggcgaatttcgtctcagatccagaggaccaattgtttctacaactggatcaggaaatgatgaatttgaggcttcagaagcaatcagaaatgatggagaaattggggtactccgagacagtaattctggcttatcaaaaagtgatgatgcaagtttatctagcgtccgaaatccaagaaatgaatcttcagatggaaatagtagagccaatactaaccggattaacagcagcggaggcggtgaactatctggtaagagatcatctcttaaacgagcaagagatcgatcaattgtacaatctgctaaatcagttagagctgccatagatgaaaagctagaagctcaattaaaagcagataatgtagaaacaatttggagcgatgcttcaaatattgacgcagctttgccatatctgcaaccggcacaacgtggtgatgttttaaaaactgaaaagcggttaattgaggaaaataagaagggtattctttttacaaacggcactggtacaggtaaaacctttactggtctgggtgtagcaaaacggtttatcaatgctggccttaagaatattttaattgttactctaaacgataaaatcgctaatgactttgtcaaaagctcaagccctttaaatatcaaggcttacaaattaaaaagtattaaagaaaatggcggtgaggatcactcagtcgtggtcacaacctttgctaattttggtcaaaataaaagtttggttcacaaacattgggatctgattttaattgatgaggcccatactctatcgcaatcatccgatggtaaagcaactgcagcattaaacaaactacgagcattaaccgggcatttgcatggttttagtgagtggtttgaagataagtttgctgagcagatgccaattgaagaatttgatgaaaatggtaaagaaacagaacaatatctaagcgcttataacaaaatgcaggtccttcgaaatgaacaacgaaagatctggaatttgaattggaaacaccagaaaagtaaggtcaaagttgttttcttatctgctacgccatttagctatcacttttcacttgattgggcggaaggctatttatttgattatatgtctccttcagtatctgttgatgaccaaggtaatttagctgaaggctttagtaaggctcgagagcacttctatatgggaaatcttggatatcgaaagcgatatggtaagttgacgcgaccagaagctaaggtggatacaggtgtacttgaaagacagttcgccgaaaatcttaaaaacactggtgctatgtctgggcgggatttagaagtaaattttgactatgatcgtaaattcattctaattggctctcgtgttggtgaacttattgatgaaggtttaacttatcttcgcaatggttataaagaaatagaagggcacaaaacacgaacttttgaagaatgggctgctcagactggtaaaccaacaacaggctggggacgtcatgcatctatgcaagaatatgatcggctatttactggcaaccgatttaaaaacatatacgaaattattgcaaaacgctttgattacttagcaagacgccgtttgttagaagctattaaagctgaagcttgtgttgatatggtgaaaaagcacttagcattaggtcgtaaagtagtaatttttcatgactataacgagggcggtggttttgcacctttcttgattagtaagcttgatatcgaaaaatatgaaagcccacttagagaagatattgagcttgaatataatgcattcaaagaaaatagaccggatctagtaaatctcaatcttgattatgattcacctgttgaaactttaaagaatgcatttcctaatgctcttttatttaatggccgtctttcaaagcaacaacgtgaaactaatgtagcgttatttaatactgatgatagcgggcacgatattctcattctgcagtcagatgctggttctactgggattagcttgcatgatacaactggtaaacaccagcgagtactcattaatattggtcaaccaacaaagccagccaagttgagacagacggaagggcgtatctatcgaactggacaagcatcaaatgctattcagagatacttgactactggtactgcatgggaacgggctgcatttgcagacacgattgctggacgcgcagaaacagtagataactttgcaaaaggtgctgatgctgtagtaagtatcaaagaagcgttaattcaggcttatgaagaagctaaatatgaagagccaagtctaaatgatggtattggcggtaaagcatatgatgaagaaaatgcccgcattgctaagttaacaccatttgatcaagcactcacattctactataccaaaggcaaacgttctgaaagtcgtgataaccgcgaaggtaaggaatggtatgcaacgcctgaacctctaggattcaaaatgattgaatgggcaggggtacacactggcgattctgtgcttgaacctagtgctggtgatggtgctattggtcgttttgttcctcaggatgtagagttgacaatgattgaaccgactgagtctttagctagtcgtgctcaaatggcaaatacaggtgctaaagtaattgttgatacattcgaatctttagaatcattgaataagtaccatgcgattgtgatgaatccgccatttggtcatgctggcactttggcaattcaacatatcaagaaggcttttggtcatctttatgatggtggtcggattgtggccttggtaccacgtggtacgatggattctaaagtagacgaatttattgaaagcacacctggtgcaattttgacagctgaaatctggttacctcaatcaacctttaaaaatgctggtaccgcagtttctactcgcatcatcattattgaaaaacatgcaggctctaatgatgttccagtaacacgagaattagactttacgcaccttacaagtgttgaagacctcttttcagaaattcgtgatatcgcaatgcctcctagaaaactacgtattgatgagcagcttgctaagtacgatctttatgtcagaactgaacgtagcaagtatgtattcaatggcgacggcgttgataaacctcagatcaagaatatcatgctcaaattctggggctcagaagttaatgagtttgatgagattgttatgccatataacaagtctgctgaaattattaagaagattgatgaatttgagcaagagaataatattaatctagctgcttaa

SEQ ID NO: 46854 - DNA, 1215 bp, Acinetobacter baumannii
atgactaaaacaagccatcagttttctcaatcactcatttatatgctcattggaagtgccattattttggctttgtcactaggtgtacgacatggttttgggctttatttagtcccgatgagtcatgagttcggttggggacagcatgtttttagtctagcaattgccatgcaaaatctaatctggggtgcaattcagccttttactggggcaattgcagataaatatggcagtaaagttgtggtaacagtcggcggattactttatacccttggcttactcttaatggcttttagttcaagtgtactcattttgaatttaagcttaggtcttattattggtttagctttatcagcaacctcatttacagttttgcttagcgcagtaggccgagctgctccgccagaaaaaagaagtatggcaatgggtattgctagtgcagccggttcttttggccaatttattatgctgccttctacccttctcttacttaagacagtgggatggtcatcagctttaatggtaagtgccctgttaatcgctcttattattcctctagcatggatgttaaaagggccaagcaaccaaaccccaaaagcaattgcccaacctcagctcacctttaaacaagtacttcacattgcgagaaaacataaaccgttttggtggttagctttaggctttttagtatgtggcttccaagttgtcttcctgggtgttcacctaccaggttatttaatcgaccacggctttgatgccactacaggtacggtgtttcttgctttagtcggattatttaatatcgtagggacttatggcgcaggctggttaggagatcgtttctcgaaacctaagttattaatggcactttatggtagccgcggcattgcaatcattgctttcttattattacctctaagcacttatacagtatatgctttcggtattatcatggggcttctatggctttctacggttccgctcaccaatggtatcgtggcaaatatgtttggtgttaaatacctttcaatgttaagtggtattgtatttttcacccatcaagtcgggtctttctttggtggttggcttggcggtgttaaccatgatttaacaggtaattacaatgcgatttggctctgttctatcgcattgagtatattaggggtaatcgtacatttctttgtaaatgaggaggctgttattcatgacgcataa

SEQ ID NO: 46855 - DNA, 1749 bp, Acinetobacter baumannii
atgaataagaaaggtttaattcagtttaggtttgttgaattatttactggtaataatatacctaatttatatcatgttattaagaatgaaaagggcacaactattgcttctggaatgacaaatagtaatggcttaacagtaatgataagtagagatgtaggcgatactctttatgtatatttaaaaaatattataacaggtgatttgaaagaaaaagttagacacactgttatttataaaaaggagatagtaagagtaacatcatcaaaaatactattagataatattatcttagcaaaatcaacgaataaacctggtaattatagatatttaacgcataaagtaaaaaaaggagaaaacttatcttcaatttctcatcgatttaattgtaaaattagtgaaattgtacatttgaataaattaaaaaatcctgatcatatagatgtcggacaaattattaaaattccatacaaaggtggatcaagtgattctaagaaaagtcctgataacaaacaatctaagcatgaaaataataaatcatcttctactcagaaagtaaattcacatgaaaataataataaaaatacttcagataaacctcaaaaaagaatagagtcaaaagatataactgatgaatatacaaaagagtcaggaaaaccaatgaaagttgctactaatgcaacttcaccatgtatttgtaaacaatataatttggcttggggatctaaagttagttgcgaatttaggaaaagagttataaaaatagcacaaaatttgtggcctaatgattcagagaatatggcaagccaattaatggctgttatgcatttagagtctgccggaacttttagtccaaaaattggaacttttatcagcaaaaaattaacagatgatgctaaaggtggttatgttggtcttatccaattcggaaaatttgcttcaattgatttaaaagttaaaagatctgatttagcgaaaatgtcagctgtacaacaattagattatgtagaaaaatactataaattaaactctgctcatacaaagattaaaaatctaactggattatatttatgggttaattatcctaaaaatgtcaaagaaaaccgattagaagatgaagatattgtatatgcggcacccaaagacgcagaagtaacttctaaaaaatttttagaaagcccatatcaccaaaatcctagttttatgaaagagaatgaggaatataaacgggatggtaaaaaagttattagacaaggatttaaaaatggttcaactaaagtttgggaggttgaacaagaaattaaaaaacatttaaccgaaggtataaaaagtcaaaatttagagaaaaattataattgtgcatacataaatcatactgagataaaaaatactcagaaaattaatttggaaaaatttgctgaaattttgagaaagagagctaaagaaaaaagtcaacatcaatgtgcaaagtatgtaagaattgcattagaggcaggaggagccgacacttcaggacatcctgtcgcagcatcagattgggggccaactctcaaaaaaataggttataaagaaatacctgaagagtttaataaacctcaattaggtgatatttatatcatcaccaaaactgataagcatcaatatggccatattgcaggctatgatggtagccaatggatttctgattttaaacaaaaaggttatagaatttatagcgatcatgttaactacagatattttagaatgtaa

SEQ ID NO: 46856 - DNA, 1020 bp, Acinetobacter baumannii
  misc_feature (57)..(92): n is a, c, g, or t
gtggagcgaccgacgattagccctgaacatttacaggaagctgctgaaaatttatcnnnnnnnnnnnnnnnnnnnnnnnnnnnnnnnnnnnnttttggggtgtcagcattacgtcaatatgatgcacatttaggacaaggtactgaagattatttcgcagaaagctctgcattagttttacaaaccttatctcttgaatggtcagcagattcagagattttagatgcgaagcttttaccaagtgaaaaagcagaattcttaagcttgttggaacgccgtattaatgagcgtattccgacttcttatttattaaatttagcttatttctttaataagccattttatgtggatgagcgcgtacttattcctcgctcaccaattgcagagttaattgagcaacgttttgcgccctattgtttagatgaaaatggccaaatgcgtgaagcgcttaataacttaccagaaaataccaagcctaaaactccacaacgtattttagatatgtgtacaggttctggctgtattgcggtagctttagcttatgcttatccagatgcagaagtagatgcaacagacatctctaaagaagctttagaagtagcatcaattaacgttgaacatcacaataaacaataccaagttgcattatttgagtcggatttatttgaaaaaattccagctgaaaaccagtatgatttaattgtaagtaaccctccgtatgttgatgccgaagacatggctgacctgccggaagagtttttacatgaacctgaacttgcattagcagcaggtcaggatggtttagacttggttcgtaaaatgcttgctcaagcggcagattacttaacggaagatggtcttatagttattgaagtcggtaactctgaatgggctatgcgccaaaactttaatacagttgatttcaactggcttactttccaaaaaggtggttcaggtatttttgctttgactgctgaacaatgtcgtcgttatagaaaattatttgaagaacaagtttaa

SEQ ID NO: 46857 - DNA, 1092 bp, Acinetobacter baumannii
atggcagggaacagtattggacaactctttcgtgtgactacatgcggtgaatcgcatggggttggtttaatggcaattgttgatggagtgccaccaggccttgcattaaccgaagaagatttgcaaaaagatttggatcgccgtaagccgggaacctccaaatttgcgactcagcgtaaagagcctgatcaggttgaaatcatttcgggtgtgtttgagggtaaaactactggtacgccaattggtttactcattcgcaatacagaccaaaaatcgaaagattatggaaatattgcacaaacttttagaccgggtcacgcagattacacttatacgcaaaagtatggtttccgcgactatcgtggcggtggccgttcaagtgctcgtgaaactgctatgcgtgttgcagctggtgctattgcgaagaaatatctagcagaaaaatttggtgttctgatccgcggtcatgtgactcaaattggtaatgaagttgctgaaaaactagattggaatgaagttccaaataatccatttttctgtggcgatgtagatgctgttcctcgttttgaagcattggttacgtctctacgtgaacaaggtacaagttgtggtgctaaattagaaattttagccgaaaaagttcctgtaggttggggtgagcctgtctttgatcgtttagatgctgatattgcacatgcaatgatgagtattaatgcggttaaaggtgttgaaattggcgatggttttgctgtagcaggacagtttggacatgaaactcgtgatgaattgactagtcatggctttctagcgaatcatgctggtggtattttaggtggtatttcaagtggccagaccattcgtgtggtgattgcactaaaaccaacagcaagtattacaacgccaggtaaaacgattaacttaaatcgtgaagatactgatgtgttaactaaaggccgtcatgacccgtgtgtgggcgttcgagcaactccgattgcagaagcaatgttagcgatagttctaatggatcatttcttacgccaccgtgctcaaaacgcggatgttgttcctccatttgcgccaatcgaaccatag

SEQ ID NO: 46858 - DNA, 1230 bp, Acinetobacter baumannii
atgaagttgcaaggttccaatatattgggacaggaacaaatagatttattaaccacacgcggattaaatttcgtatggtttccaaagcaacttgaaacgatatatcgttttcaatatcaaaatggtgcagcctatgagtttcgctatagagcacctattattttaatattatatttatttttaagctttggtatataccaagttttaccaaccgaacaagttttatcctggttaagctattattcttgggtaggtataattgttttaatcgcctggattttatcatttattaaaaaattaaatcagtggtttgattattatgtcggaattggttcttccgctgccgttgccataacatttatcttaattaacgttttagaaaatggccaagataatgtactttttcatgctgcaatgatgtatgccattgtgattatctatggtgcggtaggcatgcgtttttatactgccattattgcaggatgggtcggcggtcttattggtattttggtaagtacctatttgaacggagacatagactggaccttcctgaaccgtacatatacgtttagtagtttcttaggcatgacccttgcctatgctacggatcgtcagcaccgtgaaaactatttacaaaactgtatgattgagctcaatcgtattgaacttatgcaacaagctcaacaactgtcactgctttctcaacaagatgctttaaccggacttgctaaccgacgttatcttgatgaaacacttgataatgaatggcgacgcgcattacgccatgagactcctcttactattatgatggttgatatcgacttctttaaaccatataacgatagcttaggccatctcaagggtgatcagtgtttaaaagatattgcgactgcaatttcctcaattgctgctcgtagtggcgatttggttgcccgttatggcggtgaagaattcttacttctgttcccaatgacaaatgcacaacaagccaaaattcaggccgaaagattaatgaatgcaattaagaaaattgctattgttcatccatgtagtagtgtttcaccatacgtaaccattagtgttggcgtggcgaccacaattccacgtttaaatgattcaatttctgcttttgttagtcgtgctgatcatgcgctctatcaggcaaaaacaaatggccgtaatcaatatcaaattgctttgaatgaagagcaaattgtagatctaacttaa

SEQ ID NO: 46859 - DNA, 414 bp, Acinetobacter baumannii; identical to SEQ ID NO: 42117

SEQ ID NO: 46860 - DNA, 228 bp, Acinetobacter baumannii
atgttgaatcaacatgagataaatttaaaacagtatcaaaataaatctttaagttatttgaatagcaccgctcactctgaaggggtcgagtttgataaattcattaaagaaattgatgaatatccaaatgctgttgttttaaagaccaagatgctaaagaaaaatatggtaatgaaaactgtcatacgactaagccaaaattctctgataaagagcagcaacgtctag

SEQ ID NO: 46861 - DNA, 180 bp, Acinetobacter baumannii
atgaacttggccttacataaaaaaccaccattgggtggttttttattaagaattgataaagatacgaattataactttattttattaattattgaaaaactaatcattattttttatctactttttcttttatggttaactcatcaaagaagaggaataagccatgttgaatcaacatga

SEQ ID NO: 46862 - DNA, 939 bp, Acinetobacter baumannii
atgcggcctttgaaacctctttcaatcatctataacgaaaaatcaggatttcatgcttcaaaacatgaagacgtctatgagcagctcatgactgtatttacagaatatggttttgaaatacaagtatttgaattaaatgaaaatacattatttgatgatttgataaataatgttattcatcgacattcacaaaatgaaaatacaggagtggttgttgcggcaggaggagatggtactttaaatgcggttgcaactaaacttaaaaatacttctattcccatgggaattctgcctttagggacttttaattatgttgctaaagttttagagattccgttagaccttttagaggcagcagaggttattgcaacaggtaaacctaggtcagtacatgtagcagttattaatgatcatatttatctaaataatgccagtttaggtttatatcctctttttatcaaaaaacgcgaactctacaataaatatttaggaagactgcctttacatgcctatacctcagctttagatgttttattgagagaaaataaatcaatgaagctttctataactgtagatggcaagaaatacccagttaaagcgccgcttattttctttggaaataaccaattgcaactatgtgatatgaagctcagaattgcagaatgtgcagctcagggaagagtcgctggagttgtaattacaaaaagtgataagctgagtttactaaatatgctttggcaatgggttcaaggtaaagttgaagacgcacaagatgtatatagtctttgtgctgatcatgtcattgttgaatgtgcaaagaaaaccaaactcacagtggccttagatggagaaatcatagagatgaaacctcctttaaatttcactgtagaaaaaaatgctttaaatattatggtgccgaatgttactacatctgtctga

SEQ ID NO: 46863 - DNA, 1056 bp, Acinetobacter baumannii
gtgatctatggctgtgctaaccaggctggtgaagacaaccgtaatgtcggccgtatgtcagcacttcttgcaggtttaccgtatcaggtaccagcaaccaccattaaccgtttgtgtggttcatcactcgatgcgattgccattgctgcccgcgccattaaagccggcgaagcgaacttggtgattgcaggtggtgtggaaagcatgagccgtgcaccctatgtgatgggtaagtctgacagtgcttttggccgtagccagaagattgaagacaccactatgggctggcgtttcatcaacccaaaacttaaagaattttatggtgtagacaccatgccccagactgccgaaaacgtcgctgaacagttcaacgtcaatcgtgcagatcaggaccagtttgccttggtgagccaacaacgcaccgcaagcgcgcaagccaaaggctttttttctaaagaaatcgtggcagttgaaatccctcagcgtaagggtgatgctgttgtgattgataccgatgaacatccacgtgcatcaaccacacttgaagctttaagcaaacttaaacctgttgtaaaagcagatggcacagtcactgcgggtaatgcttcaggtattaatgatggtgcagccgctctactgattgcttctgatgaagcagttcaggcatacaacctaaaaccacgtgccaagatcattgcttcaacggctgtaggtgtagaaccacgcattatgggttttgctccggcaccagcgattaaaaaattacttaaacaagccaacctgactttagatcagatggatgtaattgaactgaatgaagcctttgctgcacaggctttggcagtgacccgtgatttaggtttgccagacaactctgacaaggtgaatccaaacggtggtgccattgctttaggtcatccacttggtgcatcaggtgcacgcttagtgactacagccctaaaccagcttgagcagacaggtggtcgttatgctttgtgttcaatgtgtattggtgtaggccaaggcatcgctttgattattgaacgtgttatttaa

SEQ ID NO: 46864 - DNA, 1248 bp, Acinetobacter baumannii
atgaagaactttctcactaggaaaatgtacgtaactagagctttattttttgctgtaggtgttatggctttgaaggtttcccctattgttatttctactactcatgcagcgacagaacaaaaaatggataatttatcgactacactttcatcaatttttgcagataaacccataaaagcttctttatttagccctcaatttttaggacaagttcccatcacacaaattcaaaaaatcgttgatgatttaaaagtctctttaggtgctcttaaaagtattaatgtttcaaatggctctgggactattaatttcgaaaagggagaattacccgtttcaattagcttaaatgagcaaggacaaattagtactctttggtttagcgcgcctccttttaagacaataagcctagacgaaatggttaaaggtctacatgaaaatgcaatcggtaaaacatctcttttagttattgtagataacaagcctgtggttgtagaaaacgataaaacccctatggctgtcggttcgacttttaagttactggttttaaaagcttatgaagatgcgataaaaaaaggcgaattaaaaagagaaactattgtttctttaaaagaaaagaatcgctcattgccaactggagttttacaaaacttgcctgctggtacgcctgtaaatctcgaacttcttgcgcagttaatgatacaaattagcgataatacagcgaccgatagcttgatagaggtattaaagaaacctcgtatagaaacgttgtcacctagaaattctcctctgctgacgacacgagagctatttcaactgattgacccaagtaatgaaaagctcagaaataagtttaaaacaggaacaaagtcggctcgtctagaagcactcgctgaactagacaaactgccgctaccaagtgtgagtagcattggaaaattggctacttggcaagatgctgaatggtatatgtcagcccatgagatttgtcctcttcttgaaagtgttcaagatgctccggctctgaacagttctttaaatccactttttaaaaatttaaattggcaaaagatcggtttcaaaggaggttctgaatacggcgtgattaacttttccgtgattggaaaaactcaaaaaggccataaagtttgtgctgtatttaccgcaaatggaaatgagccacagcctgagtcaaaactagccatattatttacaggcatacttcaagctgttgattctatgaatcattaa

SEQ ID NO: 46865 - DNA, 225 bp, Acinetobacter baumannii; identical to SEQ ID NO: 46522

SEQ ID NO: 46866 - DNA, 936 bp, Acinetobacter baumannii
atggcagatttgacttactcaagtttaaataactggcttaaattcaagcatttggttttgttagagacgttagctcgaaccaataacatgcatttggctgccgagcagatgaatttaagtcaacctgccgtaagtaaaatgctaaaggaaatagaaggtttactgggctttcctgtttttgaacgactacctcgaaatatgccagtaacggctttaggcgaacatgtcattcgttatgcccagcgtgttttgaatgacgcaaaacattttgtcgaagacatcgagattttacggttgggtggacatgggtttttaaaagtagggggaatatttgcagcaaccgcagtagtaattccaaactcaattatcgaaattaagaaacaatggccgctactttctatcgatgttgttgaacagaccagtgaccatttaatggaaatgttgagtgaacatactttagatttagccataggacgttttaccgatgttacgcaaagccagttttttgatttccagccgttaggccctgaaccgttctgcattgttgtcaataatgcgcacccatgtgcccagaaaaagttttgtacattagaagaattattaaaatggccgtgggtactttatcctaaaggcacccccattcggaagcgcatggaaggtgcattcgcccgagctaaagtcaaaattcctttaaatacggtaaataccatgtcgatgcagacctttttacagatcttaaaaggggcacctatggtgggcatgttgccagaagcaatggtgattgatcaggtgaaagaaggacaactacagattttagaaacagacctgattttagatgcccaagattatggaattttgacacgtaaagatgaaccagtgtctgatatagccgcagcatttattaatattttacttaaaaatgcaaaacgtaagtaa

SEQ ID NO: 46867 - DNA, 744 bp, Acinetobacter baumannii; identical to SEQ ID NO: 46608

SEQ ID NO: 46868 - DNA, 945 bp, Acinetobacter baumannii
atggacgttatcattcaaaaaattcaccagctcacctcgactattcgtgcatttgaattggttgcagcaaatggtacggagctgccgagttttgaagcaggtgcacacattgatgtgcatctaaaaaacggcctcacccgtcagtattcactttcaaactgctgcagtgaaaaacatcgttatgtcattggtgttttacatgatgccaattcacgcggtggttcacgttgtatccatactgaatatcgtgaaggcgacctcttaaaaattggtgaaccgcgtaatttatttgaaattcaccctcacacaaagcaggcggttttatttgcgggtggtatcggtattacccctattttgtcgatggcatatcggcttaagtcggccaatattccttttgaattacattacttcgttcgtagtcatgaaatgattgccttctatggcaacttaaccgagcactttggtgaacaagtccattttcacattcaagatcaaccagacactgaatgtaatatggcagaggttttgggccaagcttcatctgataaacacttatatgtgtgtgggcctacagggtttatgcagtttgtcatgaacgcggccgaacaagcaggttggcatagcgaacagttacatcaagagcattttgtcgcgcaaaaagtagatacgtctgacgatgaagcttttaccatcgaagtaaaaggtacgggccgccgaattgaagtattgccagagcagactgcaacagaagcattaattgcgaatggttttgatattccagtttcatgtgaacaaggtatttgcggcacatgtattacccgcgttgtagaaggtatacctgatcatcgcgatttatttatgactgatgaggaacatgcattgaacgaccaatttacaccctgctgttctcgtgcaaaaactaaacatcttgtgattgagctttaa

SEQ ID NO: 46869 - DNA, 1110 bp, Acinetobacter baumannii
atgatcaacgatgatcaaaacaaaacgacttctcttagtttagaacaaattcgcgaagatattgatagcgtagatcaacagattcaagagttattaaatcgccgcgcaagccttgctgaagctgttgcgaaagctaaatttgcttctgaagagaatcctttgttttatcgtcctgaacgtgaagcacaagttttacgtaaagttatggagcgcaatcaagggcctttatctgacgtaacaatggcccgtttgttccgtgaaattatgtctgcttgccttgctttagaagctccgcaaagtattgcatttttaggcccagaaggtacttttactcaatctgccgtacttaaacattttggtaaagatgcggttgtccgtccgctaccaactattgatgaagtattccgtgaagtggaagcgggtagtgcgcattatggtgtagttccggttgaaaactcatctgaaggtatcgtaaaccatactttagattgttttaaaacttcgaatttaaatgtgattggtgaagttgaattgcgtattcatcatcaattccttgtttctgaaaatacacgtaaagacagtattaagcagatttatgcgcatcagcaaactttggctcaatgtcgtcagtggttagacgcacattatccgggtgttgagcgtgttgccttaaactcaaatgcagaagctgcacgccgtattcgcaatgaatggcattcagcggcgattgcgtccgatattgcagcaggtatgtataaccttgaaatcttgcatagtaatattgaagataatccagaaaataccactcgcttcttagtgattggccgtgaaaaaattccacaaagtggcaatgacaaaacttcattattaatttcagcgcatgaccgtgcaggcgctttattagaaattttagcgccgtttgcaaaacataatattagcttaacgagcattgagacccgtccagcattacctgaaaaatgggcatatgtattctttattgacttagaaggtcatatcgatcaggaaaatgtggctgcggcaatcaatgagattcgtccaatggtaaaagaacttcgtattttaggttcttatcctgctgctgttctttaa

SEQ ID NO: 46870 - DNA, 663 bp, Acinetobacter baumannii
atgagaattttgcttgcagaagatgatcgctctcaagctgaaagtattcaatcatggttagaattagacggttatcaagtagactgggtcgaacgtggtgattatgcccttacagcaattgagcagcatgattatgactgcattttgcttgataggggcttgccccaactggctggtgaaaaagttttaacaaccatccgccacaaacaaaaaaacgttcccgtgatttttattactgcacgtgacagtattcatgaccgcgtagaagggcttgatttaggtgcaaatgattatttggttaaaccatttagcctagaagaattatcggctcgcatccgcgctcaattacgtaaacaaactctgagtcagcaatcgattttaacgtggggtgatttgcaacttgatacacaagcgaaagttgtattatctgctggtaagactatcgatttaacagcaaaagaatttcaaatattacgtaaacttatggttcatcctgagcatattattacccgtgatcaattagaagaagcactttatgcatggggcgaggaaatcgagagtaacgcaatcgaagtttttatttatcagcttcgaaagaaaatcggaagcagcagtattaaaaccatacgggggctaggctaccgtatgggagacttaaaatga

SEQ ID NO: 46871 - DNA, 1269 bp, Acinetobacter baumannii
atgaatcttccaatgacaatgtcattacaaaccgtatcttttgaagagtttattaccaccattgcggctgcattaggctgcggcttattagtaggtctggagcgcgaacgaagtaagttaaaacacgaatataaaactttcgcaggttttcgttcttttgcaattagttccctacttggagcaatttgttttttatttggtcccgcaatcgggattgtaggcgctctacttataggcgcgatcagtatcgtatctcttaaaaatcagccaaatgaccccggtgtcactacagaacttgcctttattatgacttactttattggggcactttgtatctggaatatttcgttagctgcgggactcgccgtcatcatgacgattattttattagcaaaacaatcaatgcacggcattgccagtcaatggattaccgaatcggaattgcgcgacgggatttttttacttgctctacttctaattgctttacccttagttcccaataaacctttttggggacccgttctaaaccctcatgtgattttaaagttactgacgttgattttatttgtacaagccctcgcacatattgcaaagcggcttttatcctctaaaaatgccttattactttcttctttagcttcgggttttgtttcaagtaccgccaccatcgcgagtctaggcttagaagtacgctctggtcgcgcgaatgccaaaacaaatgcaggtgcagcgttaatgtcatgtgtttccacattggtacaaaccttaattattgtcatcggtataagtttggcgtggttcaaactcattatatttccaacgctcattgcattggcttttttagcggtatgggccttcattctattacgtaaggcagaacccagtacgacttcatctgaactcgataccagaatgttcagcttaaaagaagcgattattattgcagggacacttacgctcattcaggcaggggtttatggtctaagcctatatttaggtaatgcaggcttaatcgcagggacactacttgcctctttgttcgaaatacatgccgctattgcagcagtgattgtacaaggtgaaccaaataactctcagacgtcgttattaatcgcgttcatgggtggctttgctgttcatgcaattgccaagagcattaactctgccatttcgggtggactgcattatgcccttgctttcatacctgcccaaattttgcatatgacaatatttattagcttgctctggatgaacatacattggttctaa

SEQ ID NO: 46872 - DNA, 3753 bp, Acinetobacter baumannii
atgaacacaatggatacttttcatcaaatggataaatctcaccaaggctatatcaccgaattcaacgataaaagtgagtttgaacaacgcattaatacagcttggcgacgtgccgaacctgaagctgtagaagagctattacaagctgctgcggtatctgatgatttagatcataaaatttatgaccttgcatttaaccttgcccataatttacgtgaacgtaagacctcttcaggtaaagcaggtattgttcaagggttattacaagaattctctctttcttcacaagaaggcgtggctttgatgtgtcttgctgaagctttgcttcgtattccagacacagcaacacgtgatttgctcattcgcgataaaatcaatcaaggtaactggaaagaacatgttggccaaagcagcttaatgtttgtgaatgctgctgcatggggtctcatgttaactggtaagcttatggaaacaccaaagcaaaccagtctttcaagtgtacttactggccttttagcacgtagtggccgtggcattattcgtaaagcagttgacgttgcaatgcgtatgatgggtgaacagtttgtgactggtgaaaccatcgaagaagctgtcgaccacgcaaaagtacttgaggataaaggtttccgctattcttatgacatgttaggtgaagctgccttaaccgaccatgatgctgaacgttactttaatgattacacacaagccattcatgcaattggtaaagcgtctaatggtaaaggcgtatatgatggccctggtatctcaattaagctttcagctttacatccacgttaccaacgtgcgcaaattgaacgtgttcacaaagaactctacggcaaagtatttgaactcgctcgtttagctaaacagtacaatattggtttaaatatcgatgcagaagaatcagaacgtttagaaatttctcttgagttacttgagcgtctctgttttgagccagaacttgcgaactggaaaggcattggtttcgtaattcaagcttaccaaaagcgctgcttctttgtggttgattatattattgaccttgctaagcgtagccaaaagcgtctgatgatccgacttgtaaaaggcgcatattgggatagcgaaattaagaaagcacaaatcgaaggtatggatgactaccctgtcttcacgcgtaaagttcatactgatttgtcttatatcgcttgtgctaaaaaattacttgcagcaccagaatttatttatccgcaatttgcgacgcataatgctcaaactttagcaacgatctatcatttagcagatccaagcaaatattacgctggtcaatatgagttccaatgcttacatggtatgggcgagccgctttatgaacaagttgttggtccacgtgaacaaaataaattaggcgtgccatgccgtatttatgctccggttggtaaccacgaaacattgttagcttatttagtccgtcgtttacttgaaaatggcgcgaatacttcatttgttaaccgtattgccgataaaactcttaaagttgaagatcttatccagtctccaatttatgatattcgtaatgcagctaaacttgaaggttcggttggtttaaaacatccatcaattccactacctttagatatgtacggaacgcttcgtaaaaactctaaaggttatgacttagcaaatgacaccccacttgcagctttagatagcacagctcaagaattacgtaatcgtatttggcaaagccatccgttgttggctaatactgattctttagaacaaggtcattctgttgcaattacaaacccagcacaaaatgatgaaattgttggttatgtacaagaagctgatcttaagcatgtcgaaatcgctcttactgcagctgaacaaacccagtcagaatggtcaaatacacctaaggatcaacgcgctcaatacttaaaacgcgcagctgacctcatggaaagccgtattcaagagttgatggtattactttgccgtgaaagtggtaaaacttatgccaatgcgattgcagaagttcgtgaggctgtagatttcctacgttactatgcaacccaagttgaaaatcttcctgcaaatacagttattcagcctttaggtactgtactttgtattagcccatggaacttccctcttgcaattttctcaggtcaaattgctgcggcattagtcagtggtaactgtgttattgctaaaccagctgaacaaactccattgatcgcagcccaagcagttcagattttatgggaagctggtattccacatggtgctgtacagctacttcctggccgcggtgaaacagtaggtgctcagctcagccaagatagccgtatcgatggcattatgtttactggctcgactgaagttgcaaaaattttacagaagaccgttgcaaaacgtttatctgaaaatggtcaatctattccactcattgcagagactggcggtcaaaatgcaatgattgttgactcatctgctttaactgaacaagttgtattagatgttgtaagttctgcttttgatagcgcaggtcaacgctgctctgctttacgtattttatgtgtacaagaagacagtgctgcaaccgttattaaaatgcttaaaggtgcaatgcaacagttgatcgtaggtaaccctgcaattttaaaaactgacattggtcctgttattgatgacgaagcaaaacagacgattgaccagcacatccagaaaatgaaatcgaagggttatccggtacatcaattgatgtttggtgcaacaagccaaacagaattagataaaggaacttttgttgtgccaacagcaattgaacttcctaatcttgatgacttacaacgtgaagtttttggtccggttttacacatcattacctataagtatggtgaacttgagcaactcatctcaagaattaatgcgaaaggttatggtttaaccatgggtctgcatacccgtattgatgaaaccatccaaaccgtaattcaacatgctgaagtgggtaacctttatatcaaccgtaatattgttggtgctgttgttggcgtacaaccattcggtggtgaaggtttatctggtacaggccctaaagcgggtggccctctttacatgtatcgcttaatgcagcattgttctaacaaagtattagcaactccatttgcggtaaaaaatgagcaaaccgtttttgaaggctttacccgtgaggtttatcaaagcttacaaaactgggcgaaacaacatttaccacaagcaaaccgtgaaattgaaccttttggtgttggtaaattttatgagttacaaggccctactggggaaagtaaccaatatattattttgccgcgtcatcgtgttctttcaattgctgatacagaacaagatcaattgcatcagttacttgcaatctttgcagttggcagccaagctgctgtaatgccaaatagtccattattggcaaaacataaacaaacgttgccaaaagatgtacttgatgcgattactaccattaaaaacatcactacagatgattttgatgcagttttacatcatggcaaccgcgaagagatcttctcattacagcaagaaattgctagccgttctggcgcaattgttggtattactcatgttgaaccaaatgagtcgattccacttgaacgtttggtaattgaacgtgcaattagcgtaaatacagctgcggctggcggtaatgcaagcttaatgacaatgtctgaataa

SEQ ID NO: 46873 - DNA, 1008 bp, Acinetobacter baumannii
atgaaattgaaattggttttaagtactacaatcggcctgttgttcatcacaggttgtagcaagtctaaacataacgctgacgctaaaacggttttaccaaagcatgccattcaatcggctgctttgggttccatcgaacagtgtaagagctatacaggacttcctacagactggcttaaaaatacaaccgcaggcatggtattcattccagatgggcattttaattttggttctgaaaaagcttatccagatgaacttaactttggaaaaaaacagcgggaagttaaaggtttctggattgatcaaactgaagtcactgttgctcagttcgcgagttttgtgaaggcaactggttatatcaccgatgctgaaaaacaaaaacaagctgctgttttttctccagacccccatcaccctcagcaatggtggcaacttaagacaggatatacatggaaaacaccaaacggcaaaaatggtgcacttcctaaccctcatgaacctgtacgctacgtaactaaaaatgatgctgaacattatgcagtttggctaggacgtgatttacccacagaacttgaatgggaatatgccgctaaagcaaactcaccaactgatactcctttacatcaagcacctaccgatgagcaccagcatccacaagcgaattactggcaaggtgcatttccctttgaaaatctgaaccaagatcattttactggtattgcgcctgtcggatgttttaaacctaacggttttaaactattcgatatgattggaaatgtttgggaatggacatcttctccttatcaaggtgcgcacgaccagcacatgggtaattattcggctttaaggcaacaagaaatgagcagtactcaatatgtgattaaaggtggatcgtttttatgtgctgaaaattactgttcacgttatcgtaatagtagccgctatccccaagattttgatttagccgccacccatgtgggttttagaacgattttacgctctccttaa

SEQ ID NO: 46874 - DNA, 1116 bp, Acinetobacter baumannii
atgagtgcagttgaaaaattacctgaagatttttgcgcaaacccagatgttgcatggactttccctaaagttttctatacttcatctcaagtttttgagcacgagaaagaggcaatctttgctaaaagttggatttgcgttgcacatggtagtgagttggctcagccaaatgactatattacccgtaaagtaattggtgaaaatattgtcatcattcgtggtaaagatagcgttttacgagctttttataatgtatgtccgcaccgtggtcatgaacttttaagcggtagtggtaaagcaaaaaatgtaattacctgcccatatcatgcatggacatttaagttagatggaagcttggcattggcacgtaactgtgaccacgttgaatctttcgataaagaaaactcaagcatggtgcctttaaaagtcgaagaatatgcaggtttcgtatttattaatatggatgaaaatgcgacttgcgtagaagaccagctcccgggttttgctgaacgtttaaatcaagcatgtggtgtgattaaagatttaaaattggcagcacgctttgtgacagaaacaccagcaaactggaaagtgattgttgataactacatggaatgctaccactgtggacctgcacatccaggctttgctgactctgtacaagtcgataaatactggcatacaacacatcaaaactggacactgcaatatggctttgcacgttcatctgagaagtcattcaaacttgatccatcagtaacagatcctgagtttcatggtttctggacttggccttgcaccatgttcaacgtaccaccaggcagcaacttcatgacagttatttatgaattccctgttgatgcggaaacaactttgcagcattacgatatttacttcacgaacgaagaactgactcaagatcaaaaagatttgattgagtggtatcgcaatgtattccgtcctgaagatttgaacttggtagaaagcgtacaacgtggtttgaaatcacgtggttatcgtggtcaaggccgtatcatgactgacaagcaacgttctggtatcagtgagcatggtattgcttacttccaacatcttgtggcgcagtaccatcaataa

SEQ ID NO: 46875 - DNA, 195 bp, Acinetobacter baumannii; identical to SEQ ID NO: 46537

SEQ ID NO: 46876 - DNA, 528 bp, Acinetobacter baumannii
atgaatactatctcagctactcttttatatgaacacccgattgagggatgcaccaaagattcaaatggcaatttaaaacctttccctattctcgcaattgataatattccattaaatatatgggttcaccaaaatacccatattactgatctcgcagaaactttagttccagctcaaggttggttatatgattatgatagtgagttggcattaagtaatgcatggaaacttcttaaaccacaaacttatgaaaatgtatctatttcaacagtagttccaattttaatttgccctgatgatttagatctagtgtgcaatgtggttatggtggaacaagttgtttcagcagatcaagtcgtatgggctcgttttggttacgcatttaatcatattcatgatgttgtgacatccgtagtctgggaaaccccacattctgctccgcagttaagttttccattaagcgaatttgaaaaagcatataatgatttaaaagaattagacaaaaaatggactgaaaattttatctag

SEQ ID NO: 46877 - DNA, 462 bp, Acinetobacter baumannii
atgaaagagttaggtaaaaaagaatttttcttttcaatagaaaaatatgaaccgaagaatgatctctttttattagttgttaatattaatggtacttcttttagcaattatgagactcctataaatcttccaattttaattaatgacttaaacttactgctatatactaaccaacgagaaatagactatctccaagtagatactgttaacgaaaacattgagttaattaaaaagttaataaatttagagtatttagaattagagaataatatctatgattttcaaaatagtaccgtaaggaacggccatgaagtatttttcttttttaaagtaccaaatcattcattctatgaatctccttcactcataaaagctggtgaaggttatgtggaaactattcccatacaaactgttaagtttgcattaaatgagttaattaaatatcaaaattcaattttataa

SEQ ID NO: 46878 - DNA, 2859 bp, Acinetobacter baumannii
atgctagcactagagcctcaacatattcatatgaatcaacatgctgttgataaaacacatgcattaaagtgtctagtagatatattagaaaaagatgggttagttacgcctgaatatataacgggactcatcaatcgtgaacaacaaagcgcgacttatttaggccaaggcattgccattcctcacggtactcctcaatcacgtgaatatattttaaaaacagggattcgcttagcccatttccccgaaggtgtgatctgggatggagaaaataaaatttatttagctgtagtgattgcagcaaaatctgatgaacatttgcaagttttgcaaattcttactcgtgcattaatgcatgacgtcagtgaacaagtaaagaatgcttctaaacctgagcaaattatcgaattactacaagctcagccattatctttagcgcttcatgaaaatcttattcaaaccgaaatcgacgcacaagatatcgaagatttattttgggcagcttctcaaacactcaaaaaacataattttgtaaaatgtggttttctaagttcacttgatccagaacaagccattcagctgcaagatcaaatctggtctatttctagcaatcactttgttcagcaacccgctattagcattactaaaccatcacaggctttagagctaaatggtaaaaagctgaacaccctcgtttgtatagcagccaatgaccaactcgataatgaaagatttaatcgtttaattgatattttatttaaccctgagcaagttgccgagctagataaaactcaaactccaaacgaaattgcaaaaattattggagctgacgttgttcctgactggcctcaacgttcagtagtgctggcaaatgcacacggcttacatgcccgaccagctacacaccttgtcaatcttacaaaaacctttcaaggcgacatccaagttgcagtagacgatagtagctttgtttctgccaaaagtttaactcgtcttttagcattaggttgtaagcgtggccaaactctacgttttatcgctgagccagaaaccgatgccgtagaggctttagatcaagttattttggcagtgcagcaaggcttaggtgaagaagttgaagcgctacctgtaaccagtgaaactcctgaccagctccctgcccaaactgcaatatcaaatgctacgacattgggtaacaatacgggaattgcagcatcaagtggcttagcttttggacctgtccatgtgattaaaccaaaggtttatcaatatgaacgtatgggttcaggcgtaaaagtcgagaaagaaaatttagatattgccctacatgcagtaaaaaacaatattcaccaagtcatagccaaagctgatgcctctgaaattaaacaaatctttcgagctcacctagaaatgcttgatgatcctgatttaattaatggtgtatatcaaaaaatttatcaaaatttatcagcgccagctgcgtggcatgaacatattgaagctgcagctaaagcacaggaagcactaccagatcgtttactcgctgaacgcgcaacagatctacgtgacattggtgacagagttttaacccaattatgtggtgaagtggttattgaagagcctaaagagccttatattctaatcatgcatgacgtggggccaagtgatgtcgctcgtctcaacaaagaccgtgtcgcaggtattctaactgctataggcggtgcaagtgcgcatagtgcaattgtcgcacgtgctttaggcattccagctattgttggtgctggtgaacaagtcctagaaattgatccgaaaagcactttacttattaatggtgatactggaacttttgttttaaatccagatgcagcgcaaatcgaacaagccaagcaagagcgtgagcaacagcgtcaaattcgtgaagaagctgaacgccatagccacgagccagcaattaccttagatcaacaccaaatcgaaattgcagccaatttgggtaaagttcaagcgacagcacaagcagtagaatgtggtgctgaagcaattggcctacttagaaccgaacttgtttttatgtctcatagcagtgcacctaatgaggctgttcaagaggctgattaccgagttgtattagatgcacttgcaggtcgcccgcttgtagtacgtacattagatgtaggcggtgataagcctttaccttacttaccaattgctgaagaagaaaacccattcttagggttaagaggaattcgtttaactttaagacgccctgagcttttaaaacagcaattaaccgctctactaaaagcatctgataatcgtccgttacgcattatgttccctatgattggacgcgttgaagaatggcgtgcagccaaagcaattcttgacgaagtaagagcccaacatccatgtgacaatttacaagttggtattatgattgaggttccgtctgctgctttacttgcaccggttcttgcacaagaagtcgactttttcagtatcggcacaaatgacctgacccaatatactttggcgattgaccgaggccatccaatactctcagcggaagcagacggattacatccaagtattcttaatttgattgatcaaacagtaaaagctgcccacaaacatggcaaatgggtaggaatctgtggtgagcttgcagcagacccgaaagctgtccctattctcatgggattaggcgtagacgaactgagtatgtccccaaatagcattcctttagtaaaagctcaaatccgtacactaagctatagccatgctcacaagcttgcgcaacaagctttactatgcgatagcgcccctgctgtgcgccagctatctgaacaagacttataa

SEQ ID NO: 46879 - DNA, 333 bp, Acinetobacter baumannii
atgagtacattacgctctacagattgcgaagaatttattaatgacatcgatggcggtgcctttgcaaaacaacttggctatgcagttagcaaggttgcaagtgctgctgttgatacacaaaaagtcggcgagatcacaattaaattaaagttctctaaaggcgttggtcacaacaacgttactgtagagcacaaactaatttcaaatgccccactcccaaaaggtaaaagtgtcgaagaacacggtgacaaaacacctatgtatgtaaacacacgtggtgatgtatcgctttttgctaaacacactgaccagctttttgaagaaaaagcttaa

SEQ ID NO: 46880 - DNA, 756 bp, Acinetobacter baumannii
atgtttgaaaaaaagcgaatacaaaatcaagatgaatggaaacgtacccagattcgcattccacaatatcaatatgatgcaatcgttgattatgccgaaaagaataatctttctttaaatgccgctatgcttgatctaatggaaaaaggttttatttctgaaggttatatttctgacttatccaaattatcaaatcaaaggaaaatactagaattatcattacgtagatttttaccccatacaaatacacaaaatgtggcttttcatgagcaagataactatttagccgttagaggcactcatggcaatacaactgagaactgtataaatcttatagaatatataaaaatgcctgaatgtattcaggtacttctttttgctacacataataaacctacaccaggctttagtcgtgatgatggacctgaaacaaaccttccattgatgggtgcaatagttttagtggaactagaagaatttaatgcttatgtaatttttgacggtttgtttttaacagctcaaagatacccaagatatagagaagtaaaagaagtattagatgctgctgtaacttctgataaagcttattttattaatattcctgtaccatttacttcaagttggggccctgtaggtgcagttgatcaacttatacatttacctcgtgaaaaacttacttcagaatctagaaggaattactttaatttgctatgtaaccttactgaaaaacagtacgaagatttatatcgttcttga

SEQ ID NO: 46881 - DNA, 1329 bp, Acinetobacter baumannii
atgaaagggatgaagccatttaatactcggtttttaacacttcgacacgccttgtttctaggcgtgttgttggtgtcgaatacacatgccatgactttagatgaggctttgtcagctagtttaaggcatgaaagccagcttgaagtgagccgtttaagtgtgaaccagtccaccgctatgcttgaacaggccaagcaacgtgatggactcaaagttaatttagtcgggcaacttgactatgaaagaataaatacgccttcacacgtcttgtttccaaccgaaggaaaccgtaaaggccgaagtttgcaattgcaggcagattatccgatttatacctctgggcgacaccgtttagggatagatattgccgaaagtcagctttctgcccaaaaccaaggcttatcagatcaaagatcggaaacgattttaaataccgtgatggtctataccgacgtattaaaaaagaaagccattttagagcttagacaaaagactatggcaaatctgcaacggtctttgtatgaatcaaagcgccgttttgatgtaggtatgattacccgtgcagacttggctcaggtgttggcacaagttgcacaaggtcaagccgatattacacaggcacaatctaacttgaccgtaagcgaagcacagttttatcaagtgacaggtacaacacctgacaaccttgttccaatcaatcaattacctactattcccgctaacctagatgaaatattggctcaaaccaagaatcatccagcgttaatgcgggctaaatatgaaaagcaagccgccgaaaaacaatatgctttaactaaacgcgaactttggccaacggtcatgctgaccagccgtgccggaaagcaagatgaagcgagttatattggttctgaaagtaataactatatggttggggtgcagctcaatgtaccgctttatgacgatggtttaaatcgggccaatgtcaaaaaagcacaggccgatatagatttggctacgcaaaaaattcgaagtcttgagctggacttaaataagcgtacccgtaccacctatgcgcagcttcaaaccattcgacaaaataaagatgcattggcaaatgccatagaggcagcgtctattgcctttgtctatacccgtaaagagttcgatgtgggcaccaaaactacctttgatttgcttaataccgagcagaagttactcgatgcgcaaacccagaaaaccgtaaatgaccaagacgaagtggtgtttgtttatcagctactcgaccaaatggggcgtttaaacaatttggttcctatgcagaccgcacaacaggtgaataatgaataa

SEQ ID NO: 46882 - DNA, 1587 bp, Acinetobacter baumannii
atgaaatctaatcaatggttgactctcggctcgcatcttattttaaaaaaatggtgtgatgcatctgaccgtaatttccaaaaacagtttaatgctttagagaccacacaacgtcaaattttgcattcgattttacagacctctactttggccaaagataaacaggttcaaaactatgagcagtttgtaaaagcatttcctgcaactcgctatagcgcttggcgagaagacattcagcgttaccgtgaacaaaagctttcactctcgagcagtaaactggttcgtttccagccgaccagtggttcgagtgaacaaatcaagtttattccatacaccaagctgtttttagatgaacttgaccatgcgattgcaccgtggatggcaagtttataccgcaaatgcccacagttgagttcgggtacgcattattggtcggtgtcgtggttgcctgaaagtcagcgtgaagttttaaaagataaaaacttaaatgatgacagtgcgctacttggcataggtaagcgcatactatctaagtttacccaagccgttccaagtaatgttgcctttgcagccaatgcggacgatgcactgtttgccaccatttgttatttggtcgcaaaccgtaatttagccatgatttcggtatggagtcctacttttgcgctgcaattgctcgaacgtttagagttgctacaacaagacgtgatagaggtgcttaacagtggcaaatggggcaatcgtgaggcttcattaaaagaagtgaccgcaccgcatagccctgaaagtgctcaagccttaattgtaagttcaaacggcgggcagattgactttaaaaaactttggccaaagttaagtttagtgtcgagttgggatacagcaggctcaaaagcttgggcggaaaagttaaaagagaaattacccagtgttcagtttgaaggcaaaggtttatgggcgaccgaaggtgtagtgaccattccctataatgaccaatacccacttgcataccaaagtcatttctatgaatttgaatatttagagggtgagaaacaaggtcaaatcgttccttcatggcaacttaaacaaggtgacgtggtcagcccgctgattacttcgggtaatggcttactgcgttactgtctagatgactgcttaaaagtgactggctttttagaacaaatcccgtgttttgagttccaaggccgtcgttttggtgtagatctggttggtgagaaactcgcacctgaaactgctcaacaattactgtcacagttaaacgaaacggaatctaaagcgatttccttactggcgattgatacccaacaacaagttaaaccattttattgcgtgctttttgaaggcgacattcatcacagcattaacaatgaatatatcgacagtattttacgtcaaaacttccattatgaacttgcacgaaacttagggcagctcgaccagcctcaaattcgccaagccaataatggttggaatgcgtacaagaaactagtcatgtttgatggcattatcgaaggcaatatcaaacctgagccactcaaaaaagtcaccctcaatagtttggaacaactatga

SEQ ID NO: 46883 - DNA, 1164 bp, Acinetobacter baumannii
atgtcaaaattaatacagcctatcagttttaaggctttgtttatatttactcctcttctgtttgtatcaataggttgtagtgaagcgctatattcccaaacaatcccatcagtaaagtcttcttcagaaaatatcgactatccagagatcgatacagcattaggagaaaagttacaaccgaatgaagaagtaatagctcatcaaataactcaagttattgaaaagtcgattcgtgaacagtatacagcgggaaatgctttgcgtgatgcacaccctaaagcgcatggatgtgctcgtgctgaatttcatgtatttaaaaatataccagctcaacttgcaaaaggtatttttattccagataaaaactatgaagcatggattcgtttttcgaatgcttctaatgatgcttctagagcagatattgaaaaagacgcacgtggaatggcaataaaaatcttagatgtatcaggtcagaaaattttagaaaatgaaaaagaagctacaactcaagactttattatgattaatcaccccgtcttttttgtaaatgacgggcaaagatacctgtcttttatgaatgatctaaatagccataatatggtcagaaaacttcacattccatttgctttaggttttaaaggtactatgaatgctttaggtgcgcgtaattctaaaattgcaaatccactatatgcacagtattggtctatggtgccctatcaattaggattaggtgttgaccgtcaagcggttaaatactccgtaagaaattgctctacagtgtctgcaactctacctgatcaccctagccataattttttacgagctgctttaaaagatacattgcaaaagcaagacgtatgtatggaatttcttatacagccaagaacttcgactaaaatgctggttgaagatgcaatgaccgagtggaaagaaaatgaagcacctttttatcaagttgcgaccattcatattccaaagcaaagctttgatacccctgaacagaaccaattttgtgaaaatctctcttttacgccgtggcatgctttacctgagcataaaccgcttggcgcaataaatagaatgcgtaaaattatttatgaaaatataagcagagttagacacgatatcaactcagctccccgacaagaacccaaaaactaa

SEQ ID NO: 46884 - DNA, 978 bp, Acinetobacter baumannii
atgaaaaaaataggtatagttgctgttagtgcagtgacattatgttgggctatgtatgaggtatcttctgacaatacgaatacagtaccgcgtaacgaatctaaccaaaaagtagcatctaaaagcatttcatccactacaaagaatgaaaagttagcgtctcaaactctcttggctcaaactacctcccttaattcctctgccccagtctgtaaatataattttgatgcgactcaagaagattacgatctttggaacaatgaacatactgactattggccaattaaaatattcccattaataattggtcaaaaatttggttttaaagtagaacctacgccagaaagtcagtatggctacgtagattatgtagctacaagtaaagtagatagtctgaattcggttaatgaaattggtgatttaataatacctcacacaggtattattgcatttgaaatggaacttaaaattccaacatcaactcttgggagttcatcacttggaaattctacttattactcctctagcattggatttagtggggtaacaaataatggttatacaattagatccaactattggtttgatatgggggggtatgatccagattttggcgagaatcctgctagattaaactattatgtagcttatcgacttagtgataatagtgggcctaacaatccatattataaaggtcaaaacatgacaaataattcaaatgaataccaaagattagggatgtatattaatcagaatactaagcaggttggcgttattttaaatggtgttgatcaggggtatcaatctactttacctgctccactagagaatatacgtttttctgtctcaagtagtataggaatatattctaatcaattatttggacaagagttgtctaatgaactcattactgaccgtaatgcgctacagtttaactaccctcagggcacaacagacatgtgtggtaatgccatctaa

SEQ ID NO: 46885 - DNA, 1929 bp, Acinetobacter baumannii
atgggggttacggctggactaaatttagcaggttggcaattacgtcataatggtcagtggcaatggcaagatacgcctgcggaaaatcaatctaaatcagactatcaagaaacaagcacctatttacaaagagctttccctaaatatcgtggtgttttaacactcggggatagttttacaaacggcgaagtatttgactcatatggttatcgtggtatcgatttttcaagtgatgatcgaatgctaccgaatagtatgcttggttatgctccacgtatccgtggtaatgcaaaaaccaatgcaaaagttgaagtacgtcaacagggccaattgatttaccaaacaactgttgcaccaggtaacttcgaaattaatgacctttaccctaccggctttggtggtgaaattgaagtttctgttatcgaagcgaatggtgaaatacagaaattttctgtgccttatgcctccgttgtacagatgttacgtccaggcatgaaccgttactcattaactgtaggtcagttccgtgatcaagacattgatctggacccttggattattcagggcaaataccaacaaggtattaataactatttaaccggctataccggaattcaagcatctgagaattacgctgcaatattgcttggtgctgccgttgctacaccaattggagcaattgcattcgacgtgactcactctgaagctgagtttgaaaaacaggcttcacaatcaggtcaaagtttccgtttaagttatagtaagttaattacgccgaccaacacaaacttaacacttgcagcttaccgttattcaaccgaaaacttctataaattgcgcgataccctacttatacgtgacttggaagaaaaaggtgtaaacacttatgctgctggtcgtcaacgtagtgagttccagattactttaaaccaagggttacctgagggttggggtaacttctatgtggtaggttcatgggtggattattggaatcgtagcgagagtactaaacagtatcagattggttatagtaataactatcatggtttaacttatggtttatctgcaattaaccgtaaggttgagtacggctcaaatgatgcgtcgcatgatactgaatatttaatgacgctttcattcccaattaactttaagaagaattcagtcaacgtcaacgttactgcttctgaagacagccgtactgttggtgcaagtggaatggtgggtgatcgctttagttatggcgcttctgtgtcacatcaagactatgcgaacccaacatttaacgctaatggtcgttaccgtactaactatgcaactgttggcggctcttatagtattgctgactcttaccagcaagcaatggttagcttaagtggtagtgtagttgcacattcagatggtattttatttggacctgagcaaggccaaaccatggtacttgtgcatgcacctgatgctgctggagcaaaagtgaataacacggttggtctaagtgtaaataaagcgggttatgcagtagttccttatgttacgccataccgccttaatgacattactcttgacccacaagaaatgtcgagcgaagttgaacttgaagaaacaagtcaacgtattgccccatttgctggtgcaattgcgaaagtagattttgcgactaagacaggttatgcagtttacattaatagtaaaactgctgatggcaacagtttaccgtttgcagcgcaagtctttaaccagaaagatgaagctgtaggtattgttgcacaaggtagtatgatttacttacgtaccccacttgctcaagatagtctctatgtaaaatggggcgacgaaagtaatgaacgttgttcggttgagtacaacatcagtaatcagttgcgaaataaacaacaaagtatagttatgactgaggctgtctgcaaatga

SEQ ID NO: 46886 - DNA, 885 bp, Acinetobacter baumannii; identical to SEQ ID NO: 46492

SEQ ID NO: 46887 - DNA, 1335 bp, Acinetobacter baumannii
gtgcattattcattaaaaaaacgactgatttggggcacctcaattttcagtgtcatcttaggttgtattttattttttagtgcttataaggttgcacttcaagaagtcgatgaaattctagatactcaaatgaagtatttagcggaaagaacagctgagcaccctttaaaaactgtaagcagtaagtttgattttcataaaacttaccacgaagaagatctgtttatcgatatctgggcttataaggatcaggcccatttgtctcatcatttacatttgctggttccacctgttgagcaagcgggattttattctcataaaaccgctcaaggtatagtcagaacttatgttttacctttgaaggattatcagattcaggtcagtcagcaagagagggttcgtgaagctttcgcttgggagcttgcgggcagtatgtttattccgtatttaattattttaccttttgcaatatttgccttagcagccattattcgtcgtggtttaaaaccaatagatgattttaaaaatgagttaaaagaacgcgattccgaagaactcacaccaattgaagtacatgattatcctcaagagcttttacctactattgacgaaatgaaccgtctttttgagcgcatttctaaagcgcaaaatgaacagaagcaatttattgccgatgctgctcatgaattacgaacacctgtgactgcattgaacttacaaaccaagattttgctaagccagtttcctgagcatgaatcattgcaaaacttaagcaagggtttggcgcgtattcagcatttggtgactcagcttttagcattggcaaagcaagatgtaactttaagtatggtcgagcctactggttattttcaactcaatgatgtggcattaaattgtgtggagcagttggtcaacttggctatgcaaaaagaaatcgatttaggttttgttagaaatgaacccatcgaaatgcatagtattgaacctactgtacattcgattatttttaatttaattgataatgcaattaagtacaccccgcatcagggtgttattaatatttcagtttataccgatccagatcactacgcatgtattcaaattgaagatagcggtgcaggaatagaccctgaaaattacgataaagtccttaagcgtttttatcgcgtgcatcaccatcttgaggtgggaagtggtctaggtttatctattgtagatcgtgcaactcaaaggcttggtgggactttaactctcgataagagcttagagcttggcggtctttctgtattagtgaaattacctaaagttttacatttacatgaaacaagagtgtga

SEQ ID NO: 46888 - DNA, 690 bp, Acinetobacter baumannii
atgcaccttcaaaaaaacgttaagtacctgttaaaaaaatacagcactactactacaggtcttagtaaaaagtctggagtaccacaacctacactttttcgttgggagaatgggcaatataaagaaccaaagatatctaccgttgaaaaattagcctcttgggcaggctatgatgccaatacactgctcaataatgacttagaagccattgataatattaataatgatttagatgaattggtgttagataacaatgtaaatctatcaaataaaatcaaattagatggagagcaaattccagttatttcttgggttgcagcaggttcatttacagatgttcaaacagtattgaaggacactgaagtacttgaatggcttccaccaatgaagaaagctggaaaaaatggttatggacttattgtaactggtacatcaatgttacctaaatttgaaccaggtgatcgaatatatgtaaatccagactacccagtttttgatttaaaaaccaatgatttagttattgtttcttgtgctggtgatacacaagctacatttaagagattaataattgaagatggagaagaaaaatatttagagccactaaatactaaatggcctgaacaaattattaagctaacagaagaatgtaagttggttggtaaagtcgttggtatgcatagagagttttaa

SEQ ID NO: 46889 - DNA, 642 bp, Acinetobacter baumannii; identical to SEQ ID NO: 46737

SEQ ID NO: 46890 - DNA, 561 bp, Acinetobacter baumannii
atggaaaagttcgtctttaaaaaaataggtgaatataagtcagactgggctttagcttatgttgatccaaataatttatatagtgctggcggtggacgtctaacagtcgttttaagtagttttaccggttctgctttcttttctcatgttggtcaaccaacttttaaagagttcattgctcaatgccatgctccttatttacttaataaactttttcctaaagttgaaaagtgggtagatgttgaggatggtaatgaagttattgaatacatagctatcaataagctatctgaattaaaagatggtcgatcaagtggcgcaatttccaaaaaagatcttagaaatttttatgaacaccttaaagaaattgaattcgaatgtttttcaaatttctttgaccagctcacttttaaagaccgatcaatcatgtgtgaactgtttggtgaagactggctttgggaaagtgggccatcaaaattaaatcctgattacgtatacctcgaaaaaatgctggtagatgtgatttctgaatttaagaaattaattggattggatgggtga

SEQ ID NO: 46891 - DNA, 387 bp, Acinetobacter baumannii
atgaaaaataaacttatcgttgaccgcaaccaagctaaaaatatccgcgatagggaatcatgcgaaatagcggtaaatatgcgaattaaggaaggggtaaacaatcaatttcgtgcgagaaaaaaatttctcaatcaagttttttgggtagctgaacccctttgtagcattaaatgtggacctgaaaaattctacggccatttttcctgtgatccgattcctgaaggttggagccgttatacacttgatagaccaggaagtagggttaattttggtgaacatcgctttttagttgagtgcactgaagttaagacatttaaatattctgcaggtcaattattcactgttttactaacgcttaaaaaagttaatggtggtgcattatga

SEQ ID NO: 46892 - DNA, 411 bp, Acinetobacter baumannii
ttgacaaccgagctacatcgtaaaggaattttaatttgtctaggttgggttcagcccaaagaactagaatctttatataagtcttcgaaaattgcggttatgccaagtctaattgaatcattgagctcatctcatattgaagcaatgttttggggaattccacagattacctccaatcttgcatatgctaaagatttatgtaaagaggctgcttattatgtggttgatcatgagtcaccacaagcatggaaagatgcaataattaccttatacaataatccgagtttatatgagcagttgatccagcaaggatatcgagaggctaaaatgttgcctcagagttggaatgatgcagcaaatactattagcaaagaattttctaaaattatgggagaggacaagtatgtttaa

SEQ ID NO: 46893 - DNA, 516 bp, Acinetobacter baumannii
atggctttaaaagtcggaattattaaaagctcggatgtttctaagtggtgtgaatataaaggaactgatggacaggtattggcagagttcaaagtccggggtgtcgcgtataaaccctttcaggtagcaatagagcgagcaggtaaccagatctcctctaagggttatgatgtaatggtcaaagatgaaaacgctaagctctaccatgagctgttgatggatgcctgtgctgctcatttaattgaagactggaagggcgtggtatttgccgaaatcgtagccggtaaaacagtggagtccgaaaaaccttatacacctgagaatgcctcaaagcttcttaatcttggtgatattggtatttcaatctggctattcattaaagagcaggcccagaagattcaagaagaagccgacaaggacaaggctttaattctgggaaagtcattgagctctacaaataccaaaaaacgtatgcgtcgaaaacgccgcacgaaatcgagcaaatcaagttcttag

SEQ ID NO: 46894 - DNA, 918 bp, Acinetobacter baumannii; identical to SEQ ID NO: 46807

SEQ ID NO: 46895 - DNA, 258 bp, Acinetobacter baumannii; identical to SEQ ID NO: 46547

SEQ ID NO: 46896 - DNA, 1212 bp, Acinetobacter baumannii
atgtctaattctctatctaaaacgacggcatacgtccaagttattcaaaatgatcaacaagcaattaatgctgcttatcaagtggctgattttgctttagagggtcgtaatacacgtgatcaacaacgcttattaccgcatgagcaaatcgaaagctttagccaaaaaggcttaggcggaattcgtattgcaaaaaaatacggcggtgctttcgtttccaataaaacactggcacaagttttccgtattttaagtaaaggtgatgcaaatattggtcagattccacaaaatcagattagcctgttaaacctgattgaaatcatgggtacagaacaacaaaaacaatttatcttttcagaaatattagccggtaaacgtcttgccaacggtggtcccgaacgaaatacccatgactcaaaaaccttaaaaaccacgcttactattgaaaacggcaaatattttttaaacggcgaaaaattttattcgacgggaacaagttttgcgcattggcttgcaattaaagcaattcatccagaagaccatgtcgttttagtgattgttaaccgagatgctcaaggcattgaaattattaatgactggaatgggtttggtcaacgtactacagcgagcggtacagttaaattaaatcatgttgaaattaatcctgaacttatttttgatgagcgtttattaacacaagttccaacctatcgcggtgcgtattcgcagttattacaagtggcaattgatgtcggtattgcggaagctgcttttgaagatactttatcgactatacacaaagcgcgcccaattattgatgcaaatgttgaaaaagccagctttgaacattacaccctacaagaggtgggtaagttaaatattttactcgacgcagcaattttactgcttgacgaagctgctgaatatttagatgaacttgatcaacttcaaacggtgactgacgaacaagtagcaaaagcttcaattttggtcgcagaagcaaaagtctatgccaatgatgcggctctacaaatctctgaaaaactactagagctaggcggtagccgctcaagcttaagccaacataatttagatcaacattggcgaaatgcccgtgtacataccttacacgaccctgttcgctggaaattacatgccattggcaattattaccttaatggtcatttccctgcccgccatgcctggatttaa

SEQ ID NO: 46897 - DNA, 951 bp, Acinetobacter baumannii
atgaataagttagatgcacttgagttgagtaagaagcttaacaacatggttattacctcctcagagtttatcaaagcttatgacggtattacgtcttgtgcagaacagacgaaagcctatcagaaacctattggtagcttacttattgcagaaggtgggcttggcaaaacgacactttcacaagtaatcctgaaaaagaatccttgttatgaaaaacaagaaaatggctacaccaaaagagtagttcctgtgttctatatacaaatcccatcgccagcaacagttaaatctgttgctggcatgatgctaaaagccttgaatgatccagcacctctttctggaacaacagcacaaatgacagaacgtttgtgctacctattaaagctctgtgaaacggaactgatccttatggatgaattccatcatttatttgatatgcaaaaggtatcgaggaagatgaatattgatgtctgtaattggatcaaaacagtgacagactcaaccaacataagttcctgcttaattggcttgcctgaatttgtacctttattacaaatagatagccagcttgcacgacgctttccactaacattcaagttatctcgtttaaatatcggttcaactcaatcaccaggaaccctttacgggttcctatctcaagtagaacagaatattgaaaaaagactcgcactaaaatttttaccgcgattaattaatcctttattcgttctacagatttatgcttcaaccaagggatatcaccactacattatttcgctgatcagagaagcactgctattcgcccttcatgcagatagtgaagttattactcaacagcatttttctttggcgtgggataaaggcattacctcatataccaatatgaccacacagaatccctttcatatggacacttcagaactcgtacaacgaatgaaaggtgatcactga

SEQ ID NO: 46898 - DNA, 1887 bp, Acinetobacter baumannii
atgactcttcctgatttcattcctcaagtgggtctacgtttttcttttaaagatacaaattttgaagtgacctatgtacacaacaatgtagttcgtttttccgcagtggatggtggaaaaacaagcaacatcccgattaatagcttctctgaaagatataaaactggagagattcaatgtacctcttccccccataagctattactcaatggtcaattacttgataaaactagacgagctgaaaattatataaaagttattattaccacgttagatgactacttttctcataaaaaaattggagctgtaattcctgaaattgctaaaaagatagatgacccatcccctccgagcacctcaacagtaatccgttggattcgtagatatatagaaaatgactataatctgctaaatgtttataaggtaaaagtcggcaatagattcttcagattttcaccagagatggaacaaattatatccaacacaatagagcaaattattaaagataaaaacatagctctgacccataaaaatattcagatatatatctatcagaaaatgttggaacacgatattcaagaaaacccaccatcaagacgaactattcaacgtaggcttaaacaatatgatccgtataaacttattaaagcaactgaaggaacaagaatagcaaatcaaacacttaaagcagcaggacgaaagatgaaaagtccattcattttagcaattgtagaaatagatacccatattctagacattatcattattgattcaacaaccaatctcccccttgggcgtccttatctaagctgtgcgattgatgtacacacccgagctattgttggttattacatcagtatgcttcctcctagcgcaacaaccaccttagctttattaaagaatatgcttctacgaccatctcagaatttacccggtggtattccttccttaattgttccagataatggagtcgagtttaaaaattctgcactaagccatatctgtaatcatttgaaaattacaattcaaccagctcaaaacaggaatccagataataaaccacatattgagcgttttttcggtacgcttacatttggactaattcaacaattacaaggtacaacgttttctaatcccgaagctcgcggcgattatgactcaagaaaacatgcaagtgtgacattagagaatctgaaatcatatgttgaggaatggattgaagtggtatatcagggctctatccattccacgacgaataaaaaaccaatcgaattctggaatgaggcttctcagaattgtcccccattaaccatttctgctgatgaagtagatattattgcgcgtcgcccaatcagtagaaaaattcataaagggcaagtcaaatttgaatatttgacctacttttcacatgctttagcgaccctagaagcaaatggcttaactgacgttattgtgatgattgatgagctcaatttagagtacgtatacatcaaacacccatcgactaatgaagtaatacgagcagactcaacagatcctgattacaccaagaacctctctttgcaagaacattttgaaattcgtaaggaacttaaactggtatctcaattggatatgcaaagactaggaaaggatagcgtatggtacgctcaatggaagttatacgaacgcattcaaaaagatgcttgttctaaaaacaagaagttaaagcagttaaaactagagcttcctcaaacacttaagaacctcttagaccaagatatgcttacagtgtctcaaccaatagacccttcagcttcaacatttatctcctcttctgaaatggatcttctaaatcaatcaaaccttgatgatgattttggaacattggagtttgatgatgaataa

SEQ ID NO: 46899 - DNA, 468 bp, Acinetobacter baumannii; identical to SEQ ID NO: 46819

SEQ ID NO: 46900 - DNA, 279 bp, Acinetobacter baumannii
atgccattcgaaagaaagacagggtataaattgaagtttatcaatgaaaatgactttgaaattatctgcctagactgtaacgacaccaatactgtgagacaacaacttaaagatgctggatttgttacagatattaattcagtagatgaaaaggatgaataccatcttcaaaagattattggagtaacaagtagcaaggaagacttgattgcattactagataattggtttgatttgttaaacagtatggaggttacagcctacaaagattttgattaa

SEQ ID NO: 46901 - DNA, 1020 bp, Acinetobacter baumannii; identical to SEQ ID NO: 46126

SEQ ID NO: 46902 - DNA, 2538 bp, Acinetobacter baumannii
atgtcagaatggttcatatccagtatatgctttaaaaagcgcactacatattatttagtattgagtctcgcaattaatattcccttaactgtatatgcatcagacaatatgaatagggaaaatattttaaaagctgactttgatactaattttttagtgggaaatgcacagaaaattgatattggtcgatttaagtacggcaatcctattttaccgggtgaatatagtcttgacgtctatattaatgggcagtggttaggaaaacgaaagtttgtttttaaaagtactcgttcgaatgagaatgcaaagacctgttttaccccagatatgcttttagaatatggagttaaaccagaaattcttcatcatgaagtaagtagtacctttacctgtaatgacttggacaagtgggttaacgatgctttttatcaatttgatacttctcgtctgagacttgatatttcaataccacaagttgctttacaaaagaatgctcaagggtatgtcgacccacgtttatgggaccgcggtataaatgcagctttttttgcatacaatgcttctgcctatcgtattgtaaataataaccatgaaacaaatcatgcgtttatgggtacaaatgttggtctaaatctctatgattggcaattacgccatactgggcagtggaaatggcaagatcataatgaaatacaagaaaaggtttcttcctacacatcaaataatacatatgcccaaaaggcttttcccaagctcaatagtgttgttactttaggtgattattttaccaataataatttttttgatgccctaccttatcgtgggattaacatatcaagtgatgaccgcatgcttcctaacagtatgctcggatatgctccccaaattcgaggttatgccaaaaccaatgcaaaagtagaggtacgtcagcaaggaaatttaatttatcaaacgactgttacacccggaagttttgaaattaatgatctttatcccacaggcttcggtggcgaattacaagtctctatatatgaaacaaatggagaaattcaaaagttttctattccttatgcttctgtcgttgagatgctacgacctaaaatgagccgatattcttttactttgggacagtttagagatgccaatatcaatctaaaaccatggctagtgcaaggtaaatatcaaagaggtatcaataactatttaacaagctatacaggctttcaggcaactgaaaactaccagtcttttttaataggtagcgcatttgcaaccccaatcggtgcaatttcatttgatgcaactcagtcatcagctgagttcgaacaaaagcccacccttaaaggacgaagttatcgtttaagttttaaccgactatttactccaaccaacaccaatttaactttagctacgtatagatattccacagaaaattatttgaaattacgcgattcaattttaattcgagacttgcaacaacaagatattgatagcttttccgtggggaaacaaaaaagtgaatttcagatcacattaaaccaaggccttccaaatcaatggggtaatttttatttagtaggctcgtggattaattattggaaccagcctaatcgtaatcaacaattccaatttggatatagtaatcaatttaaagatctgacttacagtatttctgcaattactcatgagtttgaccaagaaaatcaaaattctggtcacgaaacgcaatatttgttgtctttatcttttccacttcaatttaaaaaaaataccgttaattttaatagttctatttcagaagatagccgaactttaggaatgagtggttatatcggaaaccgctttgattatggctcatcaatttcatatcaagatcaagggcaaacaagcctaaatattaatggcacctaccgtactaactatacaactataggcgcttcttttggtcagtccgatacataccaacaagaaatgatcaatttaaatggaagcttggtcgctcactcacaaggtattttatttggcccagaccaagtacagaccatggtattggtatatgcgcctcaagcgactggtgctcgagtcggcaatatctctggtctaagcattaataaacaaggttatgctgtcattccttatgtaaccccctatcgcttaaatgacattagccttgaccctcaagggatgccatcaactgttgaacttacggaaacaagtcatcgtattgccccatatgcaggatcgatcactaaagttaacttttcaacaaaaacgggatatgcagtttttattagcacccaaacacctaatggcggccatttgccatttgcagcacaagtttttaatcaaaacaatgaaatagtcggaatggtagcccaaggtagccggatttatttacgtactcccctaactcaagatcatctttatgtgaaatggggacaaagtaatagtgaagaatgtcaacttgattatgacattcaatcaaaaatcttacaggaaaaacaattaattattatgacagaggcagtctgcaaatga

SEQ ID NO: 46903 - DNA, 522 bp, Acinetobacter baumannii
atggcaacacttaaagagcctataaaaatctttatagttcagtctcttgcttgcttcgatacccctcagcaggttgcagatgctgtaaaacaagaatttggagtcgaaattctaaggcaacaagtagcggcatatgatccaacaaagccagcagggaaaaacttaagtaaaaaacttactactttgtttaataaaaccagagcagattttcaaaagaatgtttatgacatccctttagctaataaagcttaccgactcaaagagcttcagaagatctatgaagactggaagaacaacaggcttatgaagcaaggggttattaaacaggttcgtgaagaaatgcagggttatgacctgatgttattaaatcttgagttaaaacagcttgagattgaaaagatcagaagtggtgatggtgaaggggcagatgatccaacaccagtcaaggtaactattcaagttgtggatgcgagtaaaaaagatgccgaacatcaatccgacactgaatgtacctcaggctaa

SEQ ID NO: 46904 - DNA, 1854 bp, Acinetobacter baumannii
atgctcaaacggagcattgcttttgcattattggctgctgctgggcacgcttattctgctgatattgaagtcacaactacaattgatgaagatgtcgataatacagtatgctcattacgtgaggctgtagaactaataaataagcgtaattcaagtgattctaccgtggttgcctcagtaaaagatgggtatcatggctgtggaaataaagatagttcatcaaatattattttacagcgcgataaagaatatacgttaaatagcagaataacgattacagcaccccttacaattagtacagcaaaaaacgattctacattagttgatactgatcagcccggttctcataatgcaactatcaaaatggcaggtacagatcagctatttaaaattgatgatgagagtgttgaaaaagcatcattttcggttttgttgagtgatcttaacttacaaggggcaggtgcaaactctaaagtgttaacaggtggtttaattttaaaccatgaaaaattgactattcaaaactctcgtttaacaggtggatatgcgaatcaaggtggagtgatttacaatcaagggtttgcctcaaaaagtgatagaacctttggttttgtttatattgtaaatagccttatccagaataataaagcagcccaaggtggggtaatctatagtgagcaaccattatttctaattactcaatcggtaattcgtgataatgaagttagtaatataagtggttcactcttcttcagtcaagattcatttgatgatgaaagtactggagaatatgtagttcaacgtgctataggattaagcaatagtacggtctttcataataaaggtggttttattacgaatgttcgagatgggatgtttgttaataatattacgatgattaaaaatgacaaaggattattccttgaagctccacaaggcaatgcttcaatttcaaatagtatattagttggaaatacaattaattgtcaggcgaattcaactgataaagcaattatccaaagtaatttagtgactacagaatgtaatcgtaacgcttcagtaaaagttccaaatattctttatcctgccaatcagaaattaattgttggtagtacagatgagggagtttgtgatgtagcttcaaaggatgggttgttatgtccttttaatacgccaaaggatagtttcttgggcttttttaagccacggttacttgaaagttataatactttagctgattcacttattattaataaaggccgtttgtacagtgatggtacttctgtaggcttggcaagttgtgaaactttagatcagcgtggaaaaagacgtactggttatgatgagttatgtgatttaggcgcaattgaatatatcctaaatagtgatatctcttcagttggtcaggatattagatatgggcaggttgcaaagtttagtattttaggctcattaagtgaagcagacttggttacacctgccacgtgtaagcgtttattcggtgaacgtcctgatggtaaagaatggcaacctggctgtttgaaaataaaacaaagtactgatacacctgtttcgaaaggtaccgtaactatagatcagaatggaaatgtaatttatacaccaaatggtaattggcatggtgcagatatttttagtattcaggtagttacaagtatttcaagatttaatgaaggagtcgagttccaatacattactattcctacaagaattgtacaggaacctttgtctggaattgaagataaatctgtcagctctggtggggggggaagtataggggctggttttattttaagtttactggggttggttgcgttacgtcgctttaagtcataa

SEQ ID NO: 46905 - DNA, 201 bp, Acinetobacter baumannii; identical to SEQ ID NO: 46364

SEQ ID NO: 46906 - DNA, 1239 bp, Acinetobacter baumannii
ttgttagattcccaaattttaaattctcaagctccaaaaggtggtgccatttttctgggcgggagtggggtaaacttatcaataagccattcattactacagggtaatcaagcagttaccggtagtgttttagcgatgagttgtaaagaagaaccagcttatgctaaacgtgatatcactataacgtcttcaagtattttcaaaaatggttcgcttaactctaagagtacatttgaattttgtggtgaaccaaacgccatattgacaattaatacgattgcaaaaaatatcgctgataagataaatggtagtattctaaaatttactggagatgccgttcctggaagtacaactaatccctcaactatactgagcggaagtagtagtttaaatttacagaataatacgattgttgagaacactgcacatactaccttcttatatgatagtttgggtataaaagaattaaggtttaatttaatagggtacaatctaggtagttacgcttgtcgttatttagtggggcctgctgcggacctaaaaaattctggttttacactatcatttaatgcattaaatttaacgaataacgttgaaaaatgtgatttaccaacagaagcacttacctcatctaataagactattgatattgcgaatattccttttagctcgttattagaaccgcaaagttctgcttcgccagaaacaggctttttacctgtttattacccattgaataacacctcatctccacaaaatgatttgatagatgtagatcctgatggtaaagatacttgtataactctagaccaacgggggcttattagatctgtaactaataagttatattatcagtcaggtatcaaaaatagttgtgatattggttcgattgagctaatgaaactgactgctggagatataaaagatttaggcaatgattcttttactgatcgaatttctacatatcaaactcgatatgataatgtacaagaaaatcttaagaaccaagctttttcatatttatggccagtattaaaaataagatcggtagaatataaaaatcttcttgatcaaactaaagcaaatgcaaagtatcgtgctatttatatagatttgaaagctaaaggattgcctttacctaatgagggtgctaatcacacattaaaattctttaatacaactgattataatattaatgttgaaactattggaacaggtttaatagacgataaaatataa

SEQ ID NO: 46907 - DNA, 1251 bp, Acinetobacter baumannii
atgattactcgtgaacagtgtttgtattgggatcaggaagatgaactcaaaaaatttaaagatgaatttgcattgccagaaggcatcatttatttagatggtaactctttaggtgctagaccaaagaaatctttggctgtcgctcagcatattatttcccaagaatggggagaagatctgatcaatagctggaataaggcagactggtgggggctaccaacacggctgggtgacaaagtcgctaaactgattggtgcggaacaaggtgaagttgttatttcagattcaactacactgaacttatttaaagttttatctgcagcggtaaaaattcaggctgataaattccctgaacacaaaattattgtggcagaaaaagatgcttttccaacagatatttacattattgaaggtttcattgacttaattcaaaagggctatcaggttgaattaattgatggcctagaagacttatctcgtgctttagagaaagatgttgctgtagtggtactttcccatgtgaattaccgcactggttatttttatgatatggcatctattaatgaacaaattcattctaaagatgctttggtgatttgggatttatgtcactcagtcggtgctgttcctatgtaccttaatcaaactgatagtgattttgcgattggttgtacctataaatatttaaatggtggccctggttctcctgcattgctctgggtcaatgaaaagcaccgtgatcagttctggcagcctttatctggttggtggagtcataaaaaaccatttgatatggcacagcattatgagccagcgaatagtatccgccgatatttatgtgggactcagccggttatttctatgagtctgattgaatgcggagtggatattttcctgcatgccgatatgcaaaaaatccgtgagaaatcgttgaaattaactgatttatttattcaattggtacagcaagaatgttctgaattcggatttgagttaattacgcctttaggtcataagcatcgtggtagtcatgttagttatcgtcatgaattcggctatgaaattattcaggcgcttatcgcacgtggtgtgattggtgattatcgggaacctgcagtcttgagatttggtattacacctttgtatctgggctttgaagatatttggaatgcagtacagcacttaaaagaaaccatgctgaatagtgaatggaaaaacaaagagtatttagttcgcggtgaagtgacctga

SEQ ID NO: 46908 - DNA, 234 bp, Acinetobacter baumannii; identical to SEQ ID NO: 46756

SEQ ID NO: 46909 - DNA, 984 bp, Acinetobacter baumannii
atgcgaattttagcatggaagacagtacgtcggttcttctataacaaccttcataatcatgattacgaaacggcagtaagtagatgtattaactactttttagttttcttaattattgggaatgtagttgctgtattactagaaacagtaaatgatctgtattacagctaccgtatatggtttgactactttgaaaatgtctcaattgcaattttcagtgttgaatatctcttacggctctggagtatagtcgagcgtgatccgacacaagctgcatggaagcaacgtttagcatggatgaaaagtggtgaagcactgattgacctcatggcaattttgcctgcgtatctaaatttctttgtacgaatagatcttcgtatgttaagaattttacgattacttcgactattaaaattaactcgctatttcatctcattgcaaatattgctatgtgtgattaagcgagaaaaaggttcctttcaggcagtgatttttattttaatcattatgattattatgactgcctctggtatttatgtcgttgagaataaagcgcaaccagaagcttttagctctattcctaaagcaatgtggtgggcggttgtgactttaactacagtcggatacggcgatgtcacaccagtaactagtttaggaaagttattgggagccttaattacaattctaggggtagggattgctgctttaccggctggtattttagcttctggtttggccaatgaacttaaccagcgtaatcagcgccttgaacaagagttccgtgagttacttcaagtgcgtggtattgatatcatgcatgatgaagttgaaatagaacgtattcgacaaaaagtagggctaccaaaagaacaagcgcataatctgattattcaaattatgcgcgaaaaagtattagaagagaaagaagctgttagagagaaaaaatgttattgcccgcactgtggtgaaaagttaacagattag

SEQ ID NO: 46910 - DNA, 708 bp, Acinetobacter baumannii; identical to SEQ ID NO: 46551

SEQ ID NO: 46911 - DNA, 588 bp, Acinetobacter baumannii
atgataattgagatagaaacccatccactgcaaccgtttttgccagaaaatgcccgtttattaatgttgggaagttttccaccgccacgtaataaatggaagatggacttttactatccgaactttcaaaacgatatgtggagaatttttggtttaatcttttttcaagataaaacttattttttaagtgagaaccaaaaaagctttaacgaagaagctatccgcagctttctgattgagacaggcattgctatttttgatacggcgtatcaaattaaacgcctaaagggcaatgcttcagataagtttcttgaaattgtcactccgacagacttagcggttttattgaaacagattcctcaatgtcacactattatgactacgggcgataaagccacagataccttaatctcagttttacctgagaacacggaaaaacccttaattgggacatctacatcaacttattttgcagaccgcgatattaatttatatcgattaccgtcatcttctagagcatatccattagctcttgagaaaaaagcagaagcctatcagaaattctttaaggaaatcggtttcttgtaa

SEQ ID NO: 46912 - DNA, 1527 bp, Acinetobacter baumannii
atggccttaagcgcttggggctttactgatttgccttcttatacagataaatatgatcctaatgagaaagatatagtgataaagacaaataattggttgaatgatgaggcagcagaggaaaaaactcagcaaggtcttactgcctttgtagctcttgatgacgcattcatgagtattgcatcacggatttatttaattagaaatgccaaggaaacgattgatctacaatactacatttggaccaatgattttgtggggaaccttattttacatgagctgctcaaggcagcggatcgtggcatcaaagttcgcttattaattgatgatcaaaacggtataaagcttgatggcatattaagaagccttttacagcataccaactttgaaattagattatttaatccttataaatttcgttacttacgtatcttcgattatctcttccgatttaaaaaagtaaatcatcggatgcacaataagctcattattgcagatgcatcgattgcagtaacaggcggtagaaatattagtagtgaatattttgaagcaagtagtaagtttcaatttacagatatggatatcttattttacgggcatgcagtgcgccatgcccaagctgtatttactgatttttgggaaagtaccttaaatgtaaatgcaactgagattatcggaacttgtgctgagcatcatttaaaagctttaagagagcactatgaacaactccaccacgaagaccatagcctcactgaagataagctttacgatgcgcagagttatttaaaagagcttttagagcataaccctattcaatggtctaaggcccattttgttgctgactctccgaagaaaatactgggcactgcaactgaacatgaaatgctttatggccaagtcttgtctattatgggtaaacctaagcaacacttagaattagcttcagcttattttgtacctacccaacaaggtacttattacttaaagcaactacgagttgaaggcataaaagtccgcgctttaacaaattcttttgctgcaaacgatgttgcgatcgtacatgccttttatagccaataccgtgtagaaatgcttaaaagtggtattgaactgtatgagtttaaacctgttctagaacgacgacgtagaacatggtacgaaatcgtaacaggcagcgttataccagcaaaaggaaaaaataagtcgagcttgcatgccaagttttttgatgtagatggcaaagtctttatcggatcatttaactttgatccccgctctacctatttaaacaccgaagtaggtttggtgattgagtccagtcaattacaaactcagatttctgttatgttagatcaacatttacctcaagtagcctatcaacttaagctaaatagccaaggccaaattacttggctagattaccaagcaaacggacaagtcattgaatatgataaagagccgggaaccagccgttttcagagaacaatgattaaagctgtctcttatttgccaattgagtggatgatgtaa

SEQ ID NO: 46913 - DNA, 2115 bp, Acinetobacter baumannii; identical to SEQ ID NO: 46779

SEQ ID NO: 46914 - DNA, 207 bp, Acinetobacter baumannii
atgttggaaaatttaattttaatagtttttctcggagtaactattggttgggtagttggtttatgttatgagaaagtatttgttctaacttatgggggaatggagaaagttttttttaaaattttctccattaacattttttttaaattaatttcattgatgctctttggaataatttctatatctccttctttatgggaattgtag

SEQ ID NO: 46915 - DNA, 147 bp, Acinetobacter baumannii
atgtttaattggggaagccatataaattataattttcttaataatagtcaatatggtagttactataaaggtaatatgggatatgaccccgaattgtggacttctgggggattgtatcttgaaatatctaagcctgctcctaaataa

SEQ ID NO: 46916 - DNA, 309 bp, Acinetobacter baumannii
ttgaaaggtcgtcagcaagagttttacgctccaccgctacaactagaacacaaagaacctaaacacgttcctgtgagcaatgacgaggctcaaaagcatctcaaatcattgatggaaagattaaaaatcaatggtcgtaaacctgcaccagttcaaaaacttgaggcaaaagaaaaagagcctgagcttataaaagagttgggccctgatcctttcgataatccacacgaatacgcagagatgtgccgtcgggagggtatgccaatccctagaaatattcttcagctaattgatggggcgaatgcatga

SEQ ID NO: 46917 - DNA, 339 bp, Acinetobacter baumannii
atgaaagcatctaaattgattagagataaaggactgcaatacgcgaaggaaatcgtagattcagcaccttctaacgcaactgaatggaatgaaggtttcgagttccaatgtggtcaaagtgtagagattagcaaggctgatcgagaaaagtattttgtagacctttctgaactcaagcgtctggtggagtctttgggttatgtaagcagatggggcggcattgaaagatgcaagaagctttactttgaagctccattcaaaagagacaagcacataaaagatttaaagcgatacatccgcgattacgaatcaatatacggggatagtgaaaatgcataa

SEQ ID NO: 46918 - DNA, 852 bp, Acinetobacter baumannii
atgtctgctgatacccaacattttaccggtacagatcaatatatcgcgactgatagtcttaaacttgctgtaaaagcagctcgtgctttgcaaaagcctttattggttaaaggtgagccgggtacaggtaagactttacttgccgagcaagtggcagaaagtcttggtttaaaactcattacttggcacatcaagtcaacgactaaggcacagcaaggcttatatgaatacgatgctgtgtctcgtttgcgtgatagccaacttggtgatgatcgtgtttatgatattaagaactatattaagcccggtaaattgtgggaagctttcaccagtgaagagcgctgtgtgcttttaattgatgaaattgataaggcagacattgaatttccaaatgacctgttacatgaactagataaaatgtctttttatgtttatgaaacaggcgaaacaattacggctactcaacgtccaatcgtaattattacttcaaataatgaaaaagaattaccagatgctttcttgcgtcgctgtttcttccattacattgagttcccagatgaagcaacgatgcgcgaaattatctcggtacatttcccgaatatctctgcaactttggtaaatgaagcgcttcaagttttcttcaagctccgtgaaattcctaacttgaagaaaccaccatctacatctgaactgatcgattggttgagtctgcttatggcagatgatatgcctgaagatgtactacgtaatcgagatacatccaaagctattccacctttgtatggcgcactcattaaaaacgaacaagatgtgcaactgcttgaacgtttggctttcatgtcgcgacgttaa

SEQ ID NO: 46919 - DNA, 441 bp, Acinetobacter baumannii
atgaacgtaaaagctactcctttcaactcatttgcatttgtcagcatggctgctcttgcaatctctggtggttctttagttgcttgccaattgcaaccagctttccaagcaaaagaagccccttctctatttacgcctaagactcaaccaagcacttacggtgttttaaccgcgaaaatcacaggtaaacattctggcgttgccgtcatcaaattagatagcttccgtttaaacgttagctttgattttgaagcccatcctgacagctacggcgttccgggttctgaattcaccgctgttgatattacacaactcacagtaaatgaaatcactgatgttaatggtaagtcatataacgatttcaccgaatttgaagacatccgaaacatcaatggccttctaaaaggcttcatcgaacgtaacaagttggtggaggcttaa

SEQ ID NO: 46920 - DNA, 234 bp, Acinetobacter baumannii
atgcctgcgcataatgtagataaccgtgtgcgaccacctgatttaacattaatcattgattgcccaatcatggcacatccagccatccctcccataagacccgaggcaatattggcaataccttggcctttacattccttaaatttattactcgggctgtctgtcatttcatcaacaattgtggctgtcatcattgactcaagtaagccaactgcagctaatgccaatgaataa

SEQ ID NO: 46921 - DNA, 471 bp, Acinetobacter baumannii
atgttgccaccatatgcgaaagaagtttcatttaaatatgcaacttataatgcaagaactgaaacggttgatcacaaacgttcatttaaacatgcctggtcaaatgatcaatttggcctagttcctgttgaagctatttatgaaccgaaatatatcaatggtaaagcacattggtatggcatctttcgtcaagatggaaagccatttacgcttgcagcaatttatgaagaaaccataattgatgagcagaaagttagaacaatgtcactattaacaatcaatgcagatcgacattcttttatgaaacagtttcataaacctgacgatgaaaaacgttcaattattgtaatacctgaccatcttagaaacgattggttaaactgcaaacacactgacgctcctgactttttcttagatatgccattaaatgaatttacgtctctgcctaaagcagaaatgaacaaatcataa

SEQ ID NO: 46922 - DNA, 1188 bp, Acinetobacter baumannii; identical to SEQ ID NO: 46681

SEQ ID NO: 46923 - DNA, 384 bp, Acinetobacter baumannii
atgccaccagtaacgccaccgatgatgtcagttactacaccaagaggattgtcaccgccaataccgccagtaacaccaccgatgatgtcagttactacaccaagaggattgtcaccgccaataccgccagtaacaccaccgatgatgtcagttactaagccaagaggattgtcaccgccaataccaccagtaacgccgccgataatgtcagttactacgccaagagggttattaccgccgataccaccagtaataccaccgatgatgtcagttactacaccaagcggattgtcaccaccgataccaccagttacgctgccgatagtacctgttacgccaccaagaatatcagtaacaattccagtcgctgttgaaccattctga

SEQ ID NO: 46924 - DNA, 594 bp, Acinetobacter baumannii
atgaatctggctttattcgattttgatggcacgatcacccataatgataccttcagtttattccttaaattttctttgagtaaaaaaactcaaatattaggtggcatccgtcttgcaccttatatagcgggttataagcttgggtgggtaacggataaaacgatccgtactaagctctgccaagtgggatatatcggctatgatgcagcttctttgatatacaaaggacaagagtttgctaaaaaagtaattccttcctgtattcgtgaaaatgctttagaacgcattctctggcataaacaacagggagatcaggttgttgttgtatctgcttcattaagtgtttacttggaaagttggtgtaaatctttagatctggatgttatttgtaatcaacttgaaatagataatggtattttgacaggttgttttattgatggtgattgtggttatttagaaaaagtaaatagaataaaaaataaatatgacttaactcaatattctataatctatgcttatggtgatacacctaatgattatgcaatgttggagttagctcatagaaaatattataaatggcaagagattaattaa

SEQ ID NO: 46925 - DNA, 369 bp, Acinetobacter baumannii; identical to SEQ ID NO: 46623

SEQ ID NO: 46926 - DNA, 1245 bp, Acinetobacter baumannii; identical to SEQ ID NO: 46662

SEQ ID NO: 46927 - DNA, 189 bp, Acinetobacter baumannii
atgaaggaagttcttgcagacgaatgtgatttctatcaatgttatgtaagaaatcaagaagcagatatttatgccatgtatattaaaagaaaaaataatttattagatgaagatgactttataaaaaatgatcttgtaatagatgactttttattgttagagatactgataaaccatatatctacgtag

SEQ ID NO: 46928 - DNA, 765 bp, Acinetobacter baumannii; identical to SEQ ID NO: 46359

SEQ ID NO: 46929 - DNA, 276 bp, Acinetobacter baumannii; identical to SEQ ID NO: 46361

SEQ ID NO: 46930 - DNA, 750 bp, Acinetobacter baumannii; identical to SEQ ID NO: 46785

SEQ ID NO: 46931 - DNA, 345 bp, Acinetobacter baumannii; identical to SEQ ID NO: 46787

SEQ ID NO: 46932 - DNA, 369 bp, Acinetobacter baumannii; identical to SEQ ID NO: 46793

SEQ ID NO: 46933 - DNA, 369 bp, Acinetobacter baumannii
atgggcttacgtgatgaaattcaggcagatattgatgaagcatttaatgaagatttagcggacgccgttcattcatttacttgtgagcggatctcaagaaaagattgggatcctaaaactgaaacgtatgtcgaagttaaagaaaactattctggtcgtggcgttctgtttggctcatacagtcaatatgagattcagacgcttggagtactggccacagataagaaggctaccgtgcttcaaaatgaagtgtccatgacacctaaaattgaagatgaatggctaacagccttaggctcatttcgagttattcatatacagcaagaccctgcctcaactatttggaaatgccagttgagaaaagtttga

SEQ ID NO: 46934 - DNA, 1011 bp, Acinetobacter baumannii
atgaaaagaggttattttaataataagattaaggacagcattttttttaaagagaattcaaagaagtgggttttatcaatagagtattcgacacctatttggtatgacttgataatggatgagtgtgaagagtataaagagttttataagaaaatattaaatgaccaagttgaagcctcaaaagattgtaatgaaaaagagtttatttactttttcacatctagacctaaagttaggtttgatctctcacggaaaattaaaattggaaagaatgttggtgaaatatttttaaatttaattatcaattgttcagaaaaaagaaaagttaaggttaatattgatcctgattattggcgagctttcaagaaaataattattaatgaaaaatttataacttttaagttcgatgaagatgttaaaataacatggccaattcatatttttttatatgaatataatgttgaattaggtcttgaaagtgaagttcattatataggaaaaacaaaagaccccgtaagtcgtacaatggatagagagcatcgtggctattccgatatgctttattacttgctgcatttaaaagaaaagagagatatttttctgaatattttaatttttaaagtatcagttatttctcctccacgtaatagtattggaatagtttcaacaaactccgtacttgatcatattccaaaggaattggaaatatttgttattgaatattgtctaatatattattttaggccatcaattcaaaaaggtgatatggatacttcttggagtaagtttgttaattattttaggagtttacagaaggaaggaataaacgctttgtattttaagttggaaatgaaagaaagtacagaatataatagttggggtacacctaatttagctgccaagaaaagccattacttttcttggcaattaaataaaagtggacttcaaatggaaagattttatgaaagtaaagatttagatgaagaggtttttaaggatttctttatttaa

SEQ ID NO: 46935 - DNA, 534 bp, Acinetobacter baumannii
atgaaaaaacttgctttgatcgctgctctttcggttgtagggattgcgaatgctcaagctgctgatggtacaattacaattaatggtttagttacagacaaaacttgtgacatcgttactcctgctggtaaagatttcacagtgactcttcctactgtttctaaacaaactttagctgttgctggggatgttgctggccgtactcctttccaaatcaacttagctaactgttcacaaggtaaagtagctacttactttgaaccaggtgcaactgttgacttcaatactggtcgtttacttaaccaagacgctactggtgctaaaaacgttaacgttcaacttttaggtagcaacaataacttcatcccagtacttgctgctggtgcaaacggtgctcaagctaactctcaatgggttgacgtagctgaaggtgcaagtgctgaccttaactactatgctgaatactatgcaactggtgtttctactgctggtaaagtaactacttctgttcaatacacaattatctatcaataa

SEQ ID NO: 46936 - DNA, 735 bp, Acinetobacter baumannii
atgaaattgaacagttataattttttgttaggtttggcgtttgcttcatctgttgctgctcctgccgctcaagcagaaattgtaattcatggcacccgtgtaatttatccgtcggatgctagagaagttacgctacaagttagcaataacggttcaaagccagcacttgtccaagcttggattgatgaaggtgatccaaaaagtactccggatcaatcaaaagttccttttatgattgctcctccaatttctcgtgttgaagcgacaaaaagtcagacgcttcgtattactgcccttccaaatgcttctcaatttaaccagaagcaagaaactgttttgtggttaaacgttttggatattccaccaagacctacctcaaaaaatgcagatacgacacctgataacttcttacaacttgcaattcgttcccggattaaattcttctatcgtccggcttcaattaaagaagatgcgaatttagcagcagataagcttcaatgggttaaatctggtcagaatttaacggtaaaaaatccaactcctttccacattacgatgacttctgtttatcaaaaggttggagataaaaaagttgatttattgcctcaagggctaatggttaagcctttttctgaagcttctattcagcttaagaatagcaaccttcaggatatgagttttattaatgtcaacgactatggtggtcgagttgaacaccaaataaaacttcaataa

SEQ ID NO: 46937 - DNA, 489 bp, Acinetobacter baumannii
  misc_feature (421)..(430): n is a, c, g, or t
atgaaaaagtttttaggcaattctatcttcaaagcagttggttggacctatgatgcagatcctaccattcttgagaaaaaacaagttattatcggttttgaacatacttctaaccttgatgcgatcttatcaatcgctttgtttcaaatattagatttaaaaattcatacactaataaaaaaagaacttttcaaaggtccaatgaagcctatccttgaaaagctaggtggcattcccgttgaccgaaaagcaagcaaagatatcgtctctcaaatggtcgaaaaattccaaagtagcgatacatttaacctagtgattgcacctgaagcaacgcgtgccaaagatgggtcggaacgcaaacctattcgtactggtttttggcatattgctaaggcagcaaatgttccaattgtactgatgnnnnnnnnnngttccaattgtactgatgtatgcaaatgcacgaaccaaaaaaggcggtattttaggtaa

SEQ ID NO: 46938 - DNA, 351 bp, Acinetobacter baumannii
atgagcaattttgtttttaagcgtggtgacacattcaacttaaatttgcagctcgttgatatggatgacgcgctgcaatatccagccaatgatgtgcgtcgagcgattgatttaacgggatatacctttacttctcaagttaaaactttggatggaaccgccgtagcaaccttgacttgtgcagtattaaatcagagtactcaaaaggggtggctgaatgtgaaatcaggtgcaagtactgcagcgtggcctttgggtctgtgtcagatggatatcaaagctgtggtgagcggtactactcagcatacagaaactttgacttttcaggtaattgacggggtgactgcataa

SEQ ID NO: 46939 - DNA, 804 bp, Acinetobacter baumannii
atggtagtaccacttgtattgagtggatgcataaaaaaagcagaggaaaaaccaacagaaaaaacggaaaaaacctctactataaaagcaactgaacagcccccaaaagaagaaaatataattcctgctatgctagtacgtaattttcttgtgaagtttcaacaacccaaaatttgtgctccaaatccagatgttgatggaattgtatgtacctctaaagaagcgattacacttaaaagtaatattgaatggattgatcaagtaatcgataaggaaatccgtaaagattatgcagatgctcttacacctccttcagaaaagcaaaagcaactaaatcaaacccaagctgaagggtttaataactggtcacagagtgtggtttatcgctttaatggacagtttggccaatatgtgcaaatttcgaaagtaagttcagaatattctggcggggctcatggtatagcaacttttgaagattatatttttgacttaaaaagtaaaaaacgcattgaattaaaagatattgttatcaatggaaagatgaatgcgcttaaagaagaattgtggaaacaatacggatattggtgtcaagaaaaagatatgcagccttatattagtaaagaagactttaaagtaagtgaaaatttctatattaatcaatcaggcgggattacatttgattttcagctttacgaattggctccatatgccgcaggtcctgtgagtttagaactctatgatacagatcaactgataaaatcagattttttaccgccaatgcctactttaaaaactgaagtgtag

SEQ ID NO: 46940 - DNA, 1179 bp, Acinetobacter baumannii
atgaatattcgccaagtgtctgctatttgtctttcaatagcagctactcattttgtgtatgccgcttcaaatgttacaaatcctgtaaatgattcttcccaagcaaaaggaattattaaaaatcaatatattgttatattaaataaggatgcaggtccttctaaagatttcgcacaaaatattgctaaacaacatgctggtaaagttttacaaagctacgatactgttcttaaaggttttgcaatttatttacctgatacagcaggggcagcttttattgaagcgatgaaaaagaaccctcatgttctttcagtagaaagcgatacaatagtaaatattgatgcaactactcaaagtaatccagattggggactagatcgtatagaccagaaagctttaccattaaattcggcttattcttatttacagaccggttcaggtactacggcttatatcgtggatactggtatattgtctagtcaccaagagttttcaggacgtgtattaagtggttataccgcaatatctgatggcaatggtacaaccgactgtaatggacatgggacccatgttgctggaacagtaggtggtacgacctatggtgttgccaaaaatgtcaatttagttcctatccggattttggggtgtgatgggtcaggggcctcaagtaatgttattgctggtttagactggatattaaaaaatggtaaaaaacctgcagttgtaaatatgtctttaggtggggcaacaagttcttctttagatagtgcagtggaaaatttatataataatggttatgtcatggtcgtagccgctggcaattcaaatacagatgcatgtacatcttctccagcaagagtaagtaaggccattacagtggctgcgacagataataccgatactcgggcaagctattctaattatggaagctgtgttgatatttttgcaccgggtagccaaattaattcttcttggattggaaataatacagctaccaagattttaaatggtacttcaatggcaaccccacatgttgctggtgtagttgctgaaatgcttcaaagtacacctacggcttcacctcaaacgatctctaccaatcttttaaatcaagcgagcagtaacgtagtaaaaaacccttcaggtagcccaaaccgcttgttatataaatctccttaa

SEQ ID NO: 46941 - DNA, 654 bp, Acinetobacter baumannii
atgagctatcagaaactcagccgtgaccagattgcaaaacgtgtggcacaagatattcccgatggtacctatgtgaacttgggtattggtttaccgaccaagattgcgagctacttgcctaacgataaagatatttttcttcattctgaaaatggcctgttggcatttggcccgccaccggcagcaggtgaagaagaccctgaactgattaatgcgggtaaagagtttgtgaccatgcttgaaggcggcagctttttccaccatggcgactcatttgccatgatgcgtggtggtcaccttgatattgctgtgcttggcgcatttcaggttgctgcgaatggtgacttggccaattggcacactggtgctcccgatgcgattcctgccgtaggtggcgcgatggatttagcggttggtgccaagaaagtatttatcaccacagaccatgtgaccaagcaaggtgaaccgaagattgtggctgagctgagctatccggtaacgggtaaaaaatgcgtggatcgtatttacaccgacctttgtgtgattgatgtgactaaagatggtttaaaggtgattgagaaagttgaaggtcttagctttgatgagttacaggctttaacgggtgcaactttaattgatgcgactcaagggtaa

SEQ ID NO: 46942 - DNA, 132 bp, Acinetobacter baumannii
atggccatggctgctgatgtcaccattgctcaggtttctgaagtggttgaactcggtggattagatccagagcacattattaccccaggtatctttgtacagcatgttgtacaagtagcgccagcacagtaa

SEQ ID NO: 46943 - DNA, 354 bp, Acinetobacter baumannii
atgaataagaatgtagagctaataaattacattgatgtagctgagacagtttacgaacgggtatatgaaaataataaaatttcaaataatttgattgttaatctaaatcgcattatggctgagataaagaatcaagctgcagaaaaaaaactcaaattgaagtacagctcaatagactttgaatattgtttaagtttgcctttagctgatcgcaaaataaaagtagatttaagccttatacctcattttgaagatcgtgaagaaagtattttgtggttaactaactttattggaaaaatttgtgagcccagaaagatgcaaagacagaaaaaaaacttcattaagtacctgtga

SEQ ID NO: 46944 - DNA, 237 bp, Acinetobacter baumannii; identical to SEQ ID NO: 46831

SEQ ID NO: 46945 - DNA, 768 bp, Acinetobacter baumannii
atgattggtgctgaagtcattattaggaacaacaaaaacaacatcgaatttacagacattggtcgaattttattagtgatgtctaaaaatattgaaaaacaggtagaggagaccgcaaaactcattaaaaatattaaaaatgaaactgaatcgaccattcgtttctgcgttgttcattctttagcctctggatttttaactacttttttaaagaaatttcctacacttattcgtgatttaaaaattgaaattgtcgcaacgaatagtggagaaggcctatctttgttaaaagaaggtgcttgtgactttatgatttgctatgcagataaaagcaatattagaaaagttggggatgatattttaagtggtatcaaaattgctgaaacggttattgtaccggtttctgcaactgaacccgaccatagcccgaaacatacaatacaaagtaactttgctctgctagcgtatagtaaacacgcgtacttaagaaaattggtagatcaactgattgaaggtaagcttgtatataaaacgttatatgaaacagataatgccaccaatttaaaagagctggttttacaaggtctaggggttgcttggattccaaaaattaatgttgaagaagatcttgcagccggaaaattagtcattttagaccaacaagaatattgccttgctcaagatatttatatcttcaaaaataatttgagtgataataagtcggtacagaaaatatggaatggttttaaaggccagcaagacctataa

SEQ ID NO: 46946 - DNA, 456 bp, Acinetobacter baumannii
atgccacagtatctcatgtttgcggaaaatatttataacaaaattaaagatgaggaattgttttcacatgactgtattgaaaatatgaacttacttatgacatgtatacgcagagaaattgagggaacagaatttaaattaaaatttaattttattgattttgttgaattgtttagtagaccattagatgaatgtaaagtaaaaatagatgttagtttgattcctcctcataattcagaaggtgagtatattttatggttagctggattaatcgaaaaaattacagaaggtggacctaaaccacctccgcctataaagaagtttattccagagtatatgagcttgaaatttgaattagattttttacccttaaatgaggaaaaaattcaaaacgaaggtaaagaaattacggattactttaattcaaagctttataaggcaacttttaagaagtaa

SEQ ID NO: 46947 - DNA, 426 bp, Acinetobacter baumannii; identical to SEQ ID NO: 46827

SEQ ID NO: 46948 - DNA, 642 bp, Acinetobacter baumannii
atgaccatgattgatacactttatgatggtcactacaagagccgtgaaaagcttgcttgggaatttgccaaaatcttgaaccaagaagcgaaagagttagaagctgctggtgtagatattattcagtttgacgaacctgcatttaacgtcttctttgacgaagtaaatgactgggggattgcaactttagagcgtgcaattgaaggtctaaaatgtgaaactgcggtgcacatttgctatggttacggtattaaagccaatactgactggaaaaagacactcggttcagaatggcgccagtacgaagaagctttcccgaaacttcaaacttctaacattgatatcatctcgttagaatgtcacaactcgcgtgtgccaatcgacttactcgaacttattcgtggtaaaaaagtgatggtgggtgcgattgatgttgcaacgaaccagattgaaacaccggaagaagttgccaatacactgcgtaaagcgcttcagtttgtagactcagacaagctttacccgtgcacaaactgcggtatggcgcctctttctcgtgaagtggcacgcggcaagctaaatgccttaagtgcaggtgcagaaatcgttcgccgagaacttacgggttatgatctcactgcttaa

SEQ ID NO: 46949 - DNA, 570 bp, Acinetobacter baumannii; identical to SEQ ID NO: 13730

SEQ ID NO: 46950 - DNA, 900 bp, Acinetobacter baumannii
atgaattttaatagtgaaaatatcgaacttttcttaactgtattagatactggatctttctcggccgcggcacgaaagttaaatcgagtgccatcagcagtgagtatggcaattgccaatattgaagcagaacttggttaccacttatttgaacgtacacaccgcaaagttattcctaccgcggcggctttagcattggaacctcaagcccgtattattgctgaacagcttaggctattagctacgcatgcttatgaactttcacttggtcttgaaagtaaattaaaaataggtgtggtttcagatgcgaatactgaattactttttaaagccataaagcaactagcagagaagtttcctcttcttaacctagaaattattacagctcctcaagatgatattctaaatttactttatacagaaaatattagcctttgccttgcaggttcaaacctcaatataaaaatgcgtgaaagcttacaattagtaatgacagaaacagttattgctacgatctctgctcatcatccgtttttaaaagaacagaataagttaaacacgattgaagagttaattaatattcggcaaattgtggtcgcaagtagtgagctggatatggaagactcacgttcaatcattggagcaatgtactggaaaacgaatagcttacaaacagcaattaatatggtcgaagctggcttaggatggggaaattttcccttatctttggtaaaagaaaaaattgaacaaggccacttagttcaattagattttaaaaatacgaaaaatcatttgcctttatctatttatctcatttggcttcaagataaaccgttatcgaaagcagccagagagcttgtccagattgttcaagcaaacttatctcaaaattgtcattaa

SEQ ID NO: 46951 - DNA, 1011 bp, Acinetobacter baumannii; identical to SEQ ID NO: 46805

SEQ ID NO: 46952 - DNA, 780 bp, Acinetobacter baumannii; identical to SEQ ID NO: 46798

SEQ ID NO: 46953 - DNA, 888 bp, Acinetobacter baumannii
ttgccaaaacccgatacagacttaggtgagttgagtaaatcaattattgccaaatatccagcgattcaggcaagttggcgtaaaagtgtagcgctaaccctcaatgcgattaattttggtttacgtaacccacttgcactaaaaccagtaaatgtactcggcaagcaattacttaaacttcaaattgcagaccctgagttacgtaaaaacgtaacgcctaattttgatattggctgtaaacgtattttgtttgctaacaattactaccctgcactacaagcaccaaataccacgcttattccacatggcctggttaaagtcgaaggcaatacggtgattgcagctaatggcgaacgccatgaagttgatgtgattatttggggtacaggttttgaagtgtctcacccaccaatcggcaaacgtgtgtttaatgaaaaaggccaacgtttaaatgatttgtggaaaaatagttcaccggaagcttacttaggaaccaatattgaaaatgtaccgaacgcatttcttatgctagggccaaatgtcttggtttatgactcattcattggtcttgctgaagcccaactgcaatatattgtagatggtttattgcaaatgaaagcgaaaggtattgctaaactttgtgtaaaatcagaaataattaaaaagcataatgagcttgtacaaaagcatttacaaaccacagtattcaatagtggtggttgtaagagttattaccttgatgcaaatggtcgcaactttgcagcatggccatggtcattgaaaaagcttaaacagcgtttacatcatttaaatttagaagaatatgaggtcatctatgaagctgatcttgtaaaagtaaaacctaaagttgaagaagtcgcaggttaa

SEQ ID NO: 46954 - DNA, 888 bp, Acinetobacter baumannii
ttgccaaaacccgatacagacttaggtgagtttagtaaatcaattattgccaaatatccagcgattcaggcaagttggcgtaaaagtgtagcgctaaccctcaatgcgattaattttggtttacgtaacccacttgcactaaaaccagtaaatgtactcggcaagcaattacttaaacttcaaattgcagaccctgagttacgtaaaaacgtaacgcctaattttgatattggctgtaaacgtattttgtttgctaacaattactaccctgcactacaagcaccaaataccacgcttattccacatggcctggttaaagtcgaaggcaatacggtgattgcagctaatggcgaacgccatgaagttgatgtgattatttggggtacaggttttgaagtatctcacccaccaatcggcaaacgtgtgtttaatgaaaaaggccaacgtttaaatgatttgtggaaaaatagttcaccggaagcttacttaggaaccaacattgaaaatgtaccaaatgcatttcttatgctagggccaaatgtcttggtttatgactcattcattggtcttgctgaagcccaactgcaatatattgtagatggtttattgcaaatgaaagcgaaaggtattgctaaactttctgtaaaatcagaaataattaaaaagcataatcagcttgtacaaaagcatttacaaaccacagtattcaatagtggtggttgtaagagttattaccttgatgcaaatggtcgcaactttgcagcatggccgtggtcattgaaaaagcttaaacagcgtttacatcatttaaatttagaagaatatgaggtcatctatgaagctgatcttgtaaaagtaaaacctaaagttgaagaagtcgcaggttaa

SEQ ID NO: 46955 - DNA, 654 bp, Acinetobacter baumannii
ttgggacaaaaagcattttctgtacagtgcgatgttgggcaagcagaacaagtacaggctttggctgatcgggcagaacagttattaggacatccggtaaccctcatcattaataatgctggcgtaggtctaggtggcaaatttgatgaaatgagtttggaagactggaaatggtgtatgcatgtaaatctgtggggtgttattcatggttgtcatgcatttgtaccaaagttcaaaaaactaggttacggcgcaattattaatgtagcttctgcggcgtcttataccgcagcaccagaaatgaccgcttataacgtgactaaagctggtgttcgtgcgttgtctgaaacactttcggctgagcttcgtaaattcaacattaaagtgaatgtgctctgcccgaccttggtgccaaccaatatcattaaaaatggtcgtattccgggccattattcaaaacttgcagaccatgcactcatgaactatgccatgacaaccagtgatgcagttgcggctttaacattgaatcgattagatcgtgggcagctctacactacgccacagatcgacgccaaattattctggcttatgaaaaggacatctccaacgctatatgcaaagttccttgggctttcgtatcagttatttaaataa

SEQ ID NO: 46956 - DNA, 654 bp, Acinetobacter baumannii
atgagctaccagaaactcagccgtgaccggattgcacaacgtgtggcacaagatattcccgatggtgcctatgtgaacttgggtattggtttaccgaccaagattgccagctacctacctgctgacaaagatgtcttcctacattctgaaaatggcctgttggcttttggcccaccaccagctgcaggtgaagaagaccctgaactgattaatgcgggtaaagagtttgtgaccatgcttgaaggcggcagctttttccaccatggagactcctttgccatgatgcgtggtggtcatcttgatattgcggtgcttggggcatttcaggtggcagccaatggtgacttggcgaactggcacacgggtgcaccggatgcgattcctgccgtaggtggtgcgatggatttggcggttggtgccaagaaagtatttatcactacagaccacgtcaccaagcaaggtgaaccgaagattgtggctgagctgacttatccagttactggtaaacattgtgttgaccgtatttacactgacctgtgtgtaattgatgtgaccaaagatggtttaaaggtgattgagaaagttgaaggtcttagctttgatgagttacaggctttaaccggtgcaactttgattgatgcgactcaagggtaa

SEQ ID NO: 46957 - DNA, 336 bp, Acinetobacter baumannii
atgggactttcatcatttaaccgtgcacgggaaagacaacaaatgacagaaacaaaaattgctgaactcgaagaacaactggcaacagtaaagggcgaatttattgcctttcaaaatgataccgaagcaatgaaagcacgtattgctgaacttgaatcaggtgaaggtggtcaaacacctgaaaatgaccaaaaaccaagtgatactcaaccacaaccaattaactatgctggtctaaaagtagatgagcttcgagctgtactaactgaaaaaggcattgcatttgaagcaggtgctaaaaaagatgaacttttagcattaattccaaaggaataa

SEQ ID NO: 46958 - DNA, 369 bp, Acinetobacter baumannii
ttgaaaaatgcgggcgatgttgctggtcgtacaccttttcaaatcaatttaacgaattgtgcttcagttggtaaagtcgcgacttattttgaaccaggcgcaacagttgattttaatactggtcgactattgaaccaagctacctctggtgcagctgccaatgtcaacatccaattattgggtagcaacaatgcagtaattcctgtaattgcgaaaggtgcttctggtgcacaagataactcacaatgggtaaatgtttctgctggagggaatgccgatcttaattattatgctgaatattatgcaactggagcatctacagcaggtactgtaacgtcacaagtgaaatacacgattatttatcaataa

SEQ ID NO: 46959 - DNA, 543 bp, Acinetobacter baumannii
atgctcgatacagtgtcaaaagctgccaatactcgaaaaataaaaaatatttttgtacaacaaggcattgctgaagatatgccttttactgatgaacaatttgatgtaatcattagtcgatattctgcccatcattggcagcatgtcccaacagcaatgaaagaaataaatcgtgtattaaagccaaatggcactgttatttttgttgatattattagctcaagtttccctattttagatacatttttacagactatagaagtgattcgagaccctagtcatgtaagaaattacagtattaaagactgggttcactttattgaagatgctggttttgaattaacaattttagaaaaacaaaccctcaaactagattttgatagttgggtacagcgcatgaagacacctgaagatcaaataaaaacgcttaggtatctccaagaaaatgcagcagatgttgttaaaaagtattttaatattcaaaaagatggaagttttgaaagtaaggtcgggtactttgtatttaaaaaactatccttctag

SEQ ID NO: 46960 - DNA, 162 bp, Acinetobacter baumannii
atgtctgctgaaactgtgcctgtacctggcaatgatgtattgcctgcagggtcagttgctgttgcagttactgtatcaccatctaccaggttacctgggtttggtactgaccagctaccatctgtgcctgctaccacggttgcagtggtgccatcaggataa

SEQ ID NO: 46961 - DNA, 336 bp, Acinetobacter baumannii
gtgtttaaaacacttctggttaccgatgagaaaaattattttgttgcggttataccagttaaccatcaactcaatttaaaaaaagtagctacggcagtggggtgtaaaaaattacagatggcaaatcctaaagatgccgaacggttaacagggtacttagtgggcggaattagtcctttaggccaaaagaaacgtttgaagacagtaattgatgcctctgcgcaagagctcagcaaaatttatgtaagtggtggtaagagagggttagatattggtgtaaatcctaaagatttagcacaaatattaacggcgcaatttgtagacgtacttgattaa

SEQ ID NO: 46962 - DNA, 528 bp, Acinetobacter baumannii
atgcctgtgttcgtgcatgctgaagaagcagctgcgagtgcgcctgtagaagctgaatttgattctgcttttttaattggtgacgctcagaaagtcgatatttctcgatttaagtacggcaaccctgttttaccaggtgaatataacgttgacgtttatgtaaatggtcaatggtttggtaaacgccgcatgattttcaaggcattagatccaaatcaaaatgccgtaacttgttttactggaatgaaccttcttgaatacggcgtaaaacaagaaattttaaccaagcatgctccccttcaaaaagaaaataatagttgttataaaattgaagaatgggtagaaaacgcattttatgaattcgatacgtctcgtttacgtgtagatatttcaattcctcaagtggcattacaaaaaaatgctcaaggctatgtcgacccaagcgtatgggatcgtgggattaatgccggctttttgtcttatagtggtagtgcgtataaaacttttctctgtacacgacaaaaatag

SEQ ID NO: 46963 - DNA, 219 bp, Acinetobacter baumannii; identical to SEQ ID NO: 46621

SEQ ID NO: 46964 - DNA, 273 bp, Acinetobacter baumannii
atgaagcctatccttctcgccactcacaaacgtcttgaagagctagaaaaagaaaaggcatctgcgaatgagccaccctctttaatggttcaaatccaaactgcaccagaccttacaacgctagatgctttggaaatagacgtggctgcacgagatccgcagattcaaccgaagctaatggggtatgtgagaaaacgccgctatgaattagagaatcctacacctactcaacaagaatctacccctgattatctattagtggatggcttctaa

SEQ ID NO: 46965 - DNA, 225 bp, Acinetobacter baumannii
atgttattcaaaaaattcgctgttgctgctgctgttgctgctactttagctttcgttggttgttctaagaaagaagaagctccagctgctggtgctgcatctgaagctgtagctgctgcttctgaagctgctgtagctgttgacgctgctgcttctgaaactgctgctgctgcttctgacgttgctgctgctgcttctgacgttgctgcttctgctgcacactaa

SEQ ID NO: 46966 - DNA, 684 bp, Acinetobacter baumannii
atgagtaaatttgaaaaatttgttgtaaagagtggaaataaccagtttggcgataataatattcaaaataacataactaacaatacaataaataataaagtaagagagagtactgactcctcaggagcaatctttggttttattgcaggtacagctggtttaatttggctatttttcaataacatagatcaagtttactattatttgaaggtacttatacttttttcatttttattttcaataggttcttgcataattctattgttaacaacaggtgtaaccaaaactgatattattagagttattagtagtacagtattggcaataagtctttatggcttagctcttatcactagaactcatgctcccgatgaaattattcaacttgcacatcaaacctcttcgttcatggatttctggaaacagcttacagatataggtaaaaaagttgttgtgacgaactttatgtcagccatattgattggtaatgctgctcttttagcactatttggatcatttagacagtttgcatattctatcgctaattcaaatagaacaggctggtggtataatatttatcactctatgtcgcactttaatatgcgcttcactgttgtaatcgtaataaccttaagcggagctgtatggggggttttgaataataaaatacctcttccattttaa

SEQ ID NO: 46967 - DNA, 354 bp, Acinetobacter baumannii
atgtttacaaatactttatctagtttttttgaaaagttagcttcaaaagaagatttagataaatggtatttatctactttcattgatgaaaatgtttgttcgctattaccagcagaagcttttgaattttcttcacatgttatagagcttcttaaaaatgacgctcaaccagactatacatatgaattactaactattttattagctctacaacgacagtctgatacagcacaaatacctgaaattctgaaaaatagtcctaatttttttgatgaaattactaaaagtaattctgaagtatatattcaaattttaattaacgaattgtttagtaactatcaaattaaaatataa

SEQ ID NO: 46968 - DNA, 1335 bp, Acinetobacter baumannii
atggataatattcaggagtacttcaaggatacgaaagatttatcaacaaaagaattgaagttggcaaatattacttctaaagaacttattgaaatttacgaagactatttaaagtcattaaaagaactggagacagaaggaatttatttaagtaacagattacagttttgtgatgaaataaactcagttcgttggagagttaaggatccaatacatctcttaacaaaaattgttaggaaaagaaaagaagcaattcaagaagagaataaagaatcaaaatatttaactataaatgtaaagaattataaggaaattatcaccgatttgataggcctccgagctatatatttatttaagcatcattggaaaatagtagatgattatgtatgtagtaattttagaataaatgaaaatgaaaatataattatatatcatgcttctgaagatgatttatctttttattatgagaataattatataaaagaggttaatgggtttaagctaaaatatattagatctgagaaatcatctaaatatcgttccacacattatattatagatgctaattttcctcataactttaagcttgagcttcaaataagatctattcttgatgaggcttggggagaaatagatcattttttaagataccctgaccatgaagaagatgctcaacttaaaagacagatgactgttctaaatggagcaattaatggttgtgaagaattagtcacaacttattttaaagaatttcaagaaaggaatattcaaatattacctgaggttaagtctgaaattaagcaaatgactcagagagatacttccgaaaatactaaaacaagtaaaggtgctgagtctcaaaatcttgatgaaaaattgaaaaatttagctctatattcagatacttcgaaatatttaaagaacttaggtatacatagtgagtttgctaaacaacaagctataataaatgaagctttaaatggctctgcaaatgtttgggctaaacagcaagctatattaaatgaagctttaagcggtccagcaaatgtttgggctaaacaacaagctatactaaatgaagctttaagtggtccagcaaatatttgggctaaacaacaagctgcattgcagaatgctttggtaggacctgctagtacatgggccaagcaacaagctatcttgcagaataatttagttgggccgacaagtatattagctaaggagcaagcaatattagaggcatctataactgaatctaaaaatacaagttctgattcttcttctgtagaagaaaaaagcaagaagagtaagaaaaaaaaatcggaagacaattaa

SEQ ID NO: 46969 - DNA, 336 bp, Acinetobacter baumannii
atgaaagactattcagaatatttccgtgaagctgtggcttcttttcttgcacaaaatcctgccctacaaaaagagcttgcctgtattacagttgatgaagcagaaagtataggcactacggttgaaacacttcactcacaagtcatgaatcaacgattcgttgaacatgcaacccagttaggtatcgacaccaaccatttagtactgcaattcattgatgcttctgaaaatgaaaagaatcagattctaaaaaattatcaccaaaatcttgccaattctctcggtattgactggcaggactacatttcaatcaaccctcatttatcccatctatga

SEQ ID NO: 46970 - DNA, 864 bp, Acinetobacter baumannii
atgtctaaaaaattcgaagattttaataatccacggcaaaaagcattacaggggatgaggaatagtattcctgcagaacagtgggaggaaaatctcctgtttctccaacagttacgtaataaaatagcagcgttgccagtgtgtaaacatcctgcaattgaattgttaaataatggaaagattgataaagcttcattaacaaaaatccatttggaatatcgtcatgccattgtgcagatttttactgatgcgttattaatggctcaattccagacaaaacaactagagccatctctcccatctggatcaaaaatgtttccacgggtcttattgagtttgaatatacttgatgagtttggtttccgaccaggattagattcagaaggttattatcttggtaatcctgaatatgcacattatcctctatatgaggatttactaaacgattatggtttgagtgagcaggatcgtcgaaattttcaaccctcgcaaatagcagacaaagtaagaacctttttagaatcatcttatgatagctatattaatgtagttgcactgcttgccgtcgcagaagaagaggtaatcctctttagcccacctttacgagaagcaactaaagctgtcggtattgatatcgaaggtggagggtattatcacgttcatggtgtatctacggatgaaacttctgaagcagcagatgatgaccatgaagatgatttatggtttgcattggcacaagcaataacgaaagataactatgaaagtttgacaacgttgtgtattgaatactgcgacttatggaataagttctgggataaacaggtagctgatttaagctatattgaagagaaaaaactcgcctga

SEQ ID NO: 46971 - DNA, 585 bp, Acinetobacter baumannii
atggggcaatcaatgtcaaaaaaagatactattataacaacagcattaaagctttttaaccagaaaagctacaactctataggagttgatagaattatagctgaatccaatgttgctaaaatgactttttataagtatttcccatcaaaagaaaaccttattgaagcatgtctatatcaaagaaatagtgacatacaacaggctattcttgaaaaagtaaacgctaatgatctacctttaactcagttacaaagtgtatttaattggtatattaactggattcatactgacgatttcaatggctgtctattcaagaaagcaacaatggaaattattcaaacgtatccatctgtaaaaaatcctatcaatgattatcgtgcatggatttataatttagttttttcaattgtaataaaattaaaagtggaagatgcggctggtttaacaagtctatttcttaatattgtcgatggtcttattattgatggcacagtcaacaaatctctaattaatccagagaaaacatggtcttacatcaaaaaactaatcaaccttgaaaaccttataaaatcggaagttgcttga

SEQ ID NO: 46972 - DNA, 327 bp, Acinetobacter baumannii
atgaagaccttcaaaatggttcggctactcacttgtggcttatttagtttattgatgtgctctgttgcaacggcgaaaactgaaaaaatcactttaaagcaaaatatcggtttcggtgaagaagctgtgatattcaacacgactaagggagaagtcatcctcaatatgtatgctcttcctgaaagagtggctaaacagattaaaccatttaaaaagggtcaatgtctggaagtccaatctaaacatggtttctttcaggacacgggagacggtcaatacattcaaagtattcgaccatgcaaacggactcaatctaaagcaaagtaa

SEQ ID NO: 46973 - DNA, 345 bp, Acinetobacter baumannii
atgatgaagtgcattaaaaccaaagatgatttactgcatctgtataatgaagcgattaaagatagtatctctaaccacatgctgactttagagcagcaatatgatgaaccttatcaagccacccttcatgggtggtttattatttgtgacaatgaatctgatttatcagaaccacttgcccatctgacctttagccttagtgaaaaacttcacttaggtgaggtggagtatgttgataagaaagaggagtggtacgagatctatgtattgctcaatgacaatgagggtatattaatctatgttcctaatgacatattactcaattattctttgactgcgatctaa

SEQ ID NO: 46974 - DNA, 279 bp, Acinetobacter baumannii
atgacaaggcatatcttattcgctttgggacaagtcgtggctactaaaaatgcactagagctcatgaatcagcacgatattccccctttggatttactccatcgtcatcaacatggtgactggggtgatttaaataaagctgaccaagaagcaaacaaacaggctctaattgaggatcatcgaattttctcaagctacgattttggtaatgaaaaagtctgggtgattaccgaagctgatcgatctatcaccacaattttactccccatagattactga

SEQ ID NO: 46975 - DNA, 645 bp, Acinetobacter baumannii
atggatcaatcagatctttgcacattaggtcacgttacgaatttttttaaatttgataagcaaaattgtgtagcccattatcgtgatccggccctaacaattcccgtaaattcgagcgaatattcaatcgcaacgtattatgcagatttccgcggacgctctaagagtgaaataaacaaaattagtccagactttttggaacaagtttcaaaaaaagaactctgtgttttcaaattagaggaaatgctcaaagggatggctagacttaatcaaaatgatttctgtatgtctattccacctattttagatcctaaaaaccgaatcctaaaaaattgcccaatcctttttactaagaaagatatcgaaaaagggcaatttgaatttttctgccatgtttatagagcaagagcagctattatcgtttcatcactcaaaaaacagggaaatttagataatgcacttataggtgtatattccattgaatacgaggctaaaattaaaggtcttgtgataattcgtcttcttgatttggagcactataacggtaactctaagcagatattaaacattaatgaaatgcttcccctaaagagctttcaagaattcaatccagaatcagcgagttggcctaattatttactctga

SEQ ID NO: 46976 - DNA, 3648 bp, Acinetobacter baumannii
atgtctaaaataagtactttgaccctaaaaaaagggcaatatttaagtaatttatcactgcctgttcaaaaaaataagttcacccttattcaagcgggtactggggttggtaagacgacaaccattatggaggattatccgaagcagcaccccatcattgttatgcttgtgccatcagttctgaaagtgaaagagctagagacaacttatggagatgtttctggttccattcaatatcgcttttattacgacaaaaaaagtccgactgaagatgaactcagtcaacagaatggacttgttgtcgttgcaacttacgacaaaatggaagcaattgtgagtaagttatctattgctcaacgtaagagtacgttattggtggttgatgaatgtcataagctctatgcagcaggaagttatcgggatgatgccattaactctattatttttcggattaatcataagaaaggattcagaactgtcctctttctaacagcgactttcactgatcattgttgggaaactctaaaactacctctggattacatctataaggttgatcttgaagaagtcggccttaagcggtctctagaaatgttattgattgataaaggcaatcaatttagtttcattccttttgttattgaacgcctcaagaaaatgcaggaacaaggtacacggaagaaaattattatacgtcttaaccaccgtaccaaatgtgaacgtgttgcagcactgttggagagatttcacaacgctcatactttaactattcatagcaagaataaagatacgactgaggtccagaacttttttacggctcaaaaaatcccgagtgatgtagacgttgtattttgtacttcaattatggatgaagcagtcaacatcaacaatttaaatgatgagctagattctgtttttgtgattggaacagatgctcacccagaggaattagtccagtttcttggtcgtttacgtaaaacagcagtaccttgttttatggtgaaccatacaggtattgaacttaaccatatcgtagatatgcatgcgttaaagcaaaagaaattagagaagaatgagcggtttattaatcgtttaaccgaaattgctaatcttttgtcagaacttatggacgactatgatttggatatagaggaagtaggagaagaggttaaaagtatctataaacgtgtcacatatctgaatgagacatttaacgaattatcaggagctaagctgtttgcagtgcattgtggcaaagctgttcataatatcgccagtattgctgccaattattatcgtatggataagtccaattgttattctaacttttatcttttcaaagagcgtgtaacagagcttttgccaacatgtacagtgaagcaccgtattattaacgattgtactttgcctagctatattaaagagtttttagacgaagagaagaaagccagtgatgacgcttataaggcgagtattgttccagcatttgaaatttttttagaggccaaaaaaatctcttatgtagaaattgatttggaggctgaatttgatgacattagtccgattatagctcaaaaagctgaagtagcaggtcaaagtactgataataccagtcaggataaagaagttactgacaatgtgagcgaaaagtctgacgagaaaactcaagtagaagaaaatgctaagcaacctgaaaaagaaaacaaacccgctaagagcggcatagcagcgctaaaacagcagggaatcatcccaaataataaaatggacgatgaccagaaggctaatgaaaagcataaaaaagagccccctacatcattccaaaagcttaaagaaaagctgaagaaagagaaaatgcggtcatcaactgtcccatgtcctattgagaaggatgctaatgatcattcagacaatgaacgcactatgctcattaaaaatgaagctgttaaggtatataatgcaaatgctgaaacagaggatgtttttgatgaggatgatgaccagaaggctaatgaaaagcataaaaaagagccccctacatcattccaaaagcttaaagaaaagctgaagaaagagaaaatgcggtcatcaactgtcccatgtcctattgagaaggatgctaatgatcattcagacaatgaacgcactatgctcattaaaaatgaagctgttaaggtatataatgcaaatgctgaaacagaggatgtttttgatgaggatgatgaccagaaggctaatgaaaagcataaaaaagagccccctacatcattccaaaagcttaaagaaaagctgaagaaagagagaatgcagtcatcaactatcccgtgtcctattgagaagggtgctaacgttcaatcagacaataaacgtactatggtgattgaaaatgaagtagtgaaggtagcagatacaactggtgaaccagtcgatgtttttgatgaggatgatatcgaggattctcaggaaactgaaagtgctgtcgaagtgcataatgaagatgaggacatgactgatgaagatattatcgaagaaccttgtcatgaaaaccaaataacagaagatgttagcgaggaatctgatcaaggagaagaaatagctaatgatgcgaccgaggaaccttgtacagaggacaaagtaactgatggtactgctgaagaatctagtcaaaaagatgaaggagcagaagaacctagtaatgagagtaaggtagctgtcaacgttgacgaaaaacctagtcaggagagtgatcaaacagataatatttctaaaggctctagtcaaaaaaatgaaggaacaaatggtgcttcaaagaaaaaaaagaagagtcaggctcacaatagctcgttaaggcttaaagatattggtacaagtattcttcgtcgacaagaagaagatgagcaattcattgagcagcttgtagctcaatatgatgtcccctctcatgcagttactgtagaaattctactgcaaattgcacatctgtctacagtgattggtaatctaaacgatatctacacaatcattgagaaaaaacagtttagcactgttatgggtatcgctagagcttataagtcaaatgtcgtcgtacattatttcattaagcggttttatcgctattacccagaacgctacttagataacggatttcaattaactcctaacgatgcagctgattggctattaaagggatttaaacaggttcagaaagagactgccattcctttcaagaaggtaataaaagataaacttgtatctggagttaaagtagactctaagaccaaagaagtcagtatcgacccaagtaaagctgcaaacttcttcgctaaatatttttctgtgaatgaccgtaatgctaaaaaacctgcatcacgctatttagaatttacgggaattgcttacgaaaattatcaattccttgcaatcgctaagtatcagcaaccttatttaaaacctctagaagagttccaattaggggagcgaatctttaaccctgttacaggtgttttgatctcagggcctaaatctccgtttaagattatcactccttctgatcagccagactatttcgacgaagtagaggatgaagatgaaatcgaaggtgaaggtgaaggtgaaggtgaaggtgaaggattagatcaggtagcataa

SEQ ID NO: 46977 - DNA, 1464 bp, Acinetobacter baumannii
atgcatataaacagccttaaaataaacaacttcaaaggattctctgaagagagtaattttttaacttttaatattccaaatggtgaaaaaggaagtggtctaaatatttttattggagaaaataacagcgggaaatccaccgtattagaggctattgatttcattagaaatagtaccaaaaagaacttggaaataattcatcataaaaagataactggagatttcgcagaagaagctacagttgaattagaattcactggagccgtaattaatatcatcgaaacctttgcccaagagaataaagcagaaccattcaaacaagtagtctatcaatgtactgaaggaaaatcttatttcaaaatttcaagatcaacctctgatattagaacactcaaaacattcaataaagatagcggtatattcactaatactggtggacttgatggaacaataaaaaagctctttgaaactaattttatctgggctgatactaatcctaatgatgaagcttctttcggaacatcaaccttatgcggaacactactaaaggaaatcgcagcagaacacaccaaaactgaagagtttattgatttttcaaagaaatttaatgatgtatttaactctcattcctcagaactacgaaagaagatttctaaaattgaaaacagattgaattctatttttactaatcagtttggtagtgcctctttaaatttccaatttgatttccctaaaattgaatctttttttaaaggatcatccatacacattaatgatggaatagaagtaagaatggatgagaagggtaatggaatgcagcgttctgttgctttagctttacttcaaatttatgcagaagaaattgcattcgatcaagataaacaatcaaccagaccattctatttattcattgatgaaccagaaatatgtttgcacccaatgggacaaatgaagttatgtgaagcacttatggagttatccaagcataaacagatattcgtcacaacacattctccttattttcttaactcaccatcattaaagaatgtgggaatttttatatttaaaaaagaggaccataaaaatataatctcaaaagctaatatggattatttattcccatggagccctacatggggagagattaactataaagcttataatttgccaaccgttgatttacataatgagttatatgggtatttacaggaaaagtcccaaagctattcagaaaatacatttgagtcatggttaaatagtcaaggatgcccaacgagtaaaacatggattcgagatagaaatggaacagctttaccacctaaatctgtaacattaatgacttttattagaaatcatattcaccatcccgaaaatactttcatgcattctaatacctttgattcaagtgatttagcgacatcaatacaagaaatgatcaaaattattaaaactaatgggttttaa

SEQ ID NO: 46978 - DNA, 2556 bp, Acinetobacter baumannii
atgccttccgaagaacttcaacatcgctatcctcttaatattgggaaaaaaattggtgattttgagctgtttcaaacacagttaactacgttaaaccagttttctgagcatggaattttatcaaaaaaggattttggaaaatggcgcacccaaaaatgtgatgcaataattattagtcgaactccttttttgagaacaatagctattggcgaggataagtcgacaggaagaattacaaatagaaactggaaaaaactatcaaaggatcttttggagtcaaaacttaatcctacggatacaaaaattggttatttgacagatggtgcaacaacttattggattgctggtggatttgatgaggtcaaattaattaccagagatgataataaagctttaccagtaaaaattgattttaatgataaaacttttgtatcggagtttacatatatagtgaataactatgatcctgattcaggagtagtgaaaagccctacaaatgtaaatccgcatgctctagctaaatcagtatggcaaacaatttggcgtttaaaggccgatagaccagaggactgtttagctacatttgtagagttgtttgtatataagttcttgaacgatctgaatttaatgcagagggatcatataggaactgatgtttcgattgattatcttttatccttagataaagagtattgttttcaatattatatgaaaaatatacgtccatatataaagcaccttttcccagagggagaagatggattaagtattattaatggtattgtttttcaacctacgaataaagatcataactatatttttcatgagttgttgaagaaatttattaaatttgggtccttaaaaaatacagatccagagtttaaaactaaattgtatgaatcttttttacaggaaagtgatacaacaacaacttttggacaattttttactccgaggaaaattgtaggcgctatatatgatatggctcaagtggggcgcctttcacatggaagagaaatttgtgatccagctagtggcgtgggtggctttattcttgagcaaatggcaagggatttacaaggacaatgggttttatcagatgatcaaatggagcctattcataagtggaaagctttagaaattgttccaaaaacagctattttagcgaaagcaaatgctttagtgcattgtggtgatttattagctgatcaaccaagtcgtgtaccagcatttgcaaagtggctcaatgaagtctttaactgtagatcagatacctccttgggtgctttagatgatttatctaaagataagtatgatttaataataagtaatccgccttatgttgtttcaggatctgctgatattggaaagttgataaataattcacctgtgagaaaagagtattttgctcgtaaatatagtggagtcgaaggattatttgttcaatttatagtgcaggcattgaaaccaaatggggatgcttgggtattgttacctgagacgttttttatgagaactactgataaagtattacgtgattgggtttatcaaaattgtgaattagatcttctagctttattaccagaaagaacgttctttaatacgccaaagagagtagtagttgcacatttaaagaaaagacctgtgcagctatcccctgaagcactaaagaaaaagttagaaaaagaaaatgtattgctcttcgctgtaagtgaaataggtgaaagtagagatgctagaagattacctattgctgaaaatgatctagaagatttaataactgcatataagttgcattctgtaggcgctcctatagatcccaacgtgcgtagggctgttattacacagtctatcaatttatatcaaagtaagtcgataaatattcgtcattattgggataaatcagtagctcaggagctaggtttattaacagaagatgaagatcctgttacagcaaaaaaaagcttagaccgaaaaatggaaagtttagaatctcttattgttaaatggcaaaaagaacaagcgagttacccattaccaaaaactgttaaaaagtttaaaaaggtaaaattaggtcaagaggaaatttttgaacttagaattgggaaacgagtactaaaaaaagatatttatcaaaaacaaacgggtattcctttatttagtgctaatgtcagaaaaacatttggatttgtagaagaagcaaatgcagggaatttactgtatggtggcgctttatggagtattgatagtgatttcgattctgtgggtgttgctcctggagaagtttattcaattacagatcattgtgggcaagtggaaattttagttgagggaattgaacctagatatctagctcaaatgataaagcaggctggtaatgatatggggttaaatagagattttagagcctctctacaaactatggctgatttagaaatagaattacctgtcttagaggatggtagttatgattatgaaactatgtctgaatggtctgattttcatgagcatttgtataaaacagagaaagaacttaaaaagcttcttctgaattaa

SEQ ID NO: 46979 - DNA, 528 bp, Acinetobacter baumannii
atgaaaaaatattttactactgttctgttaataatatcttctttaatatattctcagaatatttttgcaaatgatcaatgtaatattgaagagacagtaaatttaactatttttaagaaaaatgattataaattctataattatatgtgtgactctgtagagggttcttatctaaaaggttatctaggatctcaagaaaaaaaaatatttgttagtgattactctgattttgcagctaaagaaagccctaaacttttagctgtcagtatctataaatcaaaaaaaagaaaaccacctatattaattacccttaattcatcttattactgttgtactccgcaaatggagggtgaaatgtatcaagttaatttatatcaaattagtgaaaataaaaccttaaatttgaaaaatataactaatatattgggtgttaatgcagagggttttgaagggagagcggaaggaaaagtctattataaatataaaaatatttctgaaattaaaaaatggttagataaaaattattga

SEQ ID NO: 46980 - DNA, 1599 bp, Acinetobacter baumannii
atgaataaattagtcactattactactaagttctatgataaatctggaaatcggattattaatttaaatgtacaatcaagatacaaaggatcattaaaagctaatagccaaaaaactgataagctcggtctgtttgtatttcaggcttcgccaaatagaactgttgagatattagcaaagcctcctaatcaaaaagactatacagtatttaaaacgataaactcatctatgaattcctcggaaatacatccgataaaagttcaattaccaaaaacaattgatgaatataaacaagtaaagcaatccaaatcaaccaaaggaatcgtaagtactttttttaaaatttttgatatgaatggaaaggttatgaaaaattttcctattcaatcacgaccaaaaggtaaaggaaattcgcccgataaatatacaaatgatgaaggcatagtagaagtacgctcatcacctaatagagatatagaggtcttagtattaacatcaaatgatacatttgttttaaaaagttcaataaattctgctaatggcagttcacaaccagttcttattaaattagatgagccttatgaaaaatttaaaagtgcatctacgattaaaattctagatcgagatggaagtgactacattgtagaaaagactaatgtggaaatgttagttgtagagaatggtaaaaagcagctttttagtatatcaaatggaaaattgtcattacaaagcatgatagggcagaaactagaatttacggtgtataagcctgatggtaagcctttaaagacacaaacctatatggcaacacgagtcaaaaacaaccttattgagttccatctggacgtagatataacaaaaggtagtacggcacaaaatgatccagaaattaataagaaagttaaagttgatatattaattacaatggaacaaatgaaaaaaatgtggccaaaagctttggctacaaaaatgcaaccaattttagatgaactaaatagcgatttattaggttataaattagatactagattgagacaagcccattttatggctcaagttaggcaagaagtaggtagctctttttcattaagagagcaagtcgaatatatgggtccaacagctttgaaacaaataggctattatagaactcatcctaaacaagcagagattgatggatataaaagaggacaaggtccagcaaatggtgaagtaattgcaaatcgtatgtacgatgataattatcggagcgctaaatataaattaggtaatacttctcctggtgatggttggaaatatttaggccgaggcctaaaacaattaacagggaagaataattatcaagatctaacgaatatgtattcaactctatggccaggagaaaaagttgatttcgtaaagaaccctgaattaattgaacaacccaaatatgcagtaagatctgccattagattttggctaaaatttaagctttatgaggttgcagatagaggagctaatggagaacaggtagatgctattacgaaagtaattaatgaggctacaaattcatatgctgatcgaagagcacattttgttcaggcacgaaagatttttatttaa

SEQ ID NO: 46981 - DNA, 1515 bp, Acinetobacter baumannii
atgactcaagcaatacaaaatgaaactcgttctgttagagatatgcttatagcagctaaagttttagcaaaagatggtaaggctacagaaagcccatgtaaaacttgtcgtgtaccggtttgggttagtttcttttttgatggtacaggaaataataaagatgctgatgcagcaactttaaaccagagtaatgttgtggctctttttgaagcacataaacaagattctaaaaatggtatagaaaaattttattatgaaggtttaggtacacagtttagatttgataaatattcagtagtagactcaggaaaaattaccgctgctgcacgaagtttacaaggaagaaaaattgatattaccgatgctgagtggcgtaaacaaggttacagtgaaagtggtaagggtgtacaaggagctctggggttaggtgttgcattaggtatcaaacaacgcttacagaaagctatttttgaattagtcgattatttggataaaatttatacgcagaaaggaattactgaaattaatatttctgcttttggattttcacgtggtgcaactgaagcccgtatttttatgaactggttacagcatgcaccgaatgtgactacccaaggcacaggtagtggtaaaaaattattttatcgggggaaacctttaaaagcaaagtttttaggtatttttgacacagtagagtcaattggtaatgctgcacaaaataaaaatcctgaattatatagaacacgtattgaagactatatagaacatagtatgcacttggtcgcgtctcttgaaatgcggcagtcttttcccttaacacctacaggtaaacctactgcaaatactgtaaaaggacttattcatgaccaaaaggtttacccaggtgtacattctaatgtcgggggaggttatatgcctatggaacaggcacgtattttaggtttgtctcgtattactttacatgctatgtataaccgtgcctgtgcttatggattaaaattttttaccttgaatgaattaaatgctgcgaagcaacgtaaaatagtttttacaaggttttatgcttttgattccaaatggcaacaagatttaaataactttatggcatatgtcaaagggggaacctcttttgaacagcaaatgcagggccaaatagcgttatatcatcaatggatacgcgaaggtggatatgctcgttttattcatcgtaaaacgagagagcgaatagggcgaaaagaaaaaattactgccataacaaaactcaatgatggcttgtttgaaaatattcgtcaggccctaaatgtttatgtaccagaaggcgcaagaccgtatgatgtgataaaaggcagagatcgcaaaagtactttaccaaaagaagtgatttactattttgaaaattatgtttgtgattcagtaggtggttttattgctgaggccagtgacttccaagcaattctcaatgatggtaaagcacctaattattttatccctagaggaattgttcgacctacttaa

SEQ ID NO: 46982 - DNA, 516 bp, Acinetobacter baumannii
atgaagaatatttttaaattagtgctgtcagcagcactattaccactaatggttgcgtgtcaagcccaaactgtcgacttaactttcttagtttataactacagtacggaagggcttggcgaaattcaggtcaatggtaaaggaagtactattgctgatgcggctgaacgtttaggtagtattggggaagcaggaactgcttgttgtgttcatttagtagaaaacagtgatacagctgatgtaagcttttatactgatcgaggcgatggttataagcagtatcatattaaagttcccgtagaaaacctcaaagacactccacgctcatatgcggttttacattatttcccaaataatacgggggtaatagaggtttcaatgcgtagaccaagttttagaaaagatttatttgataaagctcttggaaataaagcaaaaaatattcagttagattctccaacaatgtggagaaccatttctgaaaatcaagcagcacgtatgcaatttcctgattaa

SEQ ID NO: 46983 - DNA, 903 bp, Acinetobacter baumannii
atggaaatttttactcaatcggcagattttttggaaaatatatttgcacctacagaagagattgatgaaagcttttattattttttaatcgatagtagttctttttcaggtgtggatagcttttgtaaggattttccatttgatggtgggcagaaaataaacctctacttagatttttctgaaaatctacaagaaaatggagcactactttattcttttactcacgaagaatgtattaaaaatattgagctaattaaaaacattagagaccaaggtgggctaaatttcttcaattcttattttgaaattgaacaaattaaagaacatcttgatgaacttatggaaattaagcaacctaatgggaaaagtgctttatttcgatttcaagacagttttgcttttcatgcaacggtaagtgtattaaatgaattgaaatggagaaaaatattatcctttaaaattaactattggatttggcaaaatattgataatacttttcatcgtttagataattttccaaccaatcgctctattcttactacattaagtttttcagaagatgagtttaaagacatcaatattaatcttaagccaatgcgattaatacctctattaaaagaatatgatgaaaatttaaaagatttacctttttatcagctctatgaaatagcaataaacttgcttaaagaggctaaaaaacaacagttaatcagttttgaagatgaaattttatttagtactttatatcacaaatttggcgagttccttcttgccgaagggccttttaaaaaagctttaaacaaaactcaaatgacagcaatgagttttcaaaaaacgacagatgaaattgatttagaagagctggacgattggtataagagatatcaagaagttcaagtctaa

SEQ ID NO: 46984 - DNA, 2637 bp, Acinetobacter baumannii
atgttgaataatatttttgatttcttagacaagattggttttgcttcacaaaaacgggctctacatatttattttactaatcctgaaataaataatcaggtttttttacaacgtattgatggctttcattctataaatgaagggctttctgctgagcttatttgcttatcaataaacccttatatttctttaaaacaatttattggatcccaagttgccgtagaacaagtaacagattcaggtaaattatttagaactacaggaattatcacaggggcgagtcaagggcaaagtgatggcgcactttgtttatataaactgactatgcaagatgcgacaagtttatggcacaaacgacgtaatagtcgggtgtttatgaataaaagtgcagtagaaattattgagattatttttaaagaatggcaaaacaaaagttctttatttgccgcaagtttacaactagatagcagtggcttaactaagaattatgatattcgacctttttctatgcagtcgaatgaaagtgattatgcgtatttaacccgtctcatgcgggaagagggtatcaactggttaattgatgaatcagagtctatggtcttgagtaatagccagacgattgagcctcaaaaactacgccttattgatcataataatgaatataaagtcttagagcgtcgagctattcgctatcatagaagcgatgcaactgaacaaaatgacagtattaccagttttattgcacaaagacagctgcagcccacggcaatccatcttcaacgttggcaagcagataatttaagtcaagaagatgcaagtggtagtgttttaagcgcacatcagcatagttcacaacgtgataatgaaagtttaagtcttgaacaggcatggacaattgcacctgcttggattacggacttaaacggagaagatcaggcaaccacttcaagcaatagtcagattgaaaaactaaataaacaattaaatcaatatcaagctttgcaggcaaagtattttattgctcgaagcagcgtacgagatgctcaagttggttattggttcaagttaaatgaacatcctgaacttgaaagaaatcatgaaagttctgataaagagtttttgattttaagtaagcggttttataaccagaacaatttaccaaaagatatacgtgatcaagttgaacaactattaagtttgagccattggcaagtcagccatgatcgagcgcaagaacgtcaagctaatgaactcatggttgtacgccgctatatcgatattgttccagagtttgacccattaatacatcgtccctcggcccatgtgcaacgggccaaagtagtgggtttagatggagaagaaattcatgtagatgaatgggggcgtatcaaggttcgttttttattcacccgtaccgatgaccatcaacatgatggaggtgcaggaagcaatgacaatgatactgactcggcttgggtagatgtattaacgccatgggcaggggaaggatacggtgcacgctttttgccacgagtgggtgaaatcgttgtaattgacttttttgatggaaatattgatcgtccatttgttacagggcgagtccatgaagggcaacggtcacccaccaaatttgatattaaaggccagctaccggataccaaaaagttaagtggtattcgtactaaagaagtaagtgggtctggttttaaccaacttcggtttgatgatacgactgggcaaattagtactcagctccatagtagccatggggcaagtcaattaaatttaggtaacttaagttatcctaaagacagcgcgacaagcgaaggccggggagaaggctttgaactcagaactgatcaatggggagccgtacgcgcaggtgacggtttactgatttcaacatataaacaaaaaaatgcagctcatgatgcgcttaatttagagcagacaattgctgatttaaaaacacataaagaatggaatacagttctagaagataatgtaaaagaacataaagtcatggcactagatgctttagcaacattaacaaaaagtattgaggctttagaggcagcaggtaaagagacagaagtacaaacgttaaaagaagcgattattattctaacgagtccagcagatattaccttaaactcatctaaaaatattcttcttcaaagtcagtcaaatacccatatttcagctaaagaaaatattaatttaatgagtgatcaaaatacggttttagcaagtcaaaagaaattaagtcttttttcttatgaagactttatgcaaattattagtgccaaaggaaagttagaaatacaaactcatgaaaaatcaattgaaatgattgcaaatgaggttgttaagattttgtctgttaaatccaatattgaacttacttcaccagaagaaattactttaactgctaaagaatcccaaatcaaaatcaatggaagtggtgtatttattaccactaatggaaaatttgaggttaaagcagggcagcatgtctttttgagtggtgcaaaggctgacttaccaaaactaacgtggtcatttaaagagaaaactgcgagttgtatgaagaacgcgagtgaatcacatgaagccttcgttggctttgagggatag

SEQ ID NO: 46985 - DNA, 915 bp, Acinetobacter baumannii
atgcaaaaacgtggacgtcaaattcgtttgttttatgtagatggacagcataacggtattgtgagagcagaactaatgaattggacaggttatgtctatgcagcacctagagcaagtttgaaacagttgattgaaaaagaagatgctcatggttcaggtatttactttcttattagtaaatcccaagaactagagggtagatacaatgtgtatgttggagaaaccgttaatggaatacagcggatgcaacatcatgattataataaagacttttgggatactgttattttagttcaatgtaaggatacgacgttaactaaaactcattgtgcatatttagagtaccaaacctataaatttattaaagagaacactctttatgaaattgaaaacaaacaagaaataaaaaattatgcaggaaagttatcagatgctgatatttccgatatggatacatttttagataacctaagtttcgttttgcctgcattaggagtcaatatacttacaccagttgtaaaaatcccaagccaatcaaatactcaattcgctcctattatagatgaagcaatagaagcagaattttttattttaagccgtgataaaaaagtagatggaaaagcttatataaaagagggtgttttttatgtgagacaaggttctattggtaaagaacagcagacttcatctcaacataatttcataataaatcaacgtcaatctttgatagataaaggtatgatccgagtagttgatgataaaattgaatttactcaagatgtatcttttacaagtacttcgacacctgccgccatgttatttggccgtccaacatcagggccctctacttggaagctcttagggcagcctaatatcagttataaggattgggaagaaaaacagcttatgcaataa

SEQ ID NO: 46986 - DNA, 183 bp, Acinetobacter baumannii
atgaaaaatcgcaccgcctcaagcttaaagctcgataaattctcacttatgctctttatgaagcttattctaatgacatttagcttacaatcctctatgaattatgcttttgaagtaaatatggggatagttgaattaaagcattcattttcaatgagtgtaaatctagataagggagagtaa

SEQ ID NO: 46987 - DNA, 606 bp, Acinetobacter baumannii
atgtttaaatcaataaaattaaatgatgtagcagaaattagattaggtttaccatttaagaaagcaataaatgatgctggagatcaaggcacatgctatcttattcaaattaaagatataagtcctgatgaagctattgattttcataatcttcctagggttataccagaaactagcccagttcagcactttttatcaaaagatgacattttattaagattacgtggccctattttttcagctgctattattgataaaaatatagacttccctattattactaataatcaggtggcagtcattcggtgtaatgaacagaagattgttccttattatttacattggtttctcaattctccagaaggtcagaacatactaaatcaatttagtgaaggttctaacattagtaagataaatcttaaaaatgtatctagccttgagtggaaaatccccccaattgagctgcaattaaagattagtaatattcaaaaaaattggtcagctcaaagaaaaatctataaaagattaatcgaagttaatgatatattttttaatgaattatgcagcaatataaataatggagagatgaatgatcacagcaaataa

SEQ ID NO: 46988 - DNA, 1473 bp, Acinetobacter baumannii
atgatcacagcaaataatttaaatcaatctacatttcacaaagatttatcagaaaatttcgatcttataaaaggagttgtaacttttgatgattataaaattatatttctagttatgctttttcttcgttttataaaaacaatacaaatagaaaataatttagattataaaataataaatgaaaaagagcttgatattaccttagatggaaaaataattattcttcctgaaaaatcagattttgaatacttattatccaaaagtcatctaagtaataatatcaatcgttttgaagaagctataaatctatttatttccaaaaactgtattttatttaacgataattattatggattatctattaataaatctaaattttcagacattaaacaaagcgatctattatttgaaaaactatttaatatagttgaaaatattaataatgaatataaaaaagataaaatttcaattcaagctggtaaaatttttgaaacctatataaattatttctcactagttgatagtaaaaattctggtcaatcttacacccaaagctcattaaatgacttattagcaaaattaatctctcctgaaaaatcgcaaactatatatgacccagcatgtggtacaggatcattactattaagatttaatgattgtttattgtatgggcaagaaataaatgctacgacgcatgcaattgcaatattaaatatgattttgcatggcaatttatcttataaacttgagttaggtaatactcttttaaatccaaaatttatcaatcagtatggtgagttaatgcaatttgatattgctatatcaaacccacctctggcattaagtaattgggggtacgaggaattaataaaagataaatttaaacgttttacacttggaatgccacccaaatctagaggtgattttgcttttatcctacatatgattaattcaattaacgataatggacgtatggcaattatagttcctaatggtgttttattcagaagtggaactgaagctgaaattcgaaaaaatttaattgaaaataatctgattgatacagtcattggactacctgaaaaacttattttcggtacagccatccctattattgtattaatattgaaaaaaaataaaactcataacaatataaagtttattgatgcatctaaaaaatttatatttgacaagaatttaaattctttaagtaaagaaaatattgatgaaattgtaactgcttacaagcaggataatattatagatgattttgtttatactaccaatataaatgagattcgtgaaaatgaatataacttaaacatttcaagatatattaagcacaaagaaataaatattaaagttgatttatatgcaattcaagaagagcataataatctaaaaaaagaattacatacccttgaaaatcaaatgcaaagttacttaaatgaatggagattaaaggataaatag

SEQ ID NO: 46989 - DNA, 537 bp, Acinetobacter baumannii
atgaataaaaaagttttaggggtaatctttggattaatcattttgattcttggatacttatatgcttccccttatcttgcgattaataacattaagaatgctgcacaagcaggagatagcgaaaaggtatcaaagtatattgactatccaagtgttcgccagagttttaaagatcaaatgaatgcttatatgtttaaagaaatggcatctaaaaaagcagatggttgggaagctttgggagcgatgatggcatcaacaatggttgataaaatgatagatgcttttattactcctgagggaatgactttgatgctacaaggcaaagacctaaaaagtacatcgaatagttcagatgaatatcaagtgtcgcaagctaaagaaaagacaaagccagagtacatttcacgctatacatcaatgaacgattttgaggtcgtagttaaagatcaggataaagataaagaagtcaaagtaatgatggttcgtgacggtttaagttggaaaattaataagatcgtcatgccccttacagaatga

SEQ ID NO: 46990 - DNA, 1146 bp, Acinetobacter baumannii
atgatttgggaaactaaattaataaatgaattatataaaataaagggggggaagcgtttacctaaaggtacattacttcaagcgagcttaaataatcatccctacattcgtatcactgatatggtcgaaggtcgggttatagagttaacaaataagtttatgtatgttcctttaaatgtggcagcctctataagttcatataaagttcaaaaggatgacttgatactttcaattgttggtcagataggaaatattaatattattggtaaaacattagatgaggctaatcttacagagaattgtgttaagtttattccatttaatgacaatattgataccgcttttatatattactatttgagttctgagcaaggacaagagcaaatagaacaaaggatagtaggttcaacgcaacctaaattacctatttataatattcaaacaatagaaataccttttccacccttaattgaacaaaaagctatagcttctgttctttcctgcttggatgataagattgctttattacatcgccaaatcaagacattggaagagatggctgaaacactattttaccagtggtttatagagatagcaaaaaaagaagaatggaagcaaggggtattagagcatcttgtagatttaaagtatggtaaagctttaaaacaggaagatcgttcaggctcgggttatcctgttgttgcctctagtggcattgtaggatttcataaagactatctagttgaaggtcctggtatcgtgataggccgtaaaggaacactaggaaaagtttattttatggaagatagcttttatccgattgatacaagctattttattaaaacaaaaattcctcgcagtaatatgatctttgaatactacttactcaaatcactagactttgttaatatgaatagtgattctgctgttcctggtttgaataggaatattgctttaggtaccgcgattcaaattccaccattagaaagagtatatgatttcaatagattagttaagccatggctttgtaaaattcagaaaaatacaaagcaaattaaaactctagaaaaattacgagataccttacttcctaagctaatgagcggtgaagttagggtagaatataaaaaagtagatgctgcataa

SEQ ID NO: 46991 - DNA, 396 bp, Acinetobacter baumannii
atgtcatcagtcagcattgctgaataccgcaagttatttcccataaagaaaaataaaaagcgccgttcagcaaagcaagttgccagacaaccaagtgtgggtgaagtggttctggcaacgcatttaagagcatgcaagattggttttgaacaggaatataagttccatcctgatcgtaaatggagagcagattttttaataacgggtaaaaagattttgattgaggtagaaggcgggatctggagcggaggtcgccatacgaggggcaaaggttatctaggagatatggagaaatacaactccgcagcaatgataggttttacagttttacggttcagtacagagcaagtgaaagcaggcgtggcgattaaacaaattgagcaattggtgggatga

SEQ ID NO: 46992 - DNA, 636 bp, Acinetobacter baumannii
atgttagaaaaaattaaaaaagcatctcttgctgattgggttcttataatttctagtggactgttaattacgggtctttgttatcagtttggttattacgggacagttggacttcaaagtccttggattatcaatcttttagggactaaagaattatttattagtaatcttggtctttgcattctatatgcaattgcagctctttatttgtcttcgtatgttgaagagcaaacgaaagagagattaatagagttggcagtgcttgcaaatattgttttgattgcaattatattagtggtgattgttgaagataagcgaataaacaatattgtcgattgtatttcaattttcttagcctttaactcttttcttatagttcttaagcaaggttactatttaaaaattattggtgtaattgtcctttttttagttatcccttttttaaaaggcgtagcagatatacaaactagtatttcagaaaaacagtttaatgcagtaaaactagcgaaaagcgaacaagaatggttcttggttaatacttttggagataaggctgttttggttgattcttatgaaaaatctcgaaaagtaaaggttgtggaaattaaagagcttgaattcgttcagactcaataa

SEQ ID NO: 46993 - DNA, 318 bp, Acinetobacter baumannii
gtggaattcaaaaaattagaagaactttatgattcatttgttagtcatgaacgttttccagaaatcgaagagcaggcggaaaggattcttcagcatccggagcttgatgacgaaagtaaaaaagttggtaattgggtatataatctttggttttggaataactatttagattcccctaaaggtaaattgtttcaaacaccttatagattttcaatagctgtgaatggatataagatagatattaactcgaatgatgcaccaaattttagagatagagataaatatcttgcttggttacatggcgtcattaatagttag

SEQ ID NO: 46994 - DNA, 1428 bp, Acinetobacter baumannii
atgagtactgatgcggctcgggataaagccatccggatcgaggcgcaagaagatttatatttcttcacaaggtacatgtttaaggagcgccgtggttataaatggatgcaaaattggcaccacttagaaatctgcgaagctttaataaaagtttatcgcggagagataaagcggttaattattaacgttccaccacgatattctaaaactgaaattgctgtaattaattttatggcatggtgttttggtaagaatccagactgtgagtttattcatatcagttactcggcaatgcttgccgcaaataatgccttccaaatacgaactcttgtacaagaagaggcgtatagaaaagtctttcctgagcttacattgcgtgatgatagtaaggctaaagacttctggagaacttctcaaggcggtgtctgctatgcgacaggtacaggcggtacgattactggttttggtgcaggaaaacttcgtaaaggctttggtggctgcattattattgatgacccacataaagcacatgaagcttcatcaaaaactattcgagaaggggtaattgattggtttcagaacacactcgaatcgcgtactaactcgccagatacgccaatcattgtgattatgcagcgactgcatgaggacgatttgtcgggctggttgttaggagatagaaaagacggcgttcctgtagctggtggtaacggtgaagtatgggagcatctatgtctttcagctattcaggaagacggatccgcactgtggccagcaaaacacaatatccaaaaattgaggctaatggagcaagcagcaccatatgtatttgccgggcagtaccgacaaatgccatcaccgccagcaggcggtttttttaagcccgacaatattcaaattgttgatgctttgcctgcggatgtattgaaacaagttagggcttgggattttggggctaccgaaaatgagggcgactttacagtaggtgtgcgagaagctctaggcgcagatggttttacttacattgtcgatgtaactagaggacagcttggacctgacaatgtgaataagcgcttagaacaaacagcaaaaatagatgggaaaaaagtttctgtgcgtctaccacaagatcccggtcaagctggtaaatcgcaagctagttcatttgtgaagcttcttgcgggttatagcgtgatagctaagccaatttcaggtgacaagcttacacgggcacaaccatttgcggcccaagttaacgtgggaaatgtacgtatgctcaaaggtgaatggaataaggactttattgatgagcttcgtcattttcctaacggtacacatgacgaccaagtggatgcagcttcagatgcgtttaatgaattacatgaaggttttgaagccttctttgctgatatgggatttgctcgatga

SEQ ID NO: 46995 - DNA, 1452 bp, Acinetobacter baumannii
atgagtgatgtaacttttcaacatgctgaatatgttaagaacttgccatactggcaaaaacttgatgatgtttgtgaaggtgaagatgcagttaaggctaaaggtgaaaaatatttgccgatgccaaatgcacatgataaatcacctgcaaataaaagcgcttatgaggcttatcttacccgtgcagtcttttatgaagtaacagggactacatcaaatagtttagttggtgcagcttttgcaaccgatccaagttttaaatttcctccggaacttgctcatttagaacgtaatgcaaatggtgctggtttaagtacttatcaattggctcaaaatggaattcgccatttattgaagcattatcgttgtgctttatatgtagattatcctgatgtgccgccagctcgtaatctagcggaatttaaagcacaaaaagcctatccgatgattcatttactaaatgcccttgatgtagtgaattgggattcagtaatgatcgataaccagaaaaagctttgcttagtggttatacgtgaatttaagtctgagcgcggtgctgatggatttagtaaaaccgaacaagagcaatatcgtgtacttcgtttagagcaagagggaaatggggaatatatttattccgttcaggtgtacacaaagggtgaaaagggtaactgggttggcggagagaagaagtttccaacagattacaacgggaatttctggacctatataccttttacatttgtaggtgcaattgataattcagaagagattaaaaagcctccattacttcctttggctaatctcaatttagcccattacagagacagtgcggactttcaagagtccgttttttatatggggcaacctcaatattatgcgaagggtgttaattgggagtggtatgaccaagccaagaaacgtggcatctacattggtgcgaaagtacttttgcctttacctgaaaatggtggtttaggaattgtacaagccgaccctaatactcttgcccgggaagcgatgaaagataagtgggaaaaaatgaaggagatgggggcgcgtttaattgagaagggctcgggaagtaaaaagaccgctaccgaagcgaatagtgatgacgccgttcagcattcagttctttcgctctgtgtcgttaatatgaatgaagccttgtcagcagcattacgatgggctgctaagtttgtaacgcctaatgtggatgttctaactaaagatgatttgatgttcgaaatcagtcaagaatttaacaaacagggttatttagctgagttagctcgacagttatttgaagcagctctacaaggccgatcttcatttaaatcatggtgggaatacaaccaaacaggtatgttccctaaacaaaaatatgaagaagagcttcagaatgttgaagcagagcaagatgggactttaaatcaaaaggtagagtga

SEQ ID NO: 46996 - DNA, 1104 bp, Acinetobacter baumannii
atggcaacagatatcaaaaaactatttgaagcactcactcagcaccaggcctatctttatcgtgcttcatcaaaaacggtaaatgagttattggctttattcaatgatgatacgagcaagatgctatctaagcttcgggatttattggatgagcttaatgagtcggagaaagttgctttagctggtggtaaatatacaacttcaaatttaagggaaattagggatttgattgcccaatggtttgccagtgttaatttagcattacctgaagcttttgccgtttctgctacggcgctggctgtttatgaggccaattacgtagctaagctctatggagcaaaaattaataagcctgatggggaaaaactattcttatccgctaaaaaagttccgttggcaggtggcgctcttgtcgatgatctgctttcaagaattgctgaaagtgcccgtcaaaaggttgagtatgcaattcgagatggtattaattcaggcaaaactaaccaagaaattgttcagcgtattcgtggtaccaaacgacttaactatgaagatgggatcttaaatggtaccaaaactgatattgagcgaacggtaagaactgtgcgaagtcatgtagctaatcaagcctatctaaatagcttcaaccaaattggctttgaatatgtccgatttgttagtgttttagatggacgaacttctaagctttgcgcttcattagatggttcagtgtgggaaataaatgatccggcaaagcgagtgccgccgttacatcctaactgtcgcagtatcttggttccggtcgagaaggacggtcaacttgttggcgaacggccatttgtaatggacgaacgtagagttaaagacatccccaaagaagagcgaagccagttaatagggcagttagatgccaataccacttttaaagaattctttaaaaagacagatgatttctttcaaaaagagtggctagggccgaagcgttacaagctctataaggaaggaaaatttgattttgaaaagttctttgatcctgaaggccgtttctatagcttagatgatttgagaaagttggatgaaaaagcttttaaaaagttgggtctgtaa

SEQ ID NO: 46997 - DNA, 243 bp, Acinetobacter baumannii
atgagtgaatcaaaagttagacatttggtacttaaaagagtttcagataaatcttctcatcttgctctttgtgacgaggaaacaggtattccattagctggattaaccgctgtaaaaatgaattgtagtgtttttgagggtccagcgactatcacggcaacatttgatgtaggtggtcctcaaggcatccgcttagttggtgatgaacctagacaaaaggtttggggtgcaaaggaaacgtag

SEQ ID NO: 46998 - DNA, 192 bp, Acinetobacter baumannii; identical to SEQ ID NO: 45978

SEQ ID NO: 46999 - DNA, 768 bp, Acinetobacter baumannii
atgaaacttaaaacagtaacaatcgacggtaaagtttatgcggaagtagacggtgataagccgatctatattcatgatgatggcaaagaaatgccacatgatgcaccacactcggtagcaacaattgcacgcttaaacaatgaagctaaaacacatcgtgaagccaaagaagcagccgaaaaagcattaaaagcttttgaaggaattgaagacccagcggcagctaaaaaggcattacaaacaatccaaaatctcgatgataaaaagctggtggatgccggtgaagttgagaaagttaaagctgaagctatcaaagcagttgaggaaaaatatgccccgattgttgcgcaacgtgatgctctagaagcctctttacataaagaacttatcggcggtggttttgctcgttctaagtacattcaagacaacattgcagtacctgtggacatggttcaggcaacctttggtcatcacttcaaaatcgaagaaggcaaggtggttgcatatgatccgaacggcgaaaagatttattcacgtgtccgcccgggtgaacttgcaaatgttgatgaagctttagagtcattggttggtggataccagtataaagacttaattcttaaaggtggtaaaggaactggtggcggttttcaaggtgggggcaaaggtggagcacctactggaatgaaacgcagtgaaatgtctgtttctcagaaagcagattacatcaaagaacatggcaatgatgccttcctaaaactaccgaactaa

SEQ ID NO: 47000 - DNA, 957 bp, Acinetobacter baumannii
atgactacaacagttaattccgacatgatcatctacaaccaactggctcaaacagcctatttagaacgattacaagacaatttgaatgtttttaatgaagcttccaatggtgcgattatttatcgtaatgaaatcattcaaggtgacttcaataaaaatgcattctacaaagttggtggtagcattaaacatcgcgatgtgaactccaatgcaaaagtaactccggaaaaaatcggtgcaggtgagtctgtaggtgtaaaaattccatataaatatggtccttatgcatcaactgaagaggcatttaagcgccgtgctcgtacaccagaagaatttgctatggttgttggttacgatcttgcagatgcattggttgcaggccgattagagtacagtttagcttctttaaaagctgctatttctagtaatcccgatatggttgcgaaaggaagtatcgttgttgatggccgcaaagcattaactcgtggtatgcgaaagtttggtgataagtttggccgaattggcttatgggtgatgaactcagatacatatttcgatattgtcgatgatgctatcactaagcaaatttacggtgaatctgaaatcgttatctatggtggtttaccaggaaccttaggaaagccggtattggtgacggatgctgtaggtgataacgatgcttttggtttgcagtatggtgctgtaactgtaactgaatcacaagtaccgggcttccgagcttatgacatcaatgatgaagaaaacttagcaatcggtatgcgtgctgaaggtgcatttaacctagatattcttggttatagttgggatacatcgaaaggtgaaaatcctgatcttacattacttggttcaagtgctaactggattaaatatgcaaccagcaacaaaatgacagcaggtaccttacttgatttatcaggtacagcgacaactggttaa

SEQ ID NO: 47001 - DNA, 666 bp, Acinetobacter baumannii
atgaagattatctatacacgcattgcagcactggctgcattagagacgggcattattgctaaccctgactattatgaaaccccaaatctgaaagcaaaagaggtaattatttacggtaattatccaaagattcaaaaggattacgaatctttagaagttccagttgaagttcgtaagttggaagagccacaaaaaatgactttggccacggtaaatgtcgaggtaggagtcacccctgaacttcaagctgtgattgatgatgcaaaagcagaatgtgaaaaggtcgtcgaagaaaacactcagcttaagcaaaaaattgccatcttagagcaggctggtggtaaccagtcagagttgttatctgagaattcacgattaaaagatgcagcagtcttagcagataaagctctcaaagatgctgaagctcaagtggtcggtataaaaactgaatttgaagcttttaaaaacgatattcctgcaatgcaggcacgtattgttgaattggaagctggaaaatcggcagaaaacccagctacagaaacggcagctaatgattttgaaaactggtcaaatgatcaattaaaagagtatttggctagtaaaaatattggttacaagccgtcagcaacaaaagcagaacttcttaaattaatccctaaggaataa

SEQ ID NO: 47002 - DNA, 390 bp, Acinetobacter baumannii
atgagctttattactgtagatgacgcaaattcaattttgggcagcgattttgcaccagacagtgataaagctcgtctggttaaactggcaaatgtctggatgaaaaacagaataggttttgtaccagatcctattgatccacttcttaaggacgcggcttgtgaaattatcaaaggaattctggccaaggtaatttataacggcaaagaccagcagttgaagcgtaagaaagttaaagctgattctgttgagtcagaaaaagaatatcaagacggatctgaagcaatctctagctttgaacagatagcaattgattttattgattcacttgatttgaaagatccaaatgcaagttttaatggctttggcataccactttacagggcatga

SEQ ID NO: 47003 - DNA, 369 bp, Acinetobacter baumannii
atgggcttacgtgacgaaattcaggcagatattgctgaagcatttaatgaagatttagcggacgccgttcatacctttacttgtgagcggatttcaaaaacgaattgggatcctaaaactgaaacatgtgttgaagttaaagaaaactattccggccgaggcgttctgtttggctcatacagtcaatatgagattcagacgcttggagtactggccacagataagaaagcgaccttgctgcaaaatgaagtgtccatgacacctaaaattgatgacgaatggctaacagctttaggctcatttcgagttatccatattcaacaagatcctgccagtacaatctggaaatgtcagttgaggaaggtatag

SEQ ID NO: 47004 - DNA, 420 bp, Acinetobacter baumannii
gtgcaacagcaaagtactaataatcagaatattcaagtaacagtacaggtggataacgcattaatgtctactggatatagtgttaccactcaggcagattatcatctttcacttaatgatttttatattttaaaaagtcctattaggaaatatgatgcatatgttacaacgatattatcgatcggtctgggacttttaatttcaagtggtgggcggtatattgcacaatctcttgggtataatgcacaagtagaaccctatgaaattattggtggtttagctgctttaatgttagccttaatcgggtacttcataggtttatttatttttaaccctaaaaaagctgttttttcaaaaattgaacagcattttaaagataacccgcccactagatctatagtaggagcgaaagagaagtaa

SEQ ID NO: 47005 - DNA, 453 bp, Acinetobacter baumannii
atgtatagtctccaaaatctccctgaaaactttaaagaaattaaagagctaaatatttgtagtaataaaattattgatggtggttttccattttcactaggtgataaattgccattaatcgtaggagatggtaaagaaccaaagatctggttacaagctcttaaaagtcctaaatcgaaagaattaatcttacttgttgatgaaaatatctctacagataaggaaattatcgtaacaaaacctgaagaaggcgttattgaaatttacttccaaaaaacgatcaaagtcttaagagtaaaaaagaaacaggcgggcaatatacttatttcttatattgatctaagacctctaggtttaaatattacggggagcccaatgggtttaaatattggcggttcatctttttctggtaatactattcagggtactaaagtttttattgggcttggttag

SEQ ID NO: 47006 - DNA, 405 bp, Acinetobacter baumannii
atgataagtacagattatgttccagagtggtacattacacctttccaacatgtgcagtacacgcttgctcgaaatcaactacacatggatttgttatttgaagatatggataaagccgatcaatttttggatatgggagcggatgcacaagttagtactttttctgatggcgcatatgcaatcgtccaaattggtgatacggcggataaagaccaaattcaagtttatggattgcttttacatgaagctgttcatatctggcaaatagtaaaacggagaatgggtgaacgagaaccgagctctgagtttgaagcttattcaattcaggcgatcgctcaagacctttttaaaatgtatgaagaaagcgaggtgaatgatgggatggaaggggaaaaagccaactga

SEQ ID NO: 47007 - DNA, 354 bp, Acinetobacter baumannii
atgagcaattttgtttttaagcgtggtgacactttcaacttgaacttgcagctagttgatatggatgaaactttgcaatatccacccgatgatgttcgccgtgcaattgatctaaccggttacacctttacttcacaggttaaagctctggctgatggtgcagctgtagcaactttgacttgtgctgcattaaatcaaagtgcacagaaagggtggctgaacattaaatctagtgcaagcactgcaacttggcctttaggactgtgtcagatggatattaaagctgtagttagtggtactacgcagcacactgaaactttgactttccaagtgattgacggggtaacagcataa

SEQ ID NO: 47008 - DNA, 531 bp, Acinetobacter baumannii
atgaataagtctctcatttgtttatcagcaattgctatgggcttaatgtctatcaatgctgctaatgctgcaacagctaccggtacattaactgttaaagcaacaattacaaatagttgtgttctaaatacttctgccacaggtactactgataatgcagttttggattttggtactttaagttctcttgcgaataacgtcgatgcagataccacaacaacaggtggtacagctattaaagttttatgtaacaacactgtgccatggactttggcttttgacgcaggaaaaaatgctcaaacgacacaacgccgtatgattggtggtgcaacaagcaacgaatatattccttacaaccttttctctgatactaatcgtgcaacagcaattggtgttgctacaactgcatatagcggtactggtactggtgcggtacaaacagttaacgtctatggtcgtatccctgctggttcagctttgccaagtgcaggtagctatgttgacactgtaactgtaacagtgacttattaa

SEQ ID NO: 47009 - DNA, 708 bp, Acinetobacter baumannii
atgagaaaaaatatcttcattttcacaagtttattcttatctctgtctagcactattagtgcagctacaattcgaatttcgccagtgaatgttgaaatttttagcgatcagactgcatcttccattagtttatataaccagtcaaatgatagcgctgatttgcaggtgcgtgtatttgagtggactcaaaaagatgggcaagatcaattagttccaacagaagagatcgcaattagcccaccttttttaaaattgcagcctaatgattcttataatttacgtgtagttaggattaatccatcagttatttctggtgaaaaaacctatcgtattattattgatgagttacccaaaccacttgatagccgtaaagcagctcaaggggtgaacgtactactacgttcgtcactacctgtatttgtagtgaataaagatgcaattactaaactggactggtcaatacaacaagaacctaataatgcttatctcacaatacgtaatgttggtaatcgacatgcgctattaaataatttaacgctagttgatagcactgcaaataagagctattcgattaaagtaaatacagtcaatggttacattcttgctggtaaagcaagaaattttaatattagtcctgattttaaatttcaatcagatcataaatataatatttctttgaatattaacggtaagaaaacaacactttaa

SEQ ID NO: 47010 - DNA, 2454 bp, Acinetobacter baumannii
atgagatacattataggtgtcttatgtgtcacttatcttccaattcatgctttcgcagagtcattgcaggatagaacaaataccataattccatccgttccaaatttaatagatattaatgttagtaatacaaaaaatgatgaaaataagttatcaaaagatggtacccgattatttttaaatgtttttgtcaattccactacatctaatgatttgattgcagttaccaaagatcaagatgaaaagctctatattcgagcgcgtgacctaaaaactttgaggctaaaattggatgagcagatttcagataaccaatgggtgtgtattaatgatctaaaaggaatccagtttaaatatctagagaatgagcagtctttaaaattaaatatcccgccggacatgttgacaggctatgcagtagatttaaatggccaacagattaccagcccccatttgttgaaaatgaagcccttaaatgcggctatcttgaactatagtttgtataacaccataaccaatgacgagaatgttttctcaggttcggcagaagggatctttaacagcgcaattggtaacttttcttcaggtgttttatacaacggtagtaatgaaacgagttatagccacgaaaaatgggtgcgcttagagagcaagtggcaatatgtagatcctgaaaaagttagaatatataccttaggggatttcatttccaatagtccggattgggggagtagtgtccgtcttgccggtttccagtggtcgagtgcttatactcaacgaggtgatcttgtcacctcggcactgccgcaattttctggttcggctgcacttccttcaacactagatttatacgttaaccagcaaaagatttattcaggactggtgccatctggtccatttgacattaaacaacttccgtttatttcaggcaatgaagtcacgcttgtgactaccgatgcaacggggcagcagagcattactaaacaggcttactatttttcatccaaaattctggcaaaaggtattaatgaattttcagtagatgttggtgttccacgctataactacggactgttttcaaacgattacgacgatgccacttttgcttcgggtgcaattcgatacggttacagcaactcactgaccttaagtggtggtgtagaggcttcgacagatggtttatcaaatctaggtactggttttgccaagaacctgtttggttttggggtgattaatgctgatattgcagctagtcagtataaagatgaaaacggttattctgctctagttggtttagaagggcgtataagcaagaatatctcgtttaataccagttaccgtaaggtatttgataactactttgaccttgcccgtgtgtctcaagttcgatacttaaaagataatcagatgacttctgagccgcagaactacctgagctacagtgcattggcagatgagatttttagggcaggaattaactataatttttatgcaggctatggcgtttatttgggctataaccagatcaaatatagtgataactcttacaagttagtttctgccaatttaagcggaagcctaaacaaaaactggggcttttatacctcagcgtataaagattatgaaaatcaaaaagactatggcatttactttgcactgcgctatacaccatctagccgagtcaatgcgattacaagtatttctaatgaaagtggtaaaacaacgtatagacaagaaataaatggatttagcgatccacaaatcggtgcatttggatggggtggctatgtagagcgtgatcaggacgctaatcaaaacaatgcctcaatttatggctcttaccgtgctcgggcggcttacctaacaggtcgatacaaccgaattggggataacgaccaagttgcagtttcagcgacaggatcattggttgcggcagctggacgagtctttgcagccaatgaaattggtgacggctatgcggtcgtaaccaatgctgggccacaaagccaaattttaaatggcggagtaaatttaggaaaaactgataagtctggaagattcctgattcctagcctagtaccatatcaagagaaccatatttatttggatccgtcttatctacctttgaattggagcgttaaatctacagatcaagaaacagtggtaggttatcgccaaggaagcttgattgatttcggcgctaaacaggtcgtttcaggtctagtaaagcttgttgaccagaataattcacctttattaccgggttatacagttcatattaatggacatgaagagagcataataggttatgacggtgaagtatttattcaaaacctattaaaacagaacaaactagaagttgacctactggatcatggctcatgtcaagttgactttacctataacggtaatcagtactcaactaaaaaattgggaccctacgtatgtcgttag

SEQ ID NO: 47011 - DNA, 1029 bp, Acinetobacter baumannii
atgtcgttagtgattggtactactactaaattagaagctccaaaaaagctttttttaacagtaaagtatttcttggcaattacattgctttatctaatttatgcattttttagtccagttcatgcttcatgtacagttactggaactactacaaatacttttacctatacagctgccaatattaataatgacgcaactattaattataggggaacaatccgttgtacaaacggcggtacaactgctcagacttcacgatatatgtgtatgaaaaccgtatttacggggtctacgacatcgaataatagtgtatttttaccttatacagtaactgccactgtagggggggcagggtcttcaactcttaaccaagtgtcaaatgtctggtctggtccagtatcaacggtagcaactaacggtgtatttaacttttctttaactgtaaaagtgcctgctcgaacaggacttataacagcttttccgactggtacatatactggaacggttcaattattttgggatatgcaagataattctagcactctctgcgaaggtaatagtggaggtgggtgggattcggggaatgcaactttcacgtctaattttgttataccaactttatgtcagttgaactcaacttctaatgtagatttcggtaatattactgatattggtacgactagtcgtgattacactgctttaggtgccattaacactacttgtaatcctggtttaccttacactatatacttaggagatgggaataaccgtatttcaggtggttttagacgtatgactaatggaagtagtcaatatattccatatcagttatataaagattctaactatagttcagtatgggatgccacaggcgggataacaaacgttggtggatcgggaggagtctcaagttctggtacaggaagtgctcaaagtacaaatgtttatggacgaattccgcaaggtacaactatttcaagtactcctggtaattactcagatagtgtagttgtcacagtaacctattaa

SEQ ID NO: 47012 - DNA, 1206 bp, Acinetobacter baumannii
atggctttaactgaagtgtggctaaaagctaataacggcaaggcacgtgataaggttgaagaaatagcagatcgggattcaatgagtgtcagaatctcacctaaaggtaaaattgtattccagttgagatatcgatttgctggaaaagctgaacgcttagacttgggcacctaccctcatatgtcactcaaagatgcgcgtattaaagctggtgaaatgcgggcacttttagataaaggaatgaatcctaaagttgaggttcgtgtacagcagcaaaaatacattgatgccagcacatttgaagaagtttttaatgactggtatgaaagttattgcctgaagaagaaaacttctgcccagcaaattaggaatacctttgagcagcatgtaattcctgaagttggcgatttaccagttgacagaattaccttgcaacaatggttagctttacttgaagaactagctgatgaagtaccttctatcgcagatcgggttttaacgaatgcaaaacaggtccttaagtgggctaaaaaaagacagttacttgaagtaaatgttttatctgacatttatgccaaggaagatttgggcattgagagaaatagaggtaccagatttctttctgatgaagaaatcaaaatggttttgatggctattgaagaatcaaatattttgcctaaaaacaaaattttcctaaaactatgtttaatgtttggttgtagaaatggcgaactcagaaaagctaaaaagacagatttcgatttaaaaagaaaagtatgggttgttcctgtagtaaataataagactggtaagaaaactggccgtgaaatcattcgccctattttacctgaaatggaggcattaattatcgaggcttttgaatacagcacttgtgagtacttcttaactaatgacagtgaagaaactcctatgagccatggttcttcaaattcgttgcccggttatgtaatggaacgccttagaaagcatcatgattatcacatgaaacattggtcacttcacgatctacgaagaacagctcgtactaatttcagtgcatttacttctcgtgatgtggcacaacttatgattggccacgtgatgtcaggggaacaaggtacttatgattattacgaatatttgccacaacaaaccgaagcatatgcaaagtggttggataaaataaagtctctaaccaataattag

SEQ ID NO: 47013 - DNA, 285 bp, Acinetobacter baumannii
gtgcaacatcaattcagccgcccacagttggcacgaactctagaatttgcttctgaagtcattggaaaagacattgaggaaaatgagcatcaacacgaacttgaaaccataatgtccgatctgtttatacgttctggaatttcacatgcgcaaatagctgcacaagatataattgctttaagtaaaggaatgattaacgcagcaggtatagtaggggaaagtgatttaaatcatttacagcagcgagttgaaaaagctgtatttggttatttagatctggattaa

SEQ ID NO: 47014 - DNA, 468 bp, Acinetobacter baumannii
atgttttatgactatatcattactcagttttacccgaagatcccatttttagtctgcattaatttggtcgtaatcgtacttgcattagttttttactttacaagaatgccagataaagaccgactgacaccaaaggaggctcgccctgattatattaaaaagtggaaatggaaattatacgctgtattaataagccaaattttgatgctttgtttttatttctgtattccagatgttaattacgtgaaatatttctatggtgatgtaagggttacaacattaacacctgaacaaattgctaaacagaaggcagagcttcaagcagattatgaccgacattatgaacgctccaagcaactccttttagattgtttggataaaggccagaaacaaccacatacaaccacatttaacgacactaacgaagttattaaaacttgttatgacgttgcgaagtataagttttag

SEQ ID NO: 47015 - DNA, 258 bp, Acinetobacter baumannii
atgagtgaagtaaaagttaaaacatgtgaattttgtgatgatggaaatggcgaatgcatcttcccttattacggtcttgctcctcatattcacacaaaaccaattggaggcacggtatttctagatgagtcatttcctgaaaactttattcctgatggggatggtttaggtatgtatacacattgtctgaattgtgggggtgacggcacgtttgaaggcactcaattagaagttaaagcggaaagtaaggaggggtga

SEQ ID NO: 47016 - DNA, 438 bp, Acinetobacter baumannii
atgacagatttgaataaggaaagagaagtcaatctaagctttgagcaagacaatggtgctgtttgggtatttgcaggtgatagtcaatttggcaccgaaatcagtcatttaatgatgatgcatgcagatgaatataacgaagatgaattacgtgttatttgtcaccatgcagcatgtgaaattgacagacttagagcagagatagaaaaagccaaatctcaggcggtgctagagaaaaagatttacttaacctgtgagcaattatatgcagcagcaaactttggtgcaccaaacaaagatccagagcttttagaaactgaattaacaattgcttggtttgatgaagctcatagcggcagtggttactacgtttatataagtgagtatccagaagaaggtgcaatgaagctggatattgaatcgggagctgggggatga

SEQ ID NO: 47017 - DNA, 1095 bp, Acinetobacter baumannii
atgatgaaaaagtcattattttgtatgacagctgccttatttgctctgccaacagtcacttccgccgcttccccatattttagtttaaaagatggtgatggtttcaaacgtttttcagtctcagctggtcctttatatgtcaaaccaacaggaaaagcccaacctgtttttgtgaatactgctgtgaaaaaaggtgaacaagctcaggttggcgatgtctctattaagacagtcaaagagagcatgtctaaagatatggatcccaacttatctacattctttatagatttcttagataaactaggaaaagaaaaactaccagcagaattaagtggtaatgcgaatatttatggattagatcaatgggataatccggggacaggtttagaagcagatgatgttacaacactaggcatcatgacaaactacttctttaccgataatgtttcattagaaataaaggcaggtattcccccaaaagtcgacttacagggtaaaggtaaaatttatgctcctcttaaagcccaagctcatccatcaattgagctacctttaattgggggtattggtttaccatctattgatttagaaaaacaaatttttatcactgaccttgaaggccatggaagtgcggcatcagctcgagcttggacaccagcatttgaatttcaatatcattttggcaagaccggtgtaaataagttcaggccttatattggactgggcgtaatgtatgcatatttcaatgaattagaaataaatcctgaaatcgaaaaagatttagtaaatgctggtcatatgattgtcaatattaaagatggcaaagcgggagctgctcttgatcgtttaaaaagttctggtgatccaaaagtaaatcttgaggcttccgatgccattgcacctgttgcgactgctggtttcacctatgactttaatgacaaatggtatgctgttggctctgtgtcttatgctcacttaaaaacggacacaactattacagtcaatgacgccaagtacggtgagttaattaatgcaaaagcagatatcgaaattaatccaatattaggttatgccggtattggttaccgattctaa

SEQ ID NO: 47018 - DNA, 1011 bp, Acinetobacter baumannii
atgattgttttaggcttggaaacttcttgtgatgaaacagggttggcactttatgatagcgaactcggcttacggggacaggttctttatagccagataaaacttcatgccgaatatggtggtgtggttccagagttagcttctcgtgaccatgttcgtaagcttattcctttaatgaatcagctgcttgaacaaagtggtgttaagaaacaggaaattgatgcagtcgcatatacgcgtggcccgggtttaatgggagcgttaatgaccggagctttgtttggaagaactttagcattttctttaaataaaccggcaattggtgttcaccacatggaaggccatatgttggctcctttgctttcaagccaaccgcctgagtttccatttgttgcattgcttgtttcaggtggtcatacacaattgatggcagctcatggtattggtcaatatgagctattaggggagtcaattgatgatgcggcgggtgaagctttcgacaaagtcgcaaaaatgatgaatctgccgtatccaggtggaccaaatattgctaagttggcgttatctggtgatcctttagcatttgaatttccacgcccaatgcttcatcagggcttagacttttcttttagtggtttaaagacggcagtttctgttcagttgaaaaaattgaacggcgaaaaccgtgatgctgatattgctgcttcattccaagaagccattgtagataccttagtaaaaaaatctgtaaaagctttaaagcaaactggtcttaaacgtttagtaattgctggtggggtaagtgcaaatttacgattacgtgaacagttggaaacttcattggcgaaaattaaagctcaggtttactatgcagaacctgctttatgtactgataatggtgcaatgattgcatttgcaggttatcagcgtttaaaagcaggtcagcatgatggtttagctgtaacgaccacaccaagatggccaatgactgaacttactattcctgagtaa

SEQ ID NO: 47019 - DNA, 1758 bp, Acinetobacter baumannii
atgttgaactataacaaatttaataaaagtgtcttattcatctgcttatcactaacggggggcctaagttttgctgcggactcggatgatcctattcgtcagagaattcaggctgaccaaactattcgacaacagcaacgtgatagtgctttagaaaaacaaattcaaccagatgtaaacgttaatctagggcaagaacaaaataagatttcagctcagcaattacaatatttacgttctaacagtgaaacaccttgttttgaaattaaaaaaatacttttagaaggtgaagaagcccatcaattcatatcagattttaatgtaattactactggcaagaacaatattattggaagatgtttaggggtaaatggactaaaccaagcccttgatcttgtacaaaataaaattatagcaaacggttatgtaacaacacgagttttgcttcctcagcaaaatattgcatccggtacggtgcgtgttcgtgttattccaggacgagtggatcagattaagttcgctgatggtacttctaaacgtgcacatttgtggaatgctttaccgatgaagtcgggtgagctgttaaatattcgtgatatggagcaaggtttagaaaactttaaacgagtgccaacggttgaagctgactttaaaatccagccagcagaacaaaaaaatgaaccgggttatagtgatgtgattcttgcatggcaacaagctaaaccttatcgcttacatgtggggattgatgattcaggttctgatgctactggaaaataccaaggtacagcgaccttgtcacttgaccatgtgttaactttaaatgatttattttatatcagttataaccatgatttaggtagcaatggttctggtaaacatggtacagatggcttttatgcaagttataccattccatttgattattggttattttcaaccagttatagccgttctaactatttacaaacagtcgctggaagcactgaaacttatcaatacagcggtaaaagcgaactcattaatgcagatttgtctcgaattatttatcgagatgctcaccgtaaaactgctgtaggttttggtggatggtatcgtgaatcacaaaactatattaatgatgtcgaagtagaagtacagcgccgtaagactgcaggctggaaagcaactcttgatcataccgaatatttttctaatgccactttaagcggcaatgtgacttataaacgtggtacaggttggttgaatgcaatgagggcaccagaagaagactttggtgaagcttatacacatgtcgggattctacaggccaatgccagtttacaagtgccttttaaagtggggcaacagaaccttcaatatcttgcagaatggcgtactcagcacagcaatcaacctttaactcctcaagacagattttcaattggaaaccgttataccgtaagaggttttgatggcgagcaaactttattggctgataatggttttttagttcgcaatgaactgagtggctcaattatgaataagccacactcttggtatgcaggtatcgattacggagaggttggtggaaaaactgcacattatccgaatcctttaccaggcacgagtttattaggtgcagttattgggttgcgtggacaaattactcccttgcgtttgaattatgacgcttttgtgggtgcgcctttgaaaaagccagatcacttcgaaacagatgattacacgactggatttagcgtgaattggacctattaa

SEQ ID NO: 47020 - DNA, 11172 bp, Acinetobacter baumannii
atgaataagaaccgttatcgtattatttttagccatgctcgcggcatgtttattgctgttgctgaaattgtaaaaagtaaaactaagcaagcagggcaaagtcagggacaagtgggaacagattcgactatagattcggttctacctattcattataaaaaactaaatccacttaattttgctgtaattggttgtttgggagcattggtaattagcttaccaatgagcagtgtggctgaaactcagattattgccgataaaggtgcgcctacatcgcagcaaccgactattttaaatagcgcaaatggaacaactcaggtcaatattcagacaccaagtgcgggtggtgtttcgcggaatacctatacacaatttgatgttggtcaagaaggtgccattttaaataattcacgaaataacacccaaactcagttaggaggctgggtacaaggtaacccatggcttgcaaaaggcgaagccaaagttattttgaatgaagtgaatagtaataatccaagtcaactcaaaggctatattgaagttgccggaaaacaagcacaagttgttattgcgaatccctctggtttgatctgtgatggctgtggtgtgattaacgcagaccgttttactttaaccacgggtcaagcggtaatgaaccaaggttatcttgaatcattccgagttcgtgaaggtcaggttacgattgaaggtaaaggcttaaacggaagtttaaccccttatacggatatttatgcgcgtgctttaaaagtaaatgcaggcttgtatgcaaatgaactcaatacggtccttggacaaaatgatattcaagtcaaagaccatgttgctcctcaaatcacggcaacgacagcagctacaaccacacctcagccaaattttgctttagatgtaggccaactgggtgggatgtatgccggaaaaatctttttggtgggaacagagcagggactaggtgtacgtaacgcaggtacgataaatagtactcaaagtacacttacgctaaatgcaaatggtgatttgatcaataatggtaacttgatcgcgaataaagatcaggtacagctgaaagctcaaaatattcaaaatacgggtaatgtaagtagcgcaacttcacaaatttctattgagagtcaaagtctagataactctggtttaatcagtagtgcagatgagttacaacttaatcaacagaatagtttaagtaatagtggcacattgaatgctgctcgcgttgttattgatgcgggtagtctaaaaaatagtggctctatcgaacaaacaggtctgcaaggacttgatttaaagtcgggttcaatgacaaaccttggtggtaaaatcggaattgccaagaatacgacaggtggcggtacgggtggatcgacaggtggtagtgttccgacagttccaactgatccatccaaagatggcggaagtttagaagttgccactccaatagatacgaccccaaaaacttacgatacaggttttatccatgtgtcagatgtactcaataatgaccaaggggcgatcattgccaatggtggtgtagatttagatagccaaaatggtctagataaccaaggcggtcaactgaatttgggtgctattcatattaaagggaatagctttaataacaaccaaggtgagctcacagttaaaagtgctgatatccaaacctcaagttttagtaaccagcaaggattactgcaatcactcacttctttagatgtaaatagccagtcgattgataatcagggcggtaaaattaatgccttgaataatattagtatgatctcgagcggaaacattctaaatcaagctgggcagatcgcgagttcgtctgaactttatttacagggattgggcctaaataacagtgggggtgatctggaggctgaacaattattaaaacttaatctttcaggtcatttgaataaccagaaaggaaaaatagtcactaataataacttggatagttcgctttttggtttagataacgaccaaggtgaaatttctgcaaaaaatattacgattcaaaacaaagatcaggctttaagtaatggttcaggaacgatttatgctgaccaaagtttaaaaattcaaactggatctttaaataatgcagtcaacggtacgttatctagtcatgaaaacctgcaaattgacagccagcaacttatcaatcagggttatattcgtgctgatcaacagttaaaaatcaataatacaggtgttatgacacagcaaggaggtgttctttcagcctacggtaatattgatttggtgagtcagcgtcttgttagtgatgaaaaaagtgttattgcggtcggtatcaatgctcaaggtgagcaagatcaaaatgctcaagcggatttaaatattaaaacagagcaggcacttgagcatcacggaaaactactggcaagccgtaatattgatttagatggggcaaatgtagatttatcgcaaggaacggcagcagctcaaaatataaatattatagctcgtgatggagatataaataatcagtctggtgtgttacaggctgattctattcaattaaatgcagtacaaaatcaacaaagtttaattaaccaaagtggtcaaattcttgctaaaaaattgaatctgaacattgggaaagatattaataaccaacaaggtttgattcagcacactgcgacagatgacctgaatttaacagttcagggaattattaataaccagcaaggccgtattctcacaaatgcaaatcagttaaatattaaagcacagggactcaatagtgactctggtgtgattttgcattcgggacaagctggcttaaatatggatatacaaaatatccatgctcaaaaggctgaattgagaactaatggtgcacttaagcttacgaccgatcaagcactattagaccaatcaaaagtgtctgctactcaagccaatattcaagccaaccaattgactgaccgtaatggtgaaatgctgtttagtgccgcaaatggacaaagttcaattcgtgtaaatggtgactaccaacatcaaggaagtgtattacaaagtaaccatagcttagacattcaaacaggttcgcttagtaaccaaagtgggaatatcttagtcactcaaaatgaagcaacctcacaaccagtacagttaaatattgtcagccaaaacgatattcagaatgatctgggtaacattgtgagtgaaggccaactttcattgaaaactggaaaaggaataagcaaccaacaaggaaatataattagttctaatgcgcttgagcttaaaacagatcagttaattaataaccagtctgggcagatacaagcgaaggatatcaagttatctgcatcaaacttagataatagttcaggggtgattgctgctaaaactggtgatgtatcactcaatattaataatcagttgattaatggtcgtgtcgagcaagctaagtcagctggtattattcagacagcacaaaatatagatgttcagactgggctattggacaatagtggtctgatttatgctggtcaaaatcagcaactgaaagtcgctcaaaatcttaaaaatgctggacagttagctgctcaaaataatttaaatatacagacggctacactgacccagacttctgcagggagtattattgctggtttaacatcagatggttcattagcaaatcagggtaatcttaacattgatgctacaggcgctataaatgcgcaggggcaactcatcgcgggcggtgatttaaatagtcaggcagcgagtcatgtcttaaaccaaagccttgttcaagcaaaaaatatttcgctcaacagtaaatctggtcaattgagtgctcaacaaagtacgattcaggcagctcagcaacttaatatcgttactccagatacgctagatacccaacaagccaatttaaaggcgaataaagttcagattaatgcaaaagatttaaataaccagtcaggacatatccagcaaacaggtttagatgatactcaaattttgttgacgggtgatttaagcaatcaaaatgggcaaattgacagtctaggccaaaaactacaaataaatgctaataatttaaataaccagaatggtcttatccaatctggtacagcagacagccaacttatactcgctatagctaatacgctcaataataatcagggcaatatcaaaactgctggtagtttgcaaacgaatagttctgagttaaacaatgacgctggaacgctacttagcttcaatggctttaacatcaatacacagcagcttagcaatcaagcgggtcaaattgttgaggctggaacacaagacaatattgttaaccaattaattgttaaaaactttctaaataatagtaatggcaagattcagacaaatcataatcttgaaattcaggctgatgcgttaaaaaacaatgcgggtagtattgtgaccgcaggcgcagcaggtcttaatctcaacacgacatcacgactcgataaccagtctggaaatattcgttctagtggtgatctcaatgtaaatgcacaagacattttgaatgatcagggacaaattcttgctgcaaaaaatgctcagcttaatagccaaaacaccttaagtaaccaagcgggattaattgcagcacagcaacaattaatgattcaaagtgctgccttgaataaccaagcgggtcaaattgggtcggtagatgcgggcgtaaatatccagacgactcagcaagcactcaataatcagagtggtaagattcaggcgaatcaagcgattaacctcgatgtacaggggcttgataatagcctacaaggtttgattagtagtactaaaggtgatcaaagcaaaattcagattgatactcaccagcagaacctgaataaccaaaatgggcagattaatagcggtaatacattacagattagtaccaatggtctgaacaatcagcaaggtttaatcactgcacagggtgatcttggtataaacgccgtgcaactgattgataacagacaaacctatctaaatgctaccttgccagagttggcccaaggtattcaatctttaggacaagtcgttttacaaacatcagaattaaataatgaacaaggtcaggtcattgctggcaatggattaaccattcaagcgcctaaggtgaataacagtaatgcgggcttgttagccagtggacgagacttactgatcgatagtgttggacaagcaggtacgattaataatcagaaaggcaaaatcagtgctaatcagaacattagtctaaatacaggcctgatgagcggaagccaactcgataatagtcagcagggcctcattagtgcagcaaagcaagtcaaaattattagtcaaaatattgataattcaaacaatgaccagaaccaaggtattcaggcagggcaaatagaaatagctgctagtactttaaataatagtgctggacgaatctctgctgagcagcaacttaatttaaatattttagataatttaaataacaccaaaggcttaattagtagtcttgatcaattaacaatacaaggtcagcaagataataaccgtctaatcgtaaacaatcagcaagggactattattgcaggtgaagaaggctcattaactgcaggtttaaatattctggccaaaggtttaacaggcgacggtaaggtcttaagtcagggacagttaaatcttcagctcaatgatgattatgtacaagatgctcaaggtcagttgcaggcacagggaaatttaaaccttagctctaagggaaaagttaccaatcatggtgcaatcaaaagcaacggacagttatctatttcagcaaatacaattgaaaatgctgtagatggcagtttggaaagccagcaaactcaacttgaatctgtaggcgtgctcaataattatggactcattaatggttcaaatacatatgttaaggcaggccaactcaataatattgccggacgtatttatggtgaccatattgcaattcaggcgaatactttaaataaccaaagcctcaagggtttagcgccagtcattgcctcaagaggtgatctggatctgggcgtacaggttttaaataatctggaaaataatctaaatcatcaaagtggttcgcaaattattgccatgggagacttgcgtataggaggttcgcttgactcacagtggtatgctcaaggaactgctcagcaagtcaataaccgaagttctgtaattaatgcgaatggcaatatcgacttgaatgctgatattgttaataaccagaatgtcttttttacaaccaaacaacagcagaccacagagcaactggattactggaatatgtatatttcagattcgcgtgccggatggtataaccctggtcctcagtccttaattactcaggaaatctatagccagaatccagatttatttactaaattaaagcctgcacaacaacttgtgacttcctatgacaacgcaacgatgcaggattatttaagtcgtcctgatggttatttcttcattgtaaataactatgacgatagctcagccggcaacatgtttaaaggctatgtcgtttataacggacagctctacagtactgaccattatgaaaatgtgaaaagtacccaaactacgactacgactgtagcagatgagtcagcaccagctgtgatcagtgctggaggaaatttaagtttcacaggcacaattaataatgacaaaagccaaattatggtgggtcaaaagctgattggagatgcaaacgcaattcacaatgtcgatgccaaaggtcctaaaattacgcatgaaacaggaacggtaacgccgagttatggaagttatgggggcaaggggcacgatagagtctgggcttctgctgaacaagcttataacccagcagatgttaccaaacgggtggatttatttatctatgaaaatccaaccagtgcgacccctgttaaagtgcaagaccaaacccagcaagtcaataaagacaatttgactgaacaggcacttagtcaaaaccatgactccaatattattggtcagcaaaatacacaggttaatcaaacagaaactgttcaacaaactatagctcaaacagatcgtattcaatcaaatgaaattaaaacaggtcaggcacagcttaaaggcgtagttggggcaaacactaccgatcataaagccatgagtaatcgtgcagtcgatcaaattcaaaacactgatactaaggctgcctctgttcaggggcaaacaacacagattgatggtagtggtttcgagattcgtaccaacaacgctaacgttaaagtcccaaataatgcgttgtatagtaaaaatccagacagccgtgctaactaccttgttgaaacagatccagcgtttagtaactatcgcaactggttatcttcggattatatgttgaatgcattgggacttgacccagcacttcaacaaaaaagattgggtgatggttactatgaacaacgtatggtacaggaccaagttgctcaactgactggttaccgtttcttacaaggatatggttctgatgaggagcaatataaagcgctcatgaataatgggctgagctatgcaaaacagtacaacttacgccctggtattgcactcactccagaacaaatggcgcaattaagcagcgatattgtttggttggtagaaaaagaaactaccctaccagatggtacaaaaaccaaagctttagtcccgcaagtttatgttaaagcgcgtgtaggtgacttaaaaggcgatggaactttaattagtgccgatagtattcagctcaatttaagtaaagatttgaccaatgcgggaacaattgctggacgacaagtggttcaaattaatagccaaaatttaaacaaccttgctggaaacatccgtggtggtgtagttagcattagtactgaaaaagatttaaataatattggtggtatgattcaggccgatcaagccatgaatttgcaggtaaaaggtaacctgaatattcagtcaaccacacagagcagccaaaatgcattaggccaaagtaactatagctggacaggaatagatcgtattgctggtctttatatcggttcagcacaacagcaagcgttgagtgatcagccaaccttggtgatgaacgttggtggtgacactcgtatattggctgcaaatatccagaataacagcggtggacgaagtattatccgtacgggcggtgaccttaaagtcggtagcctgaatacggaagtgaccaacaatgtggtgggtagctcaaaagcttatcatttagatacacgacaagtcgaagtcggcagccagattaagagccaaggtgatttaagcttacaaggcaataatattcagattcatggttcacaaatcagtagttcagaaggcctaactgcgttacaggctaaagagcggctacagattgaagagggccgaaacaaacttgatcaacaagatcagtcaagctttagtaagaaaggtaaactgagtagctctacgacaagtgactttagccatcgtagttcagatattgcggtcggtagcattgttgaaggcaaaaaagtgctattggatgcaggaaatatcaatgtccgtggcagcaatattgtttctgatgagttgacgcagattcaagccaaagacaatgcaaatattgagggagctcagaaccaatacaacagtcaaactaatagtgttgttaaaaactctggtcttatgtccacgggtggcattggttttagtttaggtaaaaaacaagaaactactttaaaaaccgagcaacagcttactaatagtgcttctcaggtgggtagcttaaacggtaataccaatattgtagcgggtaagacctatcagcaaacgggaagtaccgtttcatcacagaaaggcgatgtgaatatattggcgcaacaagtcaatattgaagctgctaaagaacaaagcacaagtgattataagcatgagatgcaacagaaaggtttaacacttgcagtaaatgttcccgtagtctcggctgtacaaagtgtagcggagtctgctaagcaggttggtcaaagcaagaatgatcgtgtgaatgcaatggcagcagccaatgctggctttgatgcttataaggctggacaggctttaagttcattacaaggtgcattatcaaatgcaggttcactcaatggtggtgtagaagttggtgttagtctgacttatggtgaacagaaaaatactgaaacaagccattcacaaagtaccacggcgagtcaaagtcaggtcaatgctggcggaacgacaaccattgttgccacaggtgcaggggatcaatcgaatattaatattgttggttcagacgtattggggcaacaaggtacacgcttggctgccgacaacaatgtcaatattaaagcagccgaacagaaccatattgaagaaagtaaaaatgaaagtgcaggctggaatgccggagttactgtaagtaataaaacaggctttggtgtaacggctggcggcaacttgggtaaaggtaagggtaatggtaccgacacaagttatgtgaatagccatgtgggttctaaagatagcctaaccacgataacaagcggaaaaacgacgaatattattggcggacaagtacaaggtaaaggtgtacagattgaagccgataacttaaatgttgaaagcttacaggacaaagcgacatataagagcaaacaacagaatatgtcagcacaggtaagtgtaggttttagtggaggtaatgtatctggaagctttagcaagtctaatgtagatgcgaattatgcatctgtaaatgagcagtcaggtgtatttgcaggcgacgacggttaccagattaaggtgaataaaaacactgacttgaaaggtgcaattattacctcgactcagactgcggaaaacctgaagaaaaatagcctagatacaggtactttaacgtcttctaacattcaaaatgtgactgaatatgatgctaagggcatttctgtaggtggtggttttaatgccggaaaaagtggtacggcaggtaacaaagaacctggcacggtactttcgacaccaaacaaaattgatcaacatgcttcaacaacagtaggagtaagtaaatctgttgggtttggcctagacagtgataaagacagtagtgtgaccaagagtggtattaatacccaaaacattacaattcgagatgaacaaggtcagcaagcgttaacaggtaaaactgccggacagattaaatctgagatattgacgtctgtaaccacagatactgcacgtgagaatagtggagcactgcaaaacaactttgataaggataaagttcaaagtgaaattaatttgcagatggacgtaacgaagaactttgatgccaaccgtcaggaagcaggcattacagttgataatattgtaaaggcgctggaagtcacaggacaggcaatagagggtgctaaacagacactagctatagccaaacaagcacaacaagaaatccagaaacttagcccagaagatcaagtaatatttgaaaatttcttgacagaacttgcacaaagtcaaagaacggatagaacagacacttattatcctcttgttttggcagctggagaagggttagcgatggctgcagcggcatgtgcaagaagcccggcttgcgctagtgcgacagtaaatgtattaggtgcagttggagttgcaattttaaatgaacagtccgatgacaagaataaaaaaactaccccaaaaccattaccttcaacatctgggaattctgcaacaggtatgcctcctaacaaagatgataatgaacgagattttaaatatgacaataaacaaataggaaaaaaattaggaaagcatgttagtgattttggccgaaatccagctaatgcaactgatagagaatatgtattagctcaaattgaaaatattgcaagacatcctgataaagttgtaagaggaacatttgcaggacaaggtccaatgaatacaagaggcgcggtccaattcagaataaaaggccaagatgtcgttgtaactaaacctgacggaacttttgttactatattgagaaatgggattaataatccttcagttaagcaagcattaaatggagctaaataa

SEQ ID NO: 47021 - DNA, 450 bp, Acinetobacter baumannii
atgaaaaatttagattttctaaagggaagattactaaaagatgtgttaggtttagtatatgtcgaaaacaacataaacgccgaagatttggaggaaaataatattctgaaggttttattaaatttcgagggaagaaagattttaatagaatgtgatgaagtaggtattggtctgaaaatcaatattgataaccctgtgcttgaagaggtagacatgggagagtatggttttttaaaagtaattaatattagtaataaaaaggaatttaatgagattgttggaataagattgggtaatattaaaaatatcatatttgaggataataatgtcggttttgaattggagttttttaataaacgaagtaaggtatttattaatttaggagatgagttgtatctgtttgatagtataccaaaagctttgtgtgatgaaggctatattgttgaataa

SEQ ID NO: 47022 - DNA, 444 bp, Acinetobacter baumannii
gtggcagcaggagaggcggcacttggagtagtgggaggtaaggtcgttactaatgtttttagtaaagctatagaaataaatgatgccaaagacctcacagcagatcagaaatctacaattagttctattgtaggtttagcgggtagtgcagttggagcaacgacgggtgatattgtttctacagttcagagtgggcaagttgcgcagaatgcggtggagaataattacttaacatataaagaagctttaactaaagagcaagcaaagacaaagcttgctaattgtaataggactaataaatgtagtcctgatgaaattagacaggcagagttaacagtaaaattacttgactctaaagatcaaatcacggatgtaaaaattctagaaacttgtcgtacaaatccacaatcttctgcatgccagcaacagaaaaaagacttgtaa

SEQ ID NO: 47023 - DNA, 645 bp, Acinetobacter baumannii
ttgaatgctgaacgaaatcaagatttaggtttattgaagaatttaccacaatcttctatagtccctgtcgattatataaaaggcaatgaatttatctatgagctggcgccgactttcttaacaggattacaattaacaagtggaggtagtatttcaagtttaggaaagtattctggtgaaattattggagcaataggtggtgcggcagctggttatgtatctggcggtgatgctcaaagtgtagggataggagcagcagtaggggttgtaggagggagagttaatgagaaagtagttggaaaagttgaaagtacacttaaaaagggtggttatgatccattagcaataggaatggcaaaaggagcaactacgattggtatgggtggtgcgagtggtgcagggggaactgtgattaataattatgtcaataatgatcctttaaagaaagatgtacctaaatctgcagttgttggcgcattagtacctgcaatcagtggtgaagcggcagttactgcggcgggtgttggtagtaaaattcaaaaggttgtgagtataaattccgctgtagttggtactgcagcagaaaaaattcaaaaggtagcacctaaaaaagctagtcagaataataaagaaggaggaaaataa

SEQ ID NO: 47024 - DNA, 555 bp, Acinetobacter baumannii
atgaataatttagattattctgtaccctcatatatttataaagattctgacagaattggagtatttttagcttcagtaattggttttgtaggtttgttttttgttttaagaaaaatctatctaacaggtttttctgatataatgattgattttaattttgaaataattgttttattagtggttttggttggatggttttttatgatgctttcaggcctgtcttcagtatttccaatttatattgacaaccatggtggacattatagaaccttatttttaagaaaaagaaaccttaaatgggaagatgtaaataatattgctatattaaaaggaaagaaaggtaataaatttaaatataataccatcgtgtgtagtcgagatcctagcaaattagtatggtctatttctgtttcagaagatgatagttatgaggaactatataaagttattgactattacgttcataaatatgaaattgaagttacactagaaagtaccttagacggttctgtccaaagacttgatggaatgccaaagaagttggatttttcataa

SEQ ID NO: 47025 - DNA, 324 bp, Acinetobacter baumannii
atgtctagtaaggtactgaatgagttagaagaggtagttttcaaatatattaatgatgaaactgaattttgttattttaaaggatttataactgataaaagtaatgccttaaatgattttattaattttagacatgatctagtcatggtaatagagaattggtttgagtacgtggagttttgctatttagaggaaaactggaaaaaatatgctctagagttaggctttttcttgattgatggaattaaaaattatcctaatgaggtccatctaccattagaatcaattatcgtgaaagagcaattttctcgttatttatcctga

SEQ ID NO: 47026 - DNA, 909 bp, Acinetobacter baumannii
atgactttagtgaataaaacattggtctctattggaatgggattggcattaactgcttgtggtggttctggcagtgatggtggaacttggagtgctcctcaaacacctaatacggggtcaaatagccaagagcaaactgacagaagtaatagctcaggtactgtgactgcagcatttgttccgacagcaacggcaagtatgatgctaataccttttaatggtttcacattaggtaaaatggatgcaaatagagcagtacaaaagactgatggaagctataccaagtttgagaactatgagttaactggagataaaatagcagttaaagatattgcaggtaatcaaaattttgcgttagggcgttgggcatacggaacggccaatcaatataagtctgatggaacgctttcaagccaagacattttacagaaatcgcaaaacttatattggacgtatgccgtttataacgcatatacccaaggcgcgacttctgtgggtaaaaagacctgtgaggttagcgcatttactaaaccttatctgacgaattggggcgacggttcatcatcgactttaccaaatttagcaacctctactgctggtacagcagagtttgaacttttagccgatggaaaagctacttttaaaatcagtattacaacaacgaatggcagaagtacaaacactgcaacgtatagtccaggccaaaaagctgactttgctacaaattcaggcattattactggcgcaacaacgattgatcctacgtcaagtataaattcaaatggacaatttcttgtgcaagtgggccaaggtttaaataaagaagttctacttatcgcaagctatacaaatcagctttctgcaaaaggcgaacgttattcaggtcaagcagtatttacctgtaaataa

SEQ ID NO: 47027 - DNA, 660 bp, Acinetobacter baumannii
atgtgccaagcacagtctttatggctttgctgtgcctttttttctcccaaaaaagtatctcatttacaaacaacaagaatttataacggtaaaattatgcgaaatttagttctcccaacacgtgccttatacgttgtaaataaagcaattgatctgtttcatcaccgtggatttcaccttattggcgtcgacagaatagtgaaagaatcagagattacaaaagcgactttttataattattttcattctaaagaacggcttattgaaatttgccttgtggtgcaaaaagaaaagctccaagagcaagtggtcgcaatggtcgagtatgacttaagccctcccgcaatagataaacttaaaaagctttatgacttacataccgatgtagaagggccgtattacttattatttaaagccattttcgagattaaaaatagctatcccaacgcttatcaaaccgccgtgcgctatagaatatggctaaaaaatgaaatttatagtcaacttagattgcttaaaaccgatgtatcttttaccgatgccaaactatttttatatatggtggagggcacaattattcagtgtttagacaagaacgatgcgcatgaaggaaataaagtattagattactttttattgagtattttaaagatcaattaa

SEQ ID NO: 47028 - DNA, 606 bp, Acinetobacter baumannii
atggaaaaccttactgcattttcattatttgcaattgttgcctcaattactccaggcccgaccaactttataattttaagtttaagtagtcattataaaatttctaaaacacttcccgttattttaggttcttgtattggagcagccttacttgtattagtggttggtattggccttggctccactattcttgcttaccctgttattcaaaaaattatgacatggagtggtttaatctggcttactgttctagcttggaaattatataactacaatcctgttatctctttagaaaaaaatgaacaataccctcctattggttttaaagctgcatttttaatgcaagcgattaatcctaaaacatggatgatggcttttgcagttattagcgtctatacaaaacagggacaagatatcttgataaatgtctcaattttatcctgcatttttttacttatagcatttccttgtctctacctatgggccttagtaggtagactaagtactcggcttctttcaaaacccaaacatataaatatttttaacaaaataatggctattatattattagcctcagtctggtggcccatgttccctagattttga

SEQ ID NO: 47029 - DNA, 837 bp, Acinetobacter baumannii
atgagtagtaactgggtggatatttcaaaagataccaatacgggtatcgaaacaatccgtgctcattttactggtcatgcgtatgatccccattggcattcaagttatttaattggtgtaactgaatctggcattcaacaatttcattgtcgtaaaaagcaaatcaatagtcatgctgggcaagtctttatgcttgagccagaagaaattcatgatggacatgcgcctgcatctgatggttttacctaccaaatgctttatctacatccagaatggttaaagcaacgccttcaaggtttgtttcacaacagccccgatcattacgaactagtgattgatgcgccattaaaatccgatgaacaactcgcaatcattacttcacaagcatttcgacacttacactataaagaaatgaatattgtgaaagacaatagtctagatgtgcttattcaatatattgcccaaggtaaatggttaaaaaaagtttctcaatcttcttgtattcatgttccccacatcgcccatcaaatccgagatattctgcatgatcatttatttgaagatattgggttagaagatatatcacgtatggtgggactagaccgttaccatattcaccgtatttttaaatcaacttttcatttagctcctcatcaatatcttattcaactgagacttactcgagcacgtgatttactcgctagaagtatttctccagcacaagttgcttctgatttatgtttttcagaccaaagtcatttaagtcgttggtttaaacgctgttatggactaacaccagccgcttacagaaaaatctgcacaaatcttcaagattaa

SEQ ID NO: 47030 - DNA, 1152 bp, Acinetobacter baumannii
atgagtttattgcttaaagttcgacagaatgttccacaggtacagtcgattaaaacatctcttaaaaagcgtgctggtcagaaaatacctcacatgctctccaatgcatcagatctgttttttagaggatcggaaattgccctgtcaggaaaaacaccttttgatgtaatttataagcatgaaattataagccttcgccattatagaaatgagacagaggcttctgcacacaaacaccgtgtgccgttagtgattgttccacctttagctgtgaacatgctcatttacgatttgtttcctacccgcagtctcatacgttattttttagatcaaggcttcgaagtttatttaatagactggggtgtacctacccgaaatcaagccaaatacaattttggcacctacgtaaaagtctttatgcctgaaatgttaaagcaggtccgtatacatagtggacaacaacagctttcattacatggctggagtttaggtggcgcactttcactttgctataccgcgttatttaaagataaagatattaagaatctgatgattcttgcttccccgatcgacacacataaagcaggttatatgggtaagctctatggaagtctgactaaacctgcacagtgggtccgtaagcatacgccttttcgtattcgccaacatgtaccaagtgaagtgtttcatattcatggatggcaaaacacactcggttttaaattaacggatcccattggcaatttaaaaacctattggcaacttcttaaaaatctggataaccgagaatttattgttgaccacgctacctctagttcatttatcgacaatatgctggcctatccgggtggcattatgcgcgacattattttacgtttctggattgataatgaactctcaacaggtgtaatcaaatttggcgaacttacagcttatttaaaagatattgattgttcagtgttggctgtaggtggtgatacagacattattgtgaccgccgatgctgttaagccccttatggatttaattagtagccaagataaaacgttcaaaactgtgcccggcggccatatgggcgtagtgtccggtagccaagctccgacctctgtttggcctgaaatgagtgattggctgtctacacgttcagattaa

SEQ ID NO: 47031 - DNA, 570 bp, Acinetobacter baumannii
atgaatctactaaaagtttgtactttattgccttgtagccttgttattgctgcctgctccgttaattcatcaagcactcctcctacactgagctcttctacaccacaagttcaaaaatcatcgatagaaataagctgccaagacttacaaaatcctgcttaccgacaagctatgcttaatgcaattaatgaaattcgacaacatcctcgtcaatgtggtcagcagtatttttctgcagctaaacctttaagctggaataataatttatatcaaggtgcaagtgctcactctaaagatatggcaaataacaactttcttggacatgttggctcaacaggtttagatttaagagcgagattaaaaaaatatcatatgctgagtaaagccaatggtgagaatgtcgcgagtggacaaaaaactttaaatgaggtcatggctaaatggatcgccagtcctctgcattgcagtaatatcatgaaccctagatataccgaatatgccattgcatgtgcttctgaccagtctgctaaacaaagaagttactggacacaacaatttgcaggtttttaa

SEQ ID NO: 47032 - DNA, 2442 bp, Acinetobacter baumannii
atgaaaaattataaaaaagcattattggcgttatctatacttgcgaccatgccattgtttgctgatagcacaaataaacggattgaggttacaacttttgctgacgaagatggtgaaaatccaaatgcgtgttcattacgtgaagcaattaaagttgcagctacacgtaaatcagactatggatgtactatttttagcttagatgataatcaagctattcagttaaaagcagggacttatactttaaataaagaattagtaccaaatgcaaatatttctatctatggttatggagagcgcggagaggataaaaattggacagaaaaaaaccctctaacaaatgattatcctgctctaccagaacttaaaacacgtattaatgctgcgggtaagtcacgcatatttaatactgcagagaataaaaaggctttaactttacaaaatattattttagaaaatggtatagcttcaacccaaggcggggctatttatgcaggtggtaatgtcaccttgttagattcccaaattttaaattctcaagctccaaaaggtggtgccatttttctgggcgggagtggggtaaacttatcaataagccattcattactacagggtaatcaagctgttaccggtagtgttttagcgatgagttgtaaagaagaaccagcttatgctaaacgtgatatcactataacttcttcaagtattttcaaaaatggttcgcttaactctaagagtacatttgaattttgtggtgaaccaaacgccatattgacaattaatacgattgcaaaaaatatcgctgataagataaatggtagtattctaaaatttactggagatgccgttcctggaagtacaactaatccctcaactatactgagcggaagtagtagtttaaatttacagaataatacgattgttgagaacactgcacatactaccttcttatatgatagtttgggtataaaagaattaaggtttaatttaatagggtacaatctaggtagttacgcttgtcgttatttagtgggacctgctgcggacctaaaaaattctggttttacactatcatttaatgcattaaatttaacgaataacgttgaaaaatgtgatttaccaacagaagcacttacctcatctaataagactattgatattgcgaatattccttttagttcgttattagaaccgcaaagttctgcttcgccagaaacaggctttttacctgtttattacccattgaataacacctcatctccacaaaatgatttgatagatgtagatcctgatggtaaagatacttgtataactctagaccaacgggggcttattagatctgtaactaataagttatattatcagttaggtatcaagaatagttgtgatattggttcgattgagctaatgaaactaactgctggagatataaaagatttaggcaatgattcttttactgatcgaatttctacatatcaaactcgatatgataatgtacaagaaaatcttaagaaccaagctttttcatatttatggccagtattaaaaataagatcggtagaatataaaaatcttcttgatcaaactaaagcaaatgcaaagtatcgtgctatttatatagatttgaaagctaaaggattacctttacctaatgaaggtgctaatcacacattacaattctttaatacaactgattataatattaatgttgaaactattggaacaggtttaatagacgataaagtttataatattaaggataaagaagagaatatacttaaatgtgaatggaactctgctttacagcaaattatattttatcgtttagatgacagaattacccaagcaggtgattacaactattgtaaatatacagtaagtactaaagatggttctattcaatcgacaggtttattagaggctcgttttgataacattgctcctgtagctactaatgaaacagtttcatttaaatatttggctaatgaaattatccctataaatttacttaaatatgcaaatgatgatggggacggaccagcgaatactcttcaaacaaaacctaataagcctcaattttgggtcaatgataaaggtgttgagctaccaatttatcttccaagtaaaagttcaaaagatggtatttttaaagtagtaaaagcggatcgagaaggtccatgtcctaataatgataaagataatacttgttatggcggtaatatctatattcaagctagtaatgtatttaataccttcaacgataccttaacttattatgtatatgatgctgatggtaaaatctcaaatgagggtactattaagttggtaagtacagcaaccacaactgatgattcacgtggtggtggaggtggcggaagtattggaattctttctatcgtatcactactaagtttaattgcttatagacgttatcgtaagtga

SEQ ID NO: 47033 - DNA, 3999 bp, Acinetobacter baumannii
atgaaccagtttgtaacgaacacgaaaaatgtaattcgtggaaagtatcatccggaatttttgcagaatgaagtcttatccgatatttttgctcatactgcacaaactcttcctgataaaacggctttaattgaagcagataaaacgctgagttatggtgagctgtatcagcaagccttaattatggctcaacatctggctttaaaaggggtaaagccaggtcatattgtagggctatggctgccgcgtggtattgagcttttaaaagctcaactggccatttgtttaagcggtgcagcttggcttccttttgatatggatacgcccgcggaccgtattgcggtatgtcttgaagacgccgaagcggtaggaatgattactacagatgaatggtatgaacatttagctgaagtgccacaaacaaaatggaccaacaccgagctgcaaaaaacactaagcgaaagtgtaagtttagcgaaaaccactccagatcaacctgcctatattatttatacctcgggttcgacaggtaaacccaaagggattgtgattactcaaaaaaatatttgtcactttttacgtagtgaaaatagtattttgggtattcaagagcaagacaaagtctatcaaggcttttcagtcgcttttgatatgtcgtttgaagagatttggctttcttatttggtgggtgcaacgttgtggattgcaccgaagtcacttgtcagtgatcctgagcggttatgccaaaccttaaagcaggaacaaattacagtactgcacgctgttccaacgttacttgctttatttcctgaagacgtacctaatttaagaattattaatttaggtggggaaatgtgtccggactcactggttgaccgctgggcattacctcatcatcaaatgtttaacacctatgggccaaccgaaaccacggtttctgcaagtcttgagttattagaacgcggcaaacctgtcaccattggcaaacccttaccaaactacggtatgttggtcattaactctgaaagagagttgctcgagcaaggtgaaacaggggagttatgtatttttggtccaagtgtggcacaaggctatttaggacgacctgatttaaccgcagataagtttattgaaaacccttgggcaatgagtgtagaggaagaattactctaccgtactggggatttggctaaaattgatgagtttggtcaagtacactgtttaggtcgtgccgatgaccaagttaaaatccgtggtttccgtgtagagcttggcgagatcgaagctgcgctttgcgatattgacggaattggtacggcagccgttattcttcgtcctgaagacggcattgatcaacttattgcgtttattgcaccagaaattgatgcaaagcaagctatagaaattaaagaactacgccataacttgagtcagcgattaccgccttatatggtgccaaatcgttttgagattattgaagaagttccacgtctattatctgggaaaattgaccgtaaagctttaaaagcaagaccgctcacaagtgtggtagaccgcagtgaatctgaccagccacagaacccggccgaagaaatcctatttgaaattttgaatcgcttgttcccaaacatgccgattaaactcgattcagatttcttcgatgatttaggcgggcattcactactcgccgctgttttaatttcaaatctgcgtgagcatgcggaatatagccatctgaccattcaaaacttatatcaagcgagaagagtaggcgcgattgctgcactcatgttagagcagcctgaacctactttatttgatagccaaattggacaagataaccctcgtaatcagacctataaatggttatgtggtattgcacagctcgtaactattccggttttaatctcgattaatattttgcagtggttagcgccattctttacctatcactactttaccggtggaacccgcgacagtattccgtatgcgattgcgttgtctttattggtgtatgtcagtgttattatgagcagttttgtactgtcgattacggtaaaacgactattaatgttaggaattggcgcagggcgttatccattatggggattaacctatttccgttggtggctagcagaccgtattagtaatatttcacctgtctatctcttgtcgggttcgactttacttaacttatatttgaaagcactgggcgcgaaaatcggccacgacgttaccattagttccgtacatattcgtatgccatctttactgactattgaagatggcgtgagtattggttctcaggtgaatttagaaaatgccaaagttgaacatggtcatttggtattaggttcaattcaccttaaacaagacagttatgtaggttcgtatgctgtattagaagaaaatacagtgttagaaaaacaagcccatgtaaatgccttaacttcaattgaatatgacacggttgtacctgagggcgaaatttgggatggaacacctgctcagaaaatagggcatatagatgagcaatctaaattgccagagcgtcctaaactatcgtttatacgtaaaattgctgaatatggatactatggcgttagcgcattaattattgcctgtcttttctttattccaatttttccaagcttccttttggtcgactggttagatgtaaatgtatttaatattaacccgaacaaccatttgcaaatcgcgctttactatttcattttagcgattccggctagtgcaatgatgatgatgattactgcggtgatttcttcaggtctgcgtaaaattgcattgccgcgtcttgaaaccggaacctatgcggttcatggcagcacgtattatcgtaaatggtttgcggcccaaattttagaaacgagcttacaaaccttacatggcttgtttgccaccatttatgcgcctacatggttccgtatgctgggagcaaaagtgggtaaaaataccgaaatttctaccgcaaccggcgttattccagaaatgctgactttgggtgaagaaagctttattgccgatgcggtaatgctgggtgatgaagagattaaaggcggttggatgtctttaaaagcaaccaaaatcggtaaccgtagttttgtgggaaatagtgcttatattgctgatgggacagtgttaccagacaatgttttaattggcgtgcaatcaaaaacaccagataaccgtgaaatgtatgacggacaaacttggtttggttctccggcattgctgttacctgcacgtgaagctgctgaaaagtatcctgaccatttaacctttaaaccaagtattaagcgccgtttaatgcgcggttttattgaagggcttcgtattgtattgccggccgcacttgcgattggggtgggttatatgatcgtattagacgttattgatgtgattaataactacaatattgagacaggactggttgcattaacgctcgcagggctactttatggtgttggctgtttccttattgttgcgttattaaagtggattttgattggtcgctatcaaccgcgttcggcacctatgtggaccatgtttgtatggttaagtgaagggattaccagcctatatgaatcagttgcgattcctaacttcttaaactacttaagaggaacaccaatgttgccattcttcttgcgtattttaggagttcgtattggtaaagatgtttatatggatacggctgatattaccgagtttgactgtgtcagcattggtgaccgtgccgagtttaatagcttttcagggccgcaaactcacttgtttgaagaccgtattatgaaaatcgggcaagtgaacgtggggcatgatgtagtggtcaatgcgcgcagtattattttgtataacgcaaacgtgagcaatcatgcagtgttaggtccattaacactggtcatgaaaggtgaaaatattccggctaaatctgcgtggattggttcaccggctgtgccttgggttcataaataa

SEQ ID NO: 47034 - DNA, 906 bp, Acinetobacter baumannii
atgtacgcgccagttgagtccaacgaaggatttaattttaagcctgaacttccaacaagctcggcctattatcgtttgcttaagaagcttcgccgtcaagttggacatgccatccgtgacttcaatatgattgaagatggtgacaaggtcatggtgtgtgtgtctggtggtaaagacagttataccttgctcgacattttgttgcagttcaaacgtattgcaccaatcaattttgatattgttgcggttaaccttgaccaaaagcagccgggtttccctgaagatgttttaccacgttatatggaagaaaataacattccgtattacattttggaaaaagacacttacagcattaccaaacgtttaactcctgaaggtaaaacgtactgtgctgtgtgttcacgtttacgccgtggttcgctttatggctttgctcaagaaattggtgcaaccaaagttgcgctagggcatcaccgtgatgacatcattgctactttcttcttgaacttattccatggtggtagcttaaaggcaatgccacctaagcttttatcgtcagataagaaaaatattttgattcgtcctttggcttatgttgaagaaaaagacattatcaaatatgcagagttacgtaagttcccgattattccgtgtaacctttgtggttcacaagagaacttacaacgtgccatgatcaatgaaatgcttcgtgaatgggacagacagtatccaaaacgtttacacagcatttttggtgcgttacagaacgtttcaccttcacaacttgctgaccgtgatttgttcgacttcgaagttcttgactcgcagcgcgaattagactttaaagatccagaagaactgaaaaaacgtttagatgtagtgaacttaagctttgctgctgaataa

SEQ ID NO: 47035 - DNA, 1296 bp, Acinetobacter baumannii
atgagtacatctgaaacttttttaaatgatgaagagatttttgagttagtacgggatattccacttgatacttcaattatttatggtgaggaagatcaagaatttggtatttgtccatacattaccttttatatttatcatcaagataatgaagtggatgaggtagctaataaaattatcgatctttatgaagaatttgaaaatgaaataattgataagccctttaagttacgttatcgaaaatcaaaaagtggtgctagtacatggaaaaaatcagagagatggaagcagacccgacaagaaatgatagaacaaatgtacgagagttataaaaaatattttgtttattatattgcagcaacaacaggagactctcctgttcaaagtgcacgttgggcattttgtgctcaaatatttgaaggtgattcgagctatagtacggtaaagttatcatttggtgataagtggtttcgagaaaataaaaacaaatggtatgcatttattaaaaaatggctcataaaacttaatcctatacaggcttatagtggttatgaaattggtataacaacgaactttaattatgtttcaccagagtttgaaacagtagaacggatttttagtgattatttttatggtctagatattgaccatcctaatatgaatcattcacatgatgatccagatggctttatctataccccttctttagctgcaggaataagaaccccaacatggtgttttttgctttcaccttattggatagaaaagctagggttaagcgaggagcaaatccgcctaaaactcaatgatccacgaatcgagattaccaaattaccagatccagcagaccctgaaaaatacagtctatggattcgacttggagaattatcactttatccagttgaagagggtgttccagatttactggtgatggcaaatgagcttattaaaccaattcgttgtaatgatttaaaattaacgactttagatgcatgggatgatgatccaaatccaagatttgatatagagaactctccgcaatggattgctcgtttcgatgaggatagccattggcctgaaggaaaacgagtcaataaaattcatgcggtattgctagagcaaaatgcaattaaggtactaggcggtgaaatttgcccgaaaacaggtgaatggtatagccctgcaaataatatgaagaagcgctactttgcagaaggtgaaatcatgcctgagattaaaggtaacccttggggcgaaacgatttggtatttggaagttacaaataaaacagaataa

SEQ ID NO: 47036 - DNA, 999 bp, Acinetobacter baumannii
atgcttcctgtagtaattggaataattgaactagctggatatgcaataacggcatatgaattatatcgtacagcagcaaatgcttatgatgaggtcaaaaactatcaagataatattaaaaaggcaaaagaagaaatcaagaaaataatgaaaaatcttgataaggagatcactgacaaaattgatcggcaacgtgagaaagtattattaacgaccttggccacaggtgataaacaaactaacagtacaaagtctgcttctggaagaccacaagtaaaaagtaatgtaattactgctgccataaagcagaaaattccctttagacctattattagtcaaatatgtgaaaaagcagatcatttgccgatgatccagttaagaaaacaaaaaggtaaaaaattaaaagatgttataccgaagagtaaggtggatatcgtcgcgaagctattgaagatgactgctcaagaattagcaggtgcaagtgttgatgaatatattattattagattaaagcagcttgccgtaaacttcatgtttgagtttatggatgagcttttaaaatggcgtagccctttaaaagcagaagtatgttttggttatgatataaaaactaagaaatatttagcccctcaattagacggtcagacacgtattaaaagagtcggttcagaattaaatccattttggccgatgccttataaaggtaaaggtgtaattggtgcagatattattattcctgaatatcgtggcgagtctttaactttgactaatatttttgcattggttgaaattaaatttcagaatgatcggattgatgaagaacagtttcgtaattatgagagattaaaaagccaatgtgctcagcaaaagaaagccagtaaaataacagcaagtgagggctttaaattatcattgttccgctatcccgaagatgcatcaactacagaagctaaagactctaagcctacaacaccaaataaaaagcgtaaaaccaattaa

SEQ ID NO: 47037 - DNA, 2847 bp, Acinetobacter baumannii
atgcagatgagtgtgtcgagtatattggaacgtttaggccttgtttcacaaaatcgtgctgttcatatccaattctcaaatcagtctttaaatcagcaagtcttcttacaacgtattgaaggcgaacatacgcttaatcagggcagcgttgctgagttattgtgtctgtcgacaaacgcccatattgcattaaaacagtttattggctgtcaggttgctatcgatcaggtcaccgatacaggccagttttttagaacgacaggtattattaccgaagccagccaagggcaaagcgacggctcactcactatttataacctcaccttaaaagacccaactgcactctggcataaacgccgtaatagccgcgtgtttatgaataaaagcgtgcgcgatattagtgaaattctgtttaaggaatggcagggaaaaagcccgttatttgcctcaagcataacgctcgatacatccggcttaactaaagactacgatgtgcgtccatttgtgatgcagtcaaacgaaagcgattatgactttttaacccgtttgtggcgtagtgaaggcattaactggctggtcgatgagtcacatctttttgtcgctgacccgaatgcttctattcagccacaggtcttacgtttaattgacgataaccaaaattatcaggcacttgaacgccgtagcatccgctatcaacgcagcagtgcgacagaacagttcgataccattacccaagtcaaagctgagcgtcgtttacaaccaacctcggttcatgtgcaacgctggcaagccgatgctttgcaacaagaagaaggtagcggcagcgtacaaggcacccaaaagcacagcgaacactatgacaatgcaagcctgaaccttgaagatgcatggcatgttagcccagcgtggatgcaggatttaaacggggaagatcaagccaccgcttcaggcaatagccagattgaacagcttaaccagcacatcaatgcttaccatcacttgagttctaaacagtttaccgttgcagggaatgtccgtgatgcacaggtaggttactggtttgaactcaatgaccatccggaacttgaccaacatgacagtgctgataaagagttcttaatcttaagcaaacactactataaccagaataatttaccgaaagaattacaacagcaacttgagcgcttattaccacaaggcaaactcaaggcagcccaactcgacagtcaaaaccctgagcagcgccactttgctgaactgaacattgttcgtcgtaatatcaaagctgtgcctgaatataacccgctagagcaccgaccagccgctcacccacagcgcgctagagtggtgggtttagagggtgaaagcattcatgtcgaccagtggggacgcattaaagtccgtttcctgtttacccgaactgatgaccatagccatgatggtggagctggaagtaacgacaatgacaccgactcggcttgggtcgatgtgctaaccccatgggcaggggcaggttatggcgcacgtttcttgcctcgcgtgggggagatcgttgtcatcgatttctttgacggtaatattgaccgtccgtttgtggtggggcgtattcatgaagctgaacgtcacccgacccagtttgaccagaaaggtcagctacctgacactaaaaaactcagtggcattcgttcagaagaagttgatggcaaaggctttaaccagctccgttttgacgacaccacaggccaaatcagtgcccagctgcaaagtagccatgcagccagtcagctaaatctcggtaacttaagccatccaaaagacaaggcagaaagtgatggtcgtggggaaggttttgaacttagaactgaccagtggggcgcggttcgagctggtagtggtttactcgttagtacccacaaacaggatcaagcccaaggtgtacaccttgatgcaagcgaggccaagcaacaaatcgaaggcggcctcaataatgccaaggcacttagtgaagttgctaaaaatcagcaaactgatccattggaaatgcttgagaacttaaaaacgttcatagagcaaattgaagagaaagatcaagacaaagctgctgcttttaagcaagctttgatgatattaactgcgcctaacagtattgctctagccagtaacgaagacattcacttaagtgcagatggtcagctcaaccaaactgccggagatagcatcaatctgtctactcaaaagaacttgattgcacatgcccaaaataagattagcctttttgcagcgcaacaaggggcaagactgtatgcaggcaaaggtaaagtcgaaatacaggcgcaaggcgatggagctgatttaattgcccgtaaagctgttcaggtgatttcgactgaagacaaaatcgaagcgaccgcagccaaagaaattgttcttaccgcaggcggctctcaagtcaaaattactggttcaggtatttttatgaccacgagcggcaagtttgaggtgaaggctggacagcatgtgtttatggggggagggagtgcgaatgctaatgttcctgcattgcctaaattggagtttgctcaatctccgtattctgctcaatatcaattatttaaagcagatggtagaaatttccaaggatataaatattttatccatgattcaaaaaataatttaataaagcaaggtattactgataatcaaggttttactgaacaagtagtgacagagagtaaagaaagaatcataggttataaatctgtaatgagagaaagtgagcgtattactgagaattgggaagcaaagttagaacaggtagctaataaaatgagttcagtaggaaaataa

SEQ ID NO: 47038 - DNA, 693 bp, Acinetobacter baumannii
atgaaaataaaaaagtctgctttttatatatttaccatgattttttcgcttcattcttcagcatttgctgagccgagtgttgctgatgttcaatatcgtgcacagcaaggacaaccgattgcgcaatatcatcttggcatcatgcttttaactggtgaacaaggtgtcgttaaaaactatgaacaagcttttaaatggttaactgctgctgaccaaaatggaagcgtgggggcaaaatatagtttaggaatgatgtatttcacgggtacaggcgtggaaaaagacatgaaacgcgcttttgaatattttgctaaagctgcggataagggccatgccaaagcgcaatataacttaggggtgttatatgacagaggtgaaggaactgcgcaaaattatgagcaggcttttgaatggtatagtcgtgctgcagagcaaggctatccgcccgcagaatataatttagctcatctatataaaaaaggtcacggcgtcgctcaaagcgatgagcaagcccttaagtggtacaccaaagcggctgagcataatgaaagcgatgcccagtacaacttggcccagatgtatttaaatggtgaaggcacgccgaaaaacctacaactggcaaagaaatggttccagcaagctgccgatgcaggtgattcggatgcgaaagaaatgcttaaaagtttagattaa

SEQ ID NO: 47039 - DNA, 510 bp, Acinetobacter baumannii
atgaccgttattttggtaaaacctcatttgagatttaaagacagctataacgactatatcaatgaattagcagatgaagatcgccaccctttgacaacagagtttgaccatacagattttgaaagttttttgaataaactaagagattatgaaaaaggggagtccctagaagaagggcatgttcctaacattacatattggttagtagaagataatgaagttattggtgcatctaacttgcgccttaaactcaatgaacagattgaatattgtggtgggcatattggtttaggtattcgtccctctaagcgtggacagaattttggctcgaaattgttggaacttacaattcaggaagcatggaaactaggcttaacagagttacatatacattgctataaatctaatttagcttctgcaaaaaccattcaagccaacaatggccgccttcattctgaaattactctcgctcaagtggttcaaagatatgtggtatataaaactctataa

SEQ ID NO: 47040 - DNA, 1707 bp, Acinetobacter baumannii
atgaaagatgaaattttaaaaaatcatttaaaattattttcagagaagtttggttatagtgatttaaatgaaagtcagcaatttgaacattttgtaaactttaatattatatctaaattatatccacgggaaatagatatagatagcttatcatcaggtggtagtaatgatttaggtattgatggtgttgctattattattaacggtaatattgtgactaattctgatgaaatagaacattttagaagaatggggagtttggatgttgagtttattcttattcagtccaaaacttcctctaagttttctggtgagcaaataggtacatttattttcggagtaaaaaacttatttgatgataaaagctctgttattgaaaatgcttttatgaaaaatataagggatttgaaagataatatttattctaatacattggattttgatgttaacccagagttaaaattatactttgtaactactggtgaatggaaggaaccagaacagattactggtcgcgttaatagagagcttaaagacatatatgataagggtatttttagaagtatccctaaaatagaattttatgatgctgagaaactaaaaaatagttataaggaaataagtcgaaaaactattaaagaaattaaatttaataatcatgttgcactgcctgatttgccagagaagttgaatgttagacaatctttaattggtagtgtaagtataaaagactatattaaacttatatcagatgaagatgataggttatttaaaggattgttttatgataatgttagggattatcaaggccttaataaggtaaataaagaaatcaatgaaacattgaatgataattcaaaaaaatatcttatgccattattaaataatggtattacagtaattgcaaaaaaagttgataaggttgggcaaaaattaaaattaacggattttcaaatagttaatggttgccagagtagtcatgttttgtttgacagaaaaaatgatattgatgaagatcttcatattattgtgaaaataattgaaacaaatgatcaagatgtaataaatagtattattattgctacaaataaacaaacagaggttaaagatgaagcatttgaatcaataaaaccatttcatagagaacttgatgagtattttaaggctaaaactgatttagtaaatgatccaatttactatgaaagacgctctaaagaatattttaatgatcctaatgttaagaatcatcaaattgttactttagcttatctggttaagtcttatgtggctactgtgttagcacaacctcaaagtacacatagatatttcggtgaattaattgaaagtaatgaaaaaagtatatttaaaaataataaaaatataagtgattattatatttctgctttactttgcaaaaaaatagatagtttatttagattagggttgttgtatgagtcatataaaaattataaatatcatttgatctatattatctattctaaattttctattgaaaataaaaacaatgatgaaattatttttattttgaatgagcaagataaactattttggtatgcaataaatgcttgcaaaataattgcgtggacttctaagaataataatatgatgaatagtatgcataatgttagaagtaaagattttactttaaagctaaaagatagtttgagttcttttgtttttaagtag

SEQ ID NO: 47041 - DNA, 618 bp, Acinetobacter baumannii
ttgaactataatattcttttccctaaaataaaggtaaaatctatatataatatttctccttttgaggatgctgataataaatataatagttcctcaaagaaaattattgctgtcggcagacttgcagaagaaaaaaattttgtatctttaataaaagcatggtcattaattgagcacaactataaagattggtccttaaatatttatggtgatggcgatcaatataatactttaaataatcttatagcttcttattctttgaagagaataagtttacacccaaatactcaagatatttcttctgtctacaaagagtcttctttcctagtattaagttcaaaatttgagggcttaggtatggtcttaatcgaagcacaatcctttggcctaccaacagtggcatttgattgtccatatggtccttctgaaataataactaaagagagtggtattttagttgataatcaaaatatagaggaattagcttcagcaattgaaaaacttattaattctcctgaaatgcgtactgtaatgtctagtaaggctttagtagcctcacaaagatttaaatcttctcaaatatttctacagtggaaagaggtcttggatacattatga

SEQ ID NO: 47042 - DNA, 870 bp, Acinetobacter baumannii
atgaacagacataaatgtatggctgtatatacacaaaagctgcaactggtttgcgattatattcaaagacatttagatgaagacctagatgtcgatcggttgagccagattgcggccttatctaagtttcattttcatcgtatttttgccattcacgttggtttaaatgtgatgaagtttattcaactttctcgtttaaagcgggcctcttttcaattggcttttgaacccgatctcaaaattattgagattgccttgcaagcagggtttgatagtccagaggcatttactcgtgcatttaagcgttcatttgatcaaactcctagggcttttagagataaaccggactgggaatcttggcgccagaagtttgtttttacgattccaaaaagtgagctaaaaatgaatgtaaatattattgagcgacctgctgaaaaaattgcctatctgtcacatttaggaagtcccgataaagtttttgaaacagctgcgcgttttattgcttggcgcaaagaaacaggtttatcacctgtaaccaaatctagaacttatggtattccatttgctgaccctgagcagataccttctgatgagtttcgatttgatatcgctggtttaattgaaaaagctgtacctgaaaatagttacggcgtacagacaggtgaaattcctgcggggcgttatgcaaccgtaagacattttggtagccatgaccagattaaagatagcgtctattacatctttagaaactggttacctgagcaaccagaagaagcgggggattttccattattctttcactatcacaactttgtacacgaagtgaaagagtgtgaccttgttaccgacatctacttacttttaaagtga

SEQ ID NO: 47043 - DNA, 1740 bp, Acinetobacter baumannii
atgcaaaacaaaattttttttactcacgctttttttcttttatatggggtagctacgcatgcttatgctatcgatgatatttctttaccagatcgtatacgtcaggaacaacgtttaaaagagcttaatcaacaattagaagcgcaaatcactcaacttccacctaaacctgtcactacccaattgcaggattttaagactatagttgttccggaagagccatgtgttcaggtcaagaatattaattttgatagcaaaacgttacaggaccctgaatattataaatttcactttatgcttcgggcaatctggaaccatccccagaagatcattggcaaatgtatcggtacgcaaagcttacataacctcgttaattttgcccaaaatgagttgattaaaaaaggatttattaccagtcaggttactgttgaccctcaagatatccagcaaggttctttgcgacttggtgtgcagattgggcgcttacgtaaaatcatcgtagaaggtgagcaactctccttattacaacttaaagcagctttaccctttaaagaaggtgatgtcctgaatttacaacaacttgatcaggggctagaaaacttaaaacgagcttatacggtagatatacaaattttgccgtcaaacgagtctgttcaggaaactcaaggttatagcgatctggttattaagttacaggcacattcaaagatcagtttaaatttaggcttggataattcaggtagtaaagatactggtaaatacatcggtagcttaggagtcagtattaacaatccattctacttaagcgattctctttcctttaattttagtcattcattagataacttacatcgagacttaaataaaaactactttgtaagttatcagcttccgttaggaaactatgatttcagtactagctatagccgttatcaatacgagcaaaatgtattgggtgcaaatagtgtactacgttatcacggcttaagtgagcagggtaacttgaatgtatctcgagtccttggccgaagtgggcaacataaaaccagtctctatggcaagctctaccataagcaaaactcaaactttattgatgatattgaaattgaagttcaacgtagaagaacgtcaggctggaatgcaggaatacaacatcggcaatatctgggggttgctgtattagatgcaggcttggattatcggcatggtacaggtgcctttgatgcattgttagcaccagaagaacaaattaaggatgttgataaaaatccattaccgccagaagggtattcccgtgctccgatctggagtgccgatttacgttttcaaatgccatttcagcttttggatacgccagcccaataccgtctgaactggcgtggacaatatgctccacgagttttagtgcctaatgatcgtttttatatcggtggtcgttatagcgtccgaggtttcgatggtgaattgatgctatcaggcgataacggacagtatttacaacaggaaatcagcgtaaatacacaacttcctaatactcaattttacatggctgtagatcagggctgggtgaacggtgagaacagtattgccggacagcgccatctgatggggagtgtcgtaggactacgaagttatctgaaccatttttatattgatgcctttacagggcgaggcctaatcgcaccaaagagtataaaaaaagactggattttgggatttagtctaaatgctttttattaa

SEQ ID NO: 47044 - DNA, 5697 bp, Acinetobacter baumannii
atgaataaaaatctttatcgaatcatttttaacaaagcccgtaacatgtttatggcagttgccgagaatgtcagaagccagagcaaggcggcagggcaatctagttcctcagaaatagtgagttatgggcaatcatcgggacaagaaaaatcatttcatcaactgtggcatgtcaaggcattagtgacaagtatgagcttattggtgccttttgctccagtctatgctgatatcgttgcagatagtgcagcgaatgctgcaaaccgagctgtcatagctgctggtaagaactcagcaggtacaactgttccagtggttaacattcagactcctaaaaatggtatttcccacaatatctataaacagtttgatgtattggctgaaggtgctgttttaaataacagccgccaaggggctaccactaaaaccgtaggagcagtggcggcaaacccatttttagcgactggtgaagcgcgtgtcatcctcaatgaagtaaattcatcagccgcttcacgttttgaggggaacttggaagttgcagggcaaatggcagatgtcattattgccaacccatctggaattaacattaaaggtggtggttttattaatgccaataaggcaatttttaccacaggtaaacctcaattaaatgccgatggtagtattaaacagttcacagttgatcaaggaagaattacggtttcagcaaatcctaactctaagtttggattagggggaaataataatgatgcaaactatgttgacctctatgctcgtgcattagaacttagtgctgagctacgtgccaaaaatgatattcaggtgattgcaggggcaaataatgtcagtgcagatttacaggaggttacagctaaaacaggtactggaactgcaccggcattggctgtggatgttaaagcgctgggtgggatgtatgccaacaacatctatctgatgggtacagaaaagggcttgggtgttactaatgcgggtacacttcaggcagtcaacaatctggtaattacaagtgcagggaaaattgaaaataacggaaccatcaaaactacaggtagccaaaattctgtattaaatttatctagtcaaaataatggagattttacctcttcgggggcaatccaatcaaatggcaatatatttataagttcagatagaaacttggcattgaatggagggaaaatagataaattaggaacaacgttaagctctattttcttatcggctaaaggagatgttagcttacaaaatggtgtaaatattcaaaatgctggagtcggagggggcatctatagtgactcattgaatttcaacttaggaaaggacagcaacatcttaagtcaaggtgatatttctctattagcaaacaataatattgatatacaaaatggaaaagggatcactagtaataatgatcttaacatccaatcaaaaaataatttaaatattgctaactccagcattgagtctaaagctggaaatgtaaatttaataagtttgggtaatactgcaagttctttgttaggtattaataataccaaactttatgctggaaaagattttaatattaagggtgcaaaaaatataaaactaaatagctctattgttcaggaaaattctaataatataaatctatacgctgataatgatattgagatcggtaatgatgtcagtcctgtgagcttaaaaacacaaggtacgataaatatagctgcaaaaaataatcttatccttcgcaccgatacaagcttactgacaaaaaaaaatattgatgtgcaaactgacatcggtaacctgtatgcaaaaagtctcaatgtaagctcatctgaaggtaaagtttcaattttggggaatgggaatgtaaatcttgagactcaaaatgatggatggtataccctaaaaaatagaataaatgcaaaaaatggaattatcctagggtcaaaaggcgaaaatgctattacaaaaataaatacggtggatcttaagtctacagatggaaatgtattacttctttctggcggggatctaacactagatggcaataatggctataccacgggtatgaaagctgcagttgcatcaggttttattaatgcaaaagacgtaactttgtggagtaaaaccggagttttagatataagcagcggtgtaattaatgcatcgaatggtggaatatcaattcgggcaggaaacaatgctcaagtacatgatattgatttaaactccacaaaaaatattgaaataaactccgataaagatcttatattagaacgcacaaataccagagcaaatcaacatattgccctaagctcgaaggggaatatcaatgcttatcaaaattatattttagatgctaaaggtgttttatctgcaattagtaacggaagtattgatgggcaagggtatggtggagcagttattgttgaggcaaaccagctatcgaataacggaatagattttagagcaactggaagtgagttacttcaattagatactaaactaaaaaatataaacggtaacttgtcgattcagcttaataaagactttgtcattaaaccaactcatgggcatgacacaatcacattagttgcagaaaatgatattgatgttcggtctaaacaaggagccataaggattgaaggtgaaaattttgcacctaatctaaatgaagcaggttttgttggcatcatctctaggaaaggtggtcttagtttagaaggtacaagcgtcgatattaaaggaacaaaaataaatgttcaaaaagatatcaatatcgtttcaacaaagggagaccttgtgattgatgggattgctgataaagtcaatggcgtatccaagaagaaagatttaatcaacagtcaggatgatcaggaaaagaaaaattttatcgctaacacaatcactggggtggaaaactttaatagcgagttatctacgaatactggaaatattaatatatcttctaaaaaaggagtttcaattactggcgcaaatattgatgcaaaacaaggaatagttaatattcaagctcagggtgttttaaatgggaaatatcgagctactgcaaaaaaagaagggaccactgcaaaagaactaagtgcaagtattattattgacggtaatttggatgtatacgaaaagggtaacgagactgaccagaattacagttatagagagtatgtaaatccaacgaatataaacggaaataaaggggtaaacatacgtgctatagggaaaactgttaatgacaatttagtactgcaaggtgtagggattaattctgctcaaggtgatgtaaatattgaagcagataaaagtatattgtttgatacggcacttgaaactttatatgaccgtagtacaaaaacagaaacgaaaagatcttggtatggtaagaaaaaaactaccaccacaacaacgattggagatgttgtaacacctgcttctgttgatatttatggtaagaatattaacgttatcagccaatttaaaaacccgttacgggcagatggtacaagagatcctgctttgaatacatctgtagatatttattctgcccgatttaatgctaatggcggaaaaatttcaattcgatctggcggagacctgaattttttaactgtagctgctgtgaataactcaaacgtaaatcaggttaaaaaatcttcatggttagggattaatcttggtacgtcaaaaaccaatgcaaccagaaatcaaactacagaaatacctgcaaaattaaaagctgattatattggtacaaaatcaggatatgacacaagacttgaagggaccgagtttacgtatctcaaaagtgctacaattgaggcagggggaacgattactttagttcctgcaaagaatctagttgaagaaagcctaaatagaaaaaagaactctgttgtctggcagtctatgcaggacaaaggatcaattactgaaactgcacagctccctaattttaatggaccacaacccccagtttttaatgcagcaggtggtttaagtgtacaagttcctattagtgaaaaagatgttaataaagtcgaattacgtgatgcaattttaaaattagcaaatcaaccgggaagcgcctatcttaaagatttagtaaaccgtaaagatatagattggcaaacagttttattaacccaaaaggattgggattataaatcacaaggtctcacagcggctggagctgccattattgttatcattgtgacaattgctacgatgggttcaggtactgctgcagcggctggagcagcggggggaaccgcagcaagtggtacaactgtaggactgggtgcaagtatgcttggaactgctggagtgacgactacagcagcaggagcaattgttccatcaacattaggggcaatggcaaatgcagcagttacgagtctagctgctcaggcaagtattggtctgattaataacggtggggatattggtaagaccctaaaagagatgggaagtaaagactccattaaaaatctggctgcatctgtggtaacagcaggtttattaagtcaagttggtactgctctaaatttaaaaccagacagtactcttctgtcagacagattggcaaacaattttgcatcttcagtaggatcaactttagtacaaactgcaattaatggtggagatctgggagataatttacaggttgccttacttgcaggtctagcaggggcattacaaggagagttggctagtcagattggaacgagtttagataaagtcgatccgaacatatttgaatatacaattcataaaattgcccatgctgttgtggggtgtgctacggcggcagctacaaaacagagttgtgaagcgggtgcaattggagcaggggttggtgaaatagttgcagagcttatgattccagcgggtaaaactgcactcgacctaacagatgccgaaagaacaaaaattaaggatacaagtaaacttattgcgggtacgacagctgcttttgctggatacgatgttaatactgcggcaaatagtgcgaatatagctgttgaaaacaacacattgggtaagcttgcaacaaccgcaggaaaagcggcatatagagtagctaaaagaattactgatatgccagcctcagtaagagcaaatcttaaacccgacgatgttattaagatttttaaggaagaaggtgttcagggagtaattgatattggggacaatatcaaaactttgattagccctacatccacacctggggatagagcatttgcagcaattgatttgctaataggtattgatttaaaagcaggcaagaatgttgatattctgaaatccgaaaagaatataattggaaaaaattattctgctgggctaaatcgtgaaattttaaataaggcaggtgatttttatccgaatgtacccgatttaagaacaggaagaactatatcatttccagttggtgacttaaaaaaagtacctgaattaagtcgtgtttcttggggagcgcaagaacgtggtaagtttattcaggagtggtataaacgaggttatgaaactccgcgtggtggttggtctgaatatgatattcatcatattaaacctagagagtttggtggaacaaatgaattctggaatttaacacctgtgcaaagaaaaacacatcaacaggagtttaattctttttggagaaatatgtaa

SEQ ID NO: 47045 - DNA, 525 bp, Acinetobacter baumannii
atgaagctgttaaatgaagcattaagaaaaatagagactctttggagtaaagagccaaagcatgctgttcatagaggagaaaaaactttttttcagtttcgttgtattttgaataatggtatttcaccagatagatttggtgatatcgatttgcaattaccaacagagtttaaggagttccttttagttagtaatggggctgatttattcaaggatgaggaatatgggcaatggggagcgagaatatttagtattgatgagttacagtcatctaataaatattatagagagttaagacctaaagacttcactaagggggatttgataattggtgagttttatggtgattcagatttgttactgttaaggtgtgatcctgaaagtaaggattatggcgctgtacttatcgctttaccttttgataatcgctcagattggtattgttcagtcaattttgaaaattttataactgactatgttaattctgagggcgataaattttgggagatacaaacaaaaaaataa

SEQ ID NO: 47046 - DNA, 1344 bp, Acinetobacter baumannii
atgctttataatcacataaaactattacccttagcacttttttctattcttttagctgcatgtggtggtggaggtagtggggatgattcagcgacatcagatacacctgtaccgaagcctattgtagaagcgtctgtattaagcccagatttggcacatggctattttgaaattgaaaattcaggagttactaataactcaactattaagttctcaccatttcatacaaacagtgtaattgaggtatccgcttcaaataatagtatgtgggatttagagattcttactccaagtaatgatttatctgcgcatattaacaatttggctggtctttatttttatcccaaaagtgataaggttggagttttgagctattcagagaatgataaaggccatttggctgtccaatgccgaaactcatgtagtgatacattctcttataaattcgaaaaacaaagtgatggtaaaacttactttattataagcgcaaatggtgctgtatcagggcgtttaaataatattgactttgcttcgactgccaaaattaaaggctctattaaattcgaagtaaattctgattggccagtatggaacacgaaacgttttaatgaatatccagctaaatcagatttagttgttaatggtaagctggcgacaatacaaagatttatgaattggacaaccagttctgtcttaacttttaacacagataaagaatattattttaacttttctaatcctctggatcctgaacatgataggttcatattaactgagggaaattattttagtaatgaacagccaaaagaagtttatatatacaaaggatattttaatcaggattttatattaaatacagattatgaaaatggtctaactacctttaaatttatcaataattcatttactaaccctattgaatatgttgcatctccacagttaaaggtctcaggtggtttcgagaaaaaaattccttatgggcaagttacagcaggaagtgaagtttttaaaattgatgagacagttgcggcagctgcatatgcagaaaatgaaagtaaatattttcgttttatgagtagagatcataagtctgatctcgagtttacggtgaaatacgatactattactaaaaaagcaaatgtagcgtatcaaagacctaaaaaagatcaattgaatgtaaatattcatttgaaatggaattgtaaattgacaaatgatcattgtactggtgtaactgtcaatgagtcagaaggaaccattgaatttaaaaatgtgcagttagatgatggtcgtatcataaatggtaaatttgcccatctaggggtaaatgatctggtaggctga

SEQ ID NO: 47047 - DNA, 1260 bp, Acinetobacter baumannii
gtgattaaagaaattttactggccgatacccataactatcacggtattttagatgaacgttttattgatttagctcaccagttcagccgtcttcaagatgctagaacaggacaaggtggagctgctttagcggtttattttagaggccaaaaagttgtagatatctacaccagtctaaaatcacaaactgaagcttggcaacctgacacattggcagtttgctactctacgggtaaaggtgtacttgcaactttagcgcatattttggtaagtgaagggtttttagaatacgacaaaccgattgcgacctattggcctgagtttgctcaaaatggaaaagagcaaatgaccttgcgtcatgtgctaagccatcaaagcggcatgtttgatgttcgaaatatcatcgaaagtgcgagagaaatgctcgactggtcacatatgttagatgtggtcgcggcgactaagccaagattccttgcaggagagggcaatgcttatcaagctttaacattcggttggcttgtcggtggcgtacttgaaaaagcaactggtcaatctctagatcagctcatgcaaaattatcttgttgagccattacagttagatggtgcttattttggaacgcctgcaaatgagttggatcgtgtagcacgtttaattattcaaccaaaaccagaaaaaccagcgtctactcaagttgaaaaacctaaaaagccacagacgcgtaagagttcactctctgaaaaagtgattacatggacgggtcaagacccgcaagactttcaggatgcgatgattccaaaaggaatgaaaaattttagtttctttagtgatgagggactgcaagcagtcattccggcagcgaacgggacatttactgcaaatagccttgctaaaatttatgcgatgctagcaaatcaaggtgaatgggatggacagcaattgattcgcccagaaatatttaaagaacttagtactattcaaagttatgcacgtgatcgtgtcatgccaataccgatgaattggcgcttaggatatcaccgcattattaccatgggtaaacgagctaaaaatggatttgggcatattggttacaatggttcaggagcgtggtgtgatcctgagcgtgacctcagctttgcctatacccataacttccagattggttcaatcacaggcgattatcgtttgtgggggctgactcaagaagctttacgttgcaccgaccaaattttaaaaggccgtaaaggttggttctaa

SEQ ID NO: 47048 - DNA, 1440 bp, Acinetobacter baumannii
gtgccagaaattgataataaacaacctaatcctgagtattcattaaaagttgattgtgcatcagctttgaattttgttttacagcaaaactcagtaccccttattcgacaagttctaatctcttcaactgaaacaatttctggttctcgaatcgttattcgatctaatcctgagtatttcaaagaacacaccatcaatattgcgaacttggaaggcaaccaagtcttggctcttgataaaccaaaattagtttttgatattaaattattgcaagaaatacccgagaatattaaagggaatatcgaagtagtttggataagtgaaaatgaagaactactagcagaacagcagatagaaatcgatgtattgactattgatacttggggtggagaacgtcagccaattgagttgttggcaagtttttcgcagcctaatgcttcagctcttagtccaattcttgttaaagcgagtgaagttttaaaaacaaaaggactaggttcattaaatggttatcaagaccgagatcgagattctgttttatctcagctgaatgcggtttgggaatctttattacaacaagatattcattatattgttaacccagcaagctttgttaaatcgggccaacgaatccgtttggcaaagcagatttttgaagaaaagttagcatgttgtttagacacgacaatacttttaagtgccttggctgaacaaataggcttagatactttacttattattgaagaaggacattcgtatcttggtgtttggttaaatgagacgccaaatgtcgatttgatcattgatgatattcaagctttaagaaaacgctatgatttaggtgagatagtctttatcgaaaccacgttgcttacgcaacaaggcaaatttataactgcactagaaactgcaaaacaatatataaaggatgaatctcgtcagaataagttttatcttgcgatagatgttcgtcaatcccgtttacgtggtattaagccgatttctgcaaatctggaaaagaaaaatcatttggatgatacagagattgaatgggcgacagcatctattcctgtttacgataatgagcgccctcttgaaaacaaagccacacgtgttgatcgatggttacgccgtttattggatttaagccttcgtaacaaactcttaaattttaaagataatcgttacagcattccattacagtgttctgaattaacacttagcaaacttgaagatgcgctagcaaatcaggaaggtttcttatttaaaagtgttgatagtatttctctaaaagatgttcaacgcgacaacgaaagccagcatattaatcaatacgttgatgaaaacctttctaggaaattattatttagtcctttagatacacctttattagaaaaacgtttgattgaagtctatcgtgcttcatttttattattttaa

SEQ ID NO: 47049 - DNA, 159 bp, Acinetobacter baumannii
atgaaagagggcaaaaggataaattctcttttgcccttattttttaatatcttttttctattagagtatttgcgtaaattctgtaattttagtgagatagctttaccaaatagtaaaaaagtgcttgaagttattgctaaacttaaaatattcctataa

SEQ ID NO: 47050 - DNA, 654 bp, Acinetobacter baumannii
atgagctaccagaaactcagccgtgaccagattgcacaacgtgtggcacaagacattccagatggcgcctatgtgaacctaggcattggtttaccgaccaagattgccagctacttacctgctgataaagatgtctttctacattctgaaaatggcctgttggcttttggcccaccgccagcggcaggtgaagaagaccctgaactgattaatgcaggtaaagagtttgtgaccatgcttgaaggcggcagctttttccaccatggcgattcatttgccatgatgcgtggtggtcaccttgatattgcggtgcttggtgcatttcaggttgctgcgaatggtgacttggcgaactggcacacgggtgcaccggatgcgattcctgctgttggtggtgcaatggatttggcagttggtgccaagaaagtatttatcactacagaccacgtcaccaaacaaggtgagccgaagattgtggctgagctgacttatccggtaacgggcaaacattgtgttgaccgtatttatactgacctgtgtgtgattgacgtgactaaagatggtttaaaggtgattgagaaagttgaaggtcttagctttgatgagttacaggctttaaccggtgcaactttgattgatgcgactcaagggtaa

SEQ ID NO: 47051 - DNA, 672 bp, Acinetobacter baumannii
atgattgacaaaagtaagtcctcactaagcgaggttttatcgcagattaaagatggtgcaaccattctgattggtggttttggtaccgcaggacaacccgctgaactcattgatggtctgattgaacttggcgttaaggacctgaccattgtgagcaacaatgccggtaatggcgattatggtctggctaaactgctcaaagccggttcaattaaaaaagtgatttgctctttcccacgtcagtcggactcttatgtgtttgatgaactgtaccgtgccggaaaggttgagcttgaactggtaccgcaaggcaatctggcgtgccgtattcaggcagctggtatgggacttggggcggtgtttaccccaacaggctttggaacacttttagctgaaggcaaagaaacccgtcatattgatgggaaagattacgtactcgaatatccgattaaagctgactttgctttgattaaagcctacaagggcgaccgctggggcaatctggtttaccgtaagtcagcacgtaactttggcccgattatggccatggctgctgatgtcaccattgctcaggtttctgaagtggttgagctaggtggattagacccagagcacattatcaccccaggtatctttgtacagcacgttgtacaagtagcgccagcacagtaa

SEQ ID NO: 47052 - DNA, 930 bp, Acinetobacter baumannii
atgcagcaaggttccatgaagctcaatatttctttaattcaacttggttccttgtttgcatttatctctgcatttctatttagcagtaaagcaatttttattaaacaggcatatagccttactccatcattagatgccattaccttaatggctatccgtatgggaattgctctacccttctttttagttatctgttggttttgtcgccatcaaaatcgcaatatcaagctaatagattttctatatctactttctgttggcttgttaggctattacatttctagttggctcgatttctatggactcatgtttattaccgcgtcactagagcgaattattttattcttatacccaactatgaccgttttagcgtcgagttttatcctcaagcaaaaattaagttcaaaaacgatatttgcacttatcttaagttacggtggtacagtcattgttatgctacaagagcaaaaaacgcttccggatcaacataacttctggtttggagcaagcttagtatttgctagtgcagttgcttttgcttgctacctcttacttaccccaccattaattaaaaaatttggttcatggaacttaacgggactatctttatctgcagcttgtattggcacacttatacattttctaatggtaaccagtcatcctgtacaactacttagctctttacctgtacaagttatttggtacggaatctgtttaggtttatttgttacagttctacccacactcttattaatattgagtatagagtatgtaggtgcaacacaatcagctattatttcatctattagcccaattgttactattcttttttcagtctttcttttaaacgagcatttaaatacaatccagtggctagggtgttttcttaatatttttggtgtaatgctcatcacacttaaaagaaagtaa

SEQ ID NO: 47053 - DNA, 909 bp, Acinetobacter baumannii
atgagccgccaaatctcaactttaatcggtgtttcagctttattactttggtccactttagttggcttactcaggctttctacagaaagttttggtcctatctatacagtgacttatgtatataccatcagtgctattattttattcttaacatatggtctgcccgatttaaaaaaggtttcaaaaaaatttcttattttatctagcttgctttttgtcgtttttgaactgtgctttgccttttcaattactctagcaaattcatcagaaaaatcgattgaaatgaatattatttttaatatgtggccgactttaattattattatgttggcagtattaaaagaagaaaaagtaaacttattgaccatattaggagtgatcgtaagttttgcaggtatagttgtaattaactatcatccaaatctaaactttattgataacttctctaaaaacccgattagttacttgctcatttttttagctgctattctgtgggctgtttattgtatctacaccaaaaagcaaagcaatgggaccaatgctgtttcgctttattttatattaactgcaatagcattatggattcttactctctctactcaaggtttccacctaccccatgctcaaggtattaatggctatatattcgtcttaattaatgctgtttttttctctatgggttatctggcttggaatattggtattatcaaaggcaacatgcccgttttgattatgctttcttatttttctccaattttctcatcagcattctcagcttttgttttgaactccgatttaacaatcaatttttggtacggtgcattaacggttactttaggatcattaatctgttggtactcaattcgaaaaaaccatgttcaacataaccaagcgaaattagcttcttaa

SEQ ID NO: 47054 - DNA, 1704 bp, Acinetobacter baumannii
atgcgtacaacaacaggagtcatgaaagggcttaatccgactgttactattgtctcgaagttattactcttcatttttatcgctttttgcatttttaaggaaaaacaggcaggtgaatattttcagctgatatcaaatgccttattacaaaatgcaaaatggtatcttcttcttttagcaactttcttattaggatttattatctatttatgtatgagccgttatggccatattcgtttaggaaaggatgacgaaaaacccgagtatagtaatattgcctggatctgcatgctcttttcatgtgggatgggtattggcctgatgttttggtcagtagcagaaccaatcagccactatgcaagtaatccatttaccaaaggactttcagatgaatctgcccggatggcgatgcaactgacattctttcattggggattacatccatggggattattctgtttagtagcggttgctttaggatattttgcttaccgtaaaaatttaccttttgccatgcgctcaattttatacccattaataggtaataaaatttatggaccggtaggtaatattgtcgacattataaccattgtaattactgctttcggtatttcacaatcattaagtatgggaatacttgaactaaataccggactcaaccacacctttggtattagtgtagatgtcaaaattcagcttgtaatggtagtcattctttgtgctttagctaccatttctttattatccgcaattagtaaaggcttcaagatcattgctgaaggcaacatgataatttcttatttattggtctttatcattattttcattggctcaactcactatattttaaataccttctttgaaggaataggtgattatttacaaaatattgtaggtatgagtttatggagtgatgcacaaaaagattcaggttggcaaaactggtggacagcttactattggccatggtggatgacttgggcaccttttgtgggtcttttcatcgctcgtatttctagaggccgtacgattcgtgaagttattctaggctcacttgccgcccccacacttctaactttcctctggattgctgcatttggtggtgctgcactcaaaattgaaaaagcaaatcatcaaccagctgctcaagaagttgttgtgaccacttctcatataacccctcctccagtagctcccgctcatgaaatgactattgcagaggcaactaaaaaggaaccagcacgagctgtgtttgtattttttgatcatcttgcttcaagtcataacaccaaagtattcttgagtgctctgctctgtctattactagctattcacgtcattacgctagttaactcaggcacacttgtgctctgttttctggattccaacggtgccactaacccatctgtagctattaggctcatttggagcataatcattccattgataggcggagggctactattaactggtgggctatcagctattcaaacggcttgtgtcattgctggtttcccgatatcaattcttttgggaattacctgtatttcactgattaaaagcttaagggaagatccattagcttgggtcatgatgccagaacatgtccgccccgattcgtgcaaaactgagcaaaaacctgttgaaaaacccaaagagaaaagtttaaaggaagcagataatcaatttgttactgaaacttaa

SEQ ID NO: 47055 - DNA, 1317 bp, Acinetobacter baumannii
atgactaattcgcaaatgactattcaaggtcagaaagcacgtcgttttattatcaaattcgcttggctcatggctggcggaatgtttattgacggttttgttctaggctatattggcgcattaatgccctccatcacagcggatttacagttatcaactacatggcaaggtttaattggggcagcctcactcatcggtatattttttggtagtccaattggtggatatctagcagaccgttttggtcgaaaaccaatgtttacactagatcttttcatttttctgatctgctcagttcttcaagtttttgcatcagacccttacacactcttcattgcccgactctttatgggtgtcgcgattggtatagaatatgctgttggttggccaatgttggctgagtttgcccctgcgcgcatacggggtaaattattggcactcaccgaaacttcatggtttgtcggttatttagcttcttataccattagctatattatgattgaggaacaaataggaaactggaatattattttaggactcagtgccattccatctttaatcgttttaattttacgtttgggaatgcctgaatcacctcgttggttaatgtccaaagggcgtaaaacagaagcaacgaaaattgctaaagaatatctttctgaagaagatcatcaggacgttttaaatcaacgtcatgataatgtcggacaaaacactaactttttggatttatttaaaggcaagaatcttaaaggcacaattttattaacaacctattactttggaatggctgttccttattatgccttgggtacatttattccgatgattttagaaaaactcggaatgcatgatggtattttaggagggttattcctaaatacttttgccgtgttaggtacaattgcagccgttatattaatagaacgtatatcacgccgtaatgtcgcaatcatgccttttgtcctttcaaccattgcccttttagtaattgccctctcagatgacagttcaaacctgattattattggcttcttggtatatgcctttgtcagtgctggggcagcctgtgttctttctgtgattccaagtgaagttttacgcccagaagtcagtgctatgggtacaggtttcgctactgccttttcacgtattggtgcggccattggcgtattcttgatgccacaactcattttagaacatggtgcatcccttgctgtatggctcgccacaggaatatgcctaattacaacagtcgtgacctatctgtttatgcctgaaactaagggtaaatcaatgtcagaaattttccattaa

SEQ ID NO: 47056 - DNA, 1299 bp, Acinetobacter baumannii
atgacaaataaacgacctcatgaaaatcgtattggtaatcgtcaccctgaacatttaaatatgcatcagattggaccaggtgatttagctacatctgaatggcagcaagcaggcctcactcttcctaaccttgatcgaatgcatcaatatcgtttagaccgtatatgtgctctactgaagcaacaaggattagctggaatattgttatatgacccgatcaatatccgctatgctacaggcacaactaatatgcaagtatggttattacataacgctggtcgatacacctatgtttctgcagagggacaagtagtactttgggagtttgaccactgcgatttcttagctgaccattcaaaagtaattactgaagtccgtccttgtatatcttggttctatttctgtgccgggaatcgtattgatgaacaagtaaaaaaatgggcacatgaaattaatgatgtaattttacaatacggtaaaggtaataaaaaaattgctattgataaatgtaatgatgaaggaattaaagagttagaacattttggtctaagcattgttaatggcgaagaaattatggaacttgcccgtgcaattaagggtgaagatgaaatcaaggctatgcggtgtgctatacatgcaacggataaagctataaaagttatgcatgaccatcttgaacctggagtctcagaacaacgtttgtggtcatatttacatgctgagaatattgcgcgtgggggggagtggattgaaacacgtttactttcatcagggccacgatgtaacccttggtaccaagaatgtagtggtagagttattcaaaatggtgacctggtcgggttcgatacggatatgattggtgcttatggtgtttgtgtagacacttcacgtacttggttatgcggagacaaagctcctactgctgaacaaaaaaatatttatcaaatggcatatgaccaaattcaatttaatactgaattattgaaagttggcacaacctataaagaactcacccataacgctctacaatacgatccaaatgagtataaccattattcattcctatatcacggcgttggtttatgtgatgaagcacctggcatttattttaaagaagcttgggaaagctatggctatgatggcgtattagaaccaggaatggtgatgtgtgtagaaagttatgtaggacataaagctggtggaccaggtgttaaattggaaaatcaagtcctaattactgaaaatggccctgaagtattaacactctatccttttgaatcaaggttactatcactttaa

SEQ ID NO: 47057 - DNA, 1119 bp, Acinetobacter baumannii
atgtcacttttatttcaaccaattcaatttggtcatctaaaattggataatcgaattattattgctcctatgtgccaatattcttctgaagatggagatttaagtttttggcatgagcaacaatgggcaagttatgctttatcaggcgcgggattatgtattattgaagcaacagcaataagacctgatggccgaataagctatgctgatttagggctttggaatgataaacactgtaaacaaatgaaaactttgttatctaaaattaaaactatatctcctgctccctttgcaattcaattagcccatgcgggacgcaaagcatcttgcgatacaccttggggaaataaaaaaggacaatatcatcctgaagaatctaaaggttggcaaacacttggtccaagtgaaattcccttccaagattcagagaatcctcctcttgcactctctataaatgaaattaaagaattaattaacgattttgctatggctgcacaacgatcggtagaagctggtttcgagctaattgagcttcatgctgctcacggttatttattgcaccaattcttatcaccactttctaatcagcgctgtgatgaatatggaggaagttttgagaaccgaatgcgacttactttagaagtgtttgaagctataaaaaatgtaattccagaaggctttccgataggcgtgagaatttctgctacagattgggtacaaggaggatgggaccttgaatcgagtattaaattatctaaagctctagaaaaaataggagtggcttatattcatgtaagcacaggtggtttacatattgatcagaaaattgaagtatttcctgaatatcaagtaccacatgcctatgaaattaaaaaagcagttaacgttcctgttattgctgtaggactaattactgatgctcaacaagctgaaagaatcctacaagctcagcaagccgatgctataggtattgctcgcggtattctctatgatccaagatggccttggcatgccgctgcggagttaaatgaaactattgcaatcgctccacaatactttcgctttcaacctcgtggttcaaatcatctttttaaagcttattctaataaagcagactag

SEQ ID NO: 47058 - DNA, 927 bp, Acinetobacter baumannii
atgaaaattaagccattgccgccaatgaacagcttaattgtattcgaggcagccgcacgccacctcagttttacaaaagctgcaaatgaattgaatgttactcaaggcgctatcagtcgacaaattcgacagctcgaagaatacctaggtaaggaattattcttaagagctaatcgaaatatttccctaactcctaccggactccaatactatcaaacgatctatagtgctttattagacgttgctcaggctactgctgaaatcaagaaatggcaaggagagcatcaaataactgtggctacgaccaatgctatggctgctctttggttactaccgaaagtggctgcttttcaacagaataatgagggcgttgatttaagaattttaacgacagacaatatttcagatttgcacaaaatggatttcgatttggcattattttattgccgtgttcctccagcaggtatgagagttactactttatttcctgaagaggtttttcctgtttgtagtccaaattatcttgctcaatttaaagaagatagttctccagaagagatttttggaaaagccttattatacttagatgatgctcaaaaggattggattacttggtctgagtggtttgaagcagtaaattatcctattgtaaaaccaaaaaatagggtgaatatcaataactatccaatgcttttacaggcggcaattaatggtcagggtgtggctttagcgtggggttcactcgtggatgattatttacaaagtggagctttagttagaccggttgataccgttcttcgtactcaagcaaatttcagtatgctagaaccagcagataggggagtgatcccttctagtgttaagcatttccgcagttggctgctagatcagttaccaggacaagttgggcaaaagggtttgaattag

SEQ ID NO: 47059 - DNA, 1020 bp, Acinetobacter baumannii
gtgaatccgtctttacctggaacctatgtcagccttatggcggatgtcgtccaaaagctaaatgtatctcctgaagaactcttagaaggaagtggagtttcagttgagcaactgttggaacccttttggtatttagatttcaatatttttaataatcttctaaatagagcagtcgaactgaccaatgagcctgcattaggtatttatcttggcctgcaaatgaccgtgtcttgtcatggttcggttggtcttgctgcaatggtttcacaaaatttgggtgaagctttaaatgtcatggaacagttcattggactacgttgtccagcgttaaaaccacgtcttgaaatagaaaacgatttagcttttttatatttagatcaacccatgacaaactttaaaatgggtattgtagggatgacatttttgatggtgggctttgctcaaatgtcgaatgccattaccggacaaaaattagaaataaaagccgaattaaattaccctgaacctgctttcttggaacaagttcaagaattattgccatgtgagattcaatttaatcagccattcaaccgtttggttttttcggaaaattttttggcattgccattaattatggctgacccattggcggcacgtttagctcgtgaacagtgtaagcatgatttaaacaagttagctgctaaacgcggagaaaaacacccacttacggctttagtgcgtgagttactttttgatgaagtagaaggcttctttaaaatgaaagatgttgccgaaaaattgcatttaactgaaagaacgttgcaacgtcagttagcaaaagaaggggttacttttcaaattttgttagatcaggtccgagagcgtcatgcaaaaaaattattaaatcatcatgaatatagtatttcttatatttcagaaaaattgggctattcagaggtcactcattttactcgagcatttaaacgttggaccaatcagactccgaaacaatatcgaaatttaagagaagaacaagaataa

SEQ ID NO: 47060 - DNA, 1041 bp, Acinetobacter baumannii
atgaaagctctggttactggtggtgctggttttattggttcccacattgtacgtactttacttaatgagaattatgaagtacgtgtactgcatttacctcaagaaaaattaaccaatttagaagggttagatgttgagttaattgcaggcgacattaccgacccagcaaaaatggatgaagcagtatctggttgtgatttggtttttcatactgccgcaatttatgccttatggcttccaaagcctgagcttatgcgtaaagtcaatgttgaaggaacacgaaccgtactcaatgctgcaaaaaaggctggtgttaaacgtgttgtttataccagtacaggcgcatgttttgcaggtcaacccaaaggcattcaggccaccgaaacaagtccatttgctttaggcgcgactggagatgcatacgttttaacaaaatttgaagcacatcaggttgccttacagtttgccgcgggcggcttagatattgtgattgtctgcccgacaggtccaattggccctcaagatattgccccaaccccgacaggaaaacttttactcactatcgctaccatgcctgcccttgctgtaccgagtgcaattaacaacatggttgatgtacgcgatgtagcaaaaggccatgtcttggccgcgcaaaaaggtaaaagtggcgagacctatattttaggtaatcgagatcttgacggcgtagcgatggcaaaaacagttcatcagctcttaggcatctggcgcccagtaatgaccattccaagtgtagttgaaggcgtctcatctcagcttgcgggccatgcagctttgtgggtaacagagcatattactcataaagctccccttgtgaccccttcggcagccaaaatcggtcagctcggcacctcatttaattgtacaaaagccgttcaagagcttggacttccacaaacgcccgttgaaattgcagtacgtgatgcattgcagtggtttgcagccaatggttacgtcaaatctcgtagcttgatcaaaaaaattgagtcaatttcgatctga

SEQ ID NO: 47061 - DNA, 948 bp, Acinetobacter baumannii
atgagcacatttattgatcatcatattgttgcacggaaagtacagtttgatttttctcaaacacctcggcattgggttccaaacgatgtgttaacgacacatgtgctgaacagcatgcacgttcttttacctgctgttgagcactggttttgtcgtcttgcaaacaaaacgttgccctatgttgaagataaaaacctgaaagcagatatccgtggttttatcgcccaagaagcggcccacgctaatgcacataaaggtgcagagatttattttcagacccatggcatagatccaacaccttttaaagattttttaaactggttctttaaagatggctttatgggcgatactccttttggaatttatggcccttttaagcgctatccaaaacagtcgctcgcctttcgtatgggcattattgcagggcttgaacactatttttgtttctttggtacatgggctttagatgcagaaggcctagaaggtgcagatccagccatgctagatattgtacgctggcacggtgccgaagaagttgagcatcgcacagttggctatgatgcttatcgagctttagctggagacggcgttaaaggctatttaggcagacagctcagcatggggtttgcttttgctgcaatggttgggttctggctcggttcaacggtctatctttgtcatctcgatggaaccaaagaagcccaaaaaattgctaaaaaaaatccattggctttagtttggctatttcaaaaaactgcaaagaaaaagaaaagcttacctgatctcggcatgattttgactgctttaaaaggatggagcaaattgagctatcaccctgaacatgatggtgatgttgaaaaagctttagcttatttagctcagtccccagcagctcaattagccgcagaggcttacgccaaagcgctttcttcaaaaatgaaaagctga

SEQ ID NO: 47062 - DNA, 921 bp, Acinetobacter baumannii
atgattcaagtcgagcaattaacgttaaaccgtgatggactcactttgcatgggactctatatggtgaagctgatgcctctttggtagtacttatacatggttttcccgacacaccgcatagttgggaccacgtataccctttactcgtaaaagcaggctatcaagtttttgtcccttggctgcgtggttacacccaagattctgtaaatcggcaggcacattacggtctcgcctctgctcttgcagatttagtagcttggttagaacttttaaaagcgaaaggacgcttaaaaaataaagctcacctcgtaggacatgactggggagctgcaattgcaatgagctttgcaagtgggcaatccgaagctttgcatagcatgagtttgttggccgttcctcctattccaaatcttaaggatattgttaaagccatacctaatttcccgcgtcagctctacatgtcttcttatatgttgctcatgcaatcaagatttgctgaacaggtgctatctcgtaataacgcaggttttgtagaaaaaatctggcgtaaatggtcacctacttggaattttactgaatcagatttttcacctacccgcgcggcttttcaaaatcccgatattgcttgggcagctacccgctattaccacaacttatttgcaattttaaattcggacaatctcagagcaaatcggcatttattaagcccagtcaccacacccacactggctttagctggtttggacgatggttgtatgaatatacggctacatcaagctttagcccagacatcttatttcccgcaaggaattgagagtgtctacgttcccggctgcggtcattttttacaagctgaacaacccaacattatcgctcagtacttaattcaacattttcagaagactgatcgctccacttaa

SEQ ID NO: 47063 - DNA, 1506 bp, Acinetobacter baumannii
atgaataaattagtcaaaccctctaccccaactcaacttgtagatgtacttattattggagctggtccctcaggtttaagtacttgcatcaagttaaaagagcaaggaattaaaaacgttgtcattttagatatggctagtcgtattggtggcacatgggcattaaatgattacccgggcctattttgtgacgtaccgagtgaaatgtattctcttggatttgctccaaatccaaactggtcgcgaacctatgcgcctcaagccgaaattcgacaatatttagaagatgtggcttataagtttgagattgtgaatcagattaaacttaacaccgaagtcactcatgccgaatggaataatggcctaaatcgctggctcattagcacacgtgatggtaaaaaatatagtgcaaaaatctttgtacctgcgacaggttttattggtgaagcaaaaatgccgagcttcccgggtcaagaaaagtttaaaggcactatgtttcactcaggtaagtggaatcatgagcatgatttaacaggtgaaaaagtagctgtgatcggtagcggcgcttcagctattcagtttttaccagccattcagcctaaagttggccatctttatagtttccaacgtacgccttcatgggttttaccaaaaccggactttgccgttccaaatattgtaaaagttacatttaagaaagcgccaattttagaaaaaattattcgtgaaagtgcgctgtggagcctagaaccttcacttccaattttcatgaatgaaaacatcatgcgaaaactgcatgccttaggaaagttaaacatctttttaggtgttaaagacccagaaatgcgtaaggcattaacacctacacataccttaggttgtaagcgtccaatgttttctaataactggtataccgctttagccaaaccgaatgtgactgtcctctttcagggcttgtcacatatcactgaaaatggtgtagtcggtgaagacggcaaagaaattaaagtagataccattattttcggtactggctatgcggtcgcagaacctgcgatttataaaattattaaaggtgcagcaggccgcagtttaagcgaggtatggcagcgtcaaccgcgtgcatacatgggcatgtcaattcacggtttccctaacatgtttatgatgctaggtccaaactctcaaaacaccgtgggttcagtgatgtggactgctgaacaacaatccgtttatatcgcaaaaatggtgaagttaatacaagagcaacgctttgaccgtattgaagtcaaagcagatgttcaaaaacgttttaatgaccgtatagataagcgattagctaaaatgccggtaagaccagatgtttgtaaaagctattatctagatgatgcgggtcgtaaccatattatttggcccgagtttggttttgtgattaaacataagctgcatcacgtcaatttgaaagactacgacgccacaaccaaagtaattaaagtggtcgcttaa

SEQ ID NO: 47064 - DNA, 921 bp, Acinetobacter baumannii
atgcaggatttaaacgatctatattactttgcaaaaattgttgaatatggtggttattctgctgccgctagagcgctcgatattccaaaatctaaactcagccgaagagttgcacttttagaagaaagactcggtgtacgtttattgcatcgttccactagacaatttagtgtgactgaactcggccaacaatattatcaatactgtcacgcgatcttgatcgatgctgaaaatgctcaagaatttattgatttaaaccagtcagagccgcgtggaacgattcgggtgtcttgtccgcctgcgttattgcatcatcacatgggcgagtttctgactaaatttatgctgcaattcccaaaaataaaaatctatattgatgtgaccaaccgaaatgttgatgtcttaaatgaaggaattgatattgcttttcgtgttcgctatccgccactcaaagatagtggcttggtcatgaaaaaatttgtgaccagtgatcagtgtttagtcgcgcaccctcgggttttatctaaacagccgatacctcaaactttagatgaattgcatcagttcagaactattgggcttggtaatgcagaacaacaaagtgtgtgggtacttcatcatcaggagcatggaacaactcatttccagcatgaccctgatttaattgtgaatgacatgaccggggtattacaggctgttattcatggcttaggtattgctcctttaccgattatgatggctcacgaatatattttgcgtaaagaactgattgtggttttacctgaatggaaacctacaagcggtattgtccatgcggcttatgcttctagaaaagggttattacctgccatcaaaaggttgctggattttttagaagagcagtttaatcaactcgataaagacttgttaggttatcgataa

SEQ ID NO: 47065 - DNA, 681 bp, Acinetobacter baumannii
atgagtacaccagcaaattttaacggtcaagcacccgtaatcgacccaaataatgttgcaatgctactaatcgaccatcaaagtggcttatttcaaactgtaaaagatcttactgttcctgagttacgtgcaaatgtggttactctggctaaagttgcaacgctatgtaatgtgccagtgattaccactgcttctgttcctcaaggtccaaatggtcctttaattccagaaattcaccagtttgctcctcatgcacaatatgttgcccgtaaaggtcaaattaatgcttgggataaccctgactttgttgaagcggtcaaagcaaccggtaaaaaacaactgattattgccggtactattaccagcgtatgtatggctttcccaagtatcagcgcagttgctgaaggtttccaagtctttgcagtcattgacgcatctggaacatattcaaaaatggctcaagaaattacattagctcgagttgtacaagctggtgtggtgccaattgatacagcggctgtgtgttcagagctacaaaaaacatggcatcgtagtgatgcagcagactttgcagcagcttatagtgcaattttcccaccataccaattgctcatcgaaagctatcaaaaagcacaagacgttgttaaaaacaatgaaatgctagattctgaaagaacctaa

SEQ ID NO: 47066 - DNA, 831 bp, Acinetobacter baumannii
atgggaattctagctaaagtctttgatcgcggtgctcactttcctgtgcgccatatgagttttaattttaatcagtctcaagctactttatttaaggataacccttggggagagtactggctggcaaccttgtctgctatgtttcctgcgggtgagcgattttttgtacatagtgtaagaaacttacaaaatcaggctaaaacagaaagacttcaaaaagatattgcagcctttattggacaagaggcgatgcatgctaaagaacatgaacatctgaaccaacttatacagtcatctggactcgataccgaacctgtttcagccaatgtggaatggttaatggctaggctgaaaaaatatttcacaccaacccagcaattagcaattacttcggctgctgaacattttacggccattattgcacggcagattatgagacgttccgatttgcaggagcgtttatcgagtaatgaaactttaaaaaatatctggttatggcatgcggtggaagaaagcgaacataaaagtgtggccttcgatttatatcaagatgtctctgggggcaatttcattcggcttcttgtgatgccgtttgtgactttatatatggcaggaataatggcagcgggtacggtgtatttgggcataactcacttttccgcatggaagttactccacctaaaagaatttaatgcattaattcttggaaagaatggttttttaagtactttatggaaagattatttggactattacaaattagattttcatccagaacaacacgactcaaaagctttggaagagcgcactaaagcacagcttgggttttaa

SEQ ID NO: 47067 - DNA, 993 bp, Acinetobacter baumannii
atgattacggataaacaaactcgtataagcgactttcttagtcgagaggagattagccaattttctcagcgttcaaatctatggggattatggtgcattttctcggtatggttaatcattggcttagcatttacagtcatggctctggcaattgactacttaccttggtatttcgcagttcctgttgtatgcataggaacagtggttttagggggacgccatttggcattggcgattgtaatgcacgaggcggcacaccatacactctttaaaagccgctggatgaatgacgtattcgctaattgggcatcggccaaatttatttggaatgatgtacataaatttcgtgcccaccatatggtgcatcatgcgaatacaacagcaagttttgatcctgatcggccaatatatgaagctttacctgtgactaaaaaatctttaattcgaaaatttggtcgtgatttggttgggctaacagggatcaagttctttattggccgaattttgatgagtgctggcgtactgaagtggtctgatgcaacaggtgagcgggcagatacgcgtggttggccatggcatcgttacgttaccaactttatcaaggacttctggccaacttttgtgactaatcttgcgttatatctcatccttgctgtggcggggcatgcttggttatttctgatttggataatagcttatgccatcccttttactgtatttgtacgtattcgtgcaatggcagagcatgcttgtttagagcttgtacccgatacgcttcgtaatactcgtactacttctgctggttggattgcccgtatgactgtggcacctatacgtgtaaattttcatatggaacatcatttgatggcttccgctccttattatcgccttccccaattgcataagttgttatatagccgtggcaaggtgcctaaaccgcctagctatttagatgtcgtacatttatgtagctcaaaaccgatagaaaaataa

SEQ ID NO: 47068 - DNA, 1020 bp, Acinetobacter baumannii
atgaatacgcgtgtgagtgtgactgagctatttagtcgtgaagaaattaaagagcttactgagccttctgatatacatggtttgtgggcagtaggttctacgtgggccgtaattggagcaacttttgcaggtgttggactaacttggagttatttaccttggtggggtaaattgctgatttgtttagcagcattggctgtattggctggacgccaattagccttggcaatattgatgcatgacgcctcacacaatagcttgtttaaaacaaaatggatgaatgattatctggtcgattggttatgtgcacgcccaatctggaatgacgtacataaatatcgggctcaccacacacgtcatcatgccaaaacatcaacaccagaagatcctgacttaacattagtcgcaggctttccaaccacgaaaacgtctttaactcgtaaatttttacgtgatttagttggtattacaggttttaaatttactgtgggccgtattttgatggatgctgaagttttgaaatggacggttgcgaatgacttaacttggttaccgcgtgaaaaccgtcagtggtatgactatccaaaggtatttcttaaaaatagtagtaaggcaattattgctaatgcttccatctttggcattttatgggcttttggtcgtccagaattatatttactttggcctcttgcttatttaacgccatttccactttttattcgtattcggtctatggctgagcatgctggtactcaaataagcaataatgctttaacgaatactcgtactacaaaagcaggatggttggctcgggcctttgttgctcctattcgagtgaactatcacatggaacatcatttaatggcggcggtgcctttctttaagttgccaaaaatgcatcagatgttacgagaacgtggccatgttccagagccgccaacttatgcgcaagttattcatatgttgtctaatcgtcaaaccaatcaacacccattaaatagtgtagagcagggcgagtga

SEQ ID NO: 47069 - DNA, 885 bp, Acinetobacter baumannii
atgcctttatatcaatcagctttagcaaaggatatttttaaagatcagataattatagtaactggaggcggttcgggtattggccggtgtactgctcatgaactggcttccttaggtgcgcaagtcattcttacaggtaggaccgaagaaaaactacaacaagtaaaacaagaaattattgaagatggaggtaaggcatcttatcgagtatgtgataatcgtgatgaagagaaagtaaaacaaacagttagttctattgttgaagagttcggccagattaatggattagtcaataacgcaggtggtcaattccctgcatttcttgaaactatgtctgctaatgcttttgatagtgtaatccgcaataacttgctgggtacttttcttatgatgagagaagtttttaatcaaagtatggtgaaaacgggcggtagtattgtgaatatgacaatagatatgtggagcggtttaccgagtatgggacactctggagctgctcgtgctggtatcgataaccttactaaaacttcagcactcgaatgggctagagctggggtaagagttaatgctgttgcaccaggatgggtaatggcctcaggtctcgactcttataaagatggcatgaaggccatgatccctacagtgtcttcaaaaatccctttaaaacgaatggctacagaatcagaggtctcagctttaatgtgttttttactgtcgccagcagcttcttttataacagggatgaacgtcagaattgatgggggagcatctttagtttcacctttctttccattgattgaccatgaaaaatcaaaaccatttgaagcatttcatagagatggtatacctaatgttattaaagaaatgaaccaatcaaaattataa

SEQ ID NO: 47070 - DNA, 867 bp, Acinetobacter baumannii
atgactacacagaaaattaatgcacgtactttaattacagatctgttactggcttcagaaggtaaaataatttcaattaaagaaatgatccttgctgcaaagctgtttggaattagtgaaaacggaataagagttgctgtcactcgtttagctagtgaaggggtcattgtttctgctgaaagaggattttatcagttaagtgagcaatctcttgaatgggcagatgtaatgttaaaccgaagagcaggtttaaaagaaacaaaagcttggaatcaaaagtatttatgtgttcttacaggaacattggggcgtgttgaccgtacagctttaaaaagaagagaaagagcacttaaaaaatacggatttcgtgaacttgaaccaagtgtatatattcgaccagataacttggttatttctttggaagacatgctagagcatatgaaatctataggcttggagtcaggagccaagatgtgccatatcaattcctttgatcagattacgacagggatgattaaagatttatggcaaaccgaaaacttaaataaaaattatgaaaaatatagccatattattcagcattggctcagtcgagtacctgctttaggccttgaggatgctgcaagagaatcgttattgctgggccgccagacaatttctttattaatgaatgatcctttactccctgaaccttttgtaaatgttgaggcaagggagcaatttactgcagatgttaaaaagttagatgaagtggggcaaagattatggaaacagttacatgaactaacttttggtacagccgcaacgagcttattaaatttagaattacccgccgttgcggatgtaactcctaaaattcttaattaa

SEQ ID NO: 47071 - DNA, 234 bp, Acinetobacter baumannii
atgacttcatggatgaaagttaactgtatcgtaattatatctcttgttgtaaatactgtgagttgggcagaaccagcatcagctaaacatatgcatgcgcttgatgacagtgagctgaggaaagtttcggatcatgaccactcagacgagagctcacgttcacatgcccatcatgcagataagaaagaggaaccacaaaatttaagactaatacaaacgtcttatccaaaataa

SEQ ID NO: 47072 - DNA, 351 bp, Acinetobacter baumannii
atgaaaactttatttcgtcgtagtttaactacttttttatgtgttgggtctttgttcgctggaactcagtcttgggctgcagaggctaaacagaccagtacagtaagtactgctgttcaagcagatatcaaagaacaaggtaagtgtcaaaaaccctgtgatatgaagaatgataaaacaactcaacaggatcatagccagcacgaccacagtaaaatgtccgatatgtcccaaatggatcattctaagatgatgaatatggacccttctaaaatgggaaatatggatcactcaaatatgatgaacatggatcactctaaaatgaacatgtcaaatacatcaaataaataa

SEQ ID NO: 47073 - DNA, 462 bp, Acinetobacter baumannii
atgaaattattgctatttaatttcgaatctgtaaaactaaaaaagcttaaatttgggtctaaatctatgcagtggttaaagacatgcctatcgctgtttttatcgtttgctatcctgttcgtcggatcggctgctgttgcttcgtctgtacataagcggtgtttaatgccatctgaacagatgcaacctataccaatggaagcatctcaaaatcaggatacaatgcacactgattgtatgaaaatagagacaaaggccaaaaaatctttacatgatccatcctgtatgtctgagcaggagtgcattatgtcttttgccaagattgcgtataccccttctccacaagaatttctgtacgcaaaggtgttccctcctatagagcgatcggctttttattctctggatcaaaaccttcctgctccttttccttcagttctctggaaacccccacgctctaactaa

SEQ ID NO: 47074 - DNA, 828 bp, Acinetobacter baumannii
atgaaattttataaagaaaagctatctcgcagggtgagatggccgataggtgtgatctgtttttctctagtctatggtcaagtctatgcccagccactgactttggatacagctttgaagcttgctgagcaatatgctccaactttaagagtaaatagtgcccaaattgaaggggctgagaatgtagttttagcttcaggtattttacccaaccctaaattatttgtcggtttggagaattatcctatatctggtgatgcgtcatggtcagtcacacaagatggcatgaccatgcagaaaattggcgttatgcaagattttccaaaccgcgccaaaagacaagccgaggtcgagttagcaaaagctgaattgggttcagtcactgctcaaactgagattctacgtattgagttacgtcaaaaagttgcatctgcttggtttaaacgtttttatcttgagcgtaaattggcgctatacgatgaactgttttcagagaatcgattactttctcagatgacccaaacacaggtcacctctggtcggacaatggttgctgatgcacttgatccaaaacaagaagccacggtattgcttgaccagaaggatgatttgcttcgtgatttaaataaagccaagctagagttgcatcgcttgatcagtgcagaccatgaagcaattcctgcgattaattggccagcaatgaagatgggctttaaagttgctgacccatccttattaaatggtttaactgtaggggataaagttgactttgaattaaaaacagagagtgagaatcagattattgttgctgtgaaaaaaagctcataa

SEQ ID NO: 47075 - DNA, 1806 bp, Acinetobacter baumannii
atgcctaatacttctacagatcaaaatacaaatccttctgatgagaataatgtaaataaattatgggaaattcttaaaccatacaaagataaatatttacaagtttggtggtatggagggatggcaaaaggaaaaaggcctggagaccagccacaggtccatgtcttattcagagaggttttagaagatttcagtcccactaataactttattccaattacaaccaatatcacggatattgtatcttggagagttgattcaatttggcatcaacaacgaaagattgattctttaaacaaggatatctatgaatttgttattgatcataccgatttcgaattaaaatttttaaaaatatatgagaatgccgatgagaagaagaaaattaactttttcaaaaatcgagaagaatgtgcaatagtagattcaaaatcgaaaaaaaattgtatatctttcaaattgaatcaccctgaatttaatgaacttttaataccatgtctagaatttctcactagagcttatggcttatcaactgagctcattcgaatacttactacttataatgagaatgaacgcgaatcccgattatacactccccacataggtgagaagggtctgtggactgtacttctcggagatggtattacccgagcagaccatgtttttgttgcatattataaatatactgaaatcgctaagaaggcttcacgtattttatttagtagtattgttaaaaattctgattttaaacaagcgaatatctttccagaagttgttccttggcatactgaaaccttaccgatcagggtgtcgggattccacttagctggaacaaaaacatttgttgtgacaagaatcagaggtatgaaacccccaaagaatgaccatattagaataattcctaaagttactgaacgcattaataccaccacagacactgatcaccccaatccacctttacctcaattaggtagtggtgacatcaatgtttccacaaatctaggtggtcgacatccaccatcagaccatgaattaatagaagatgattttgaatggatagatggcggtcctgctaatgaattaagcaaatacaaatatgtaaagcaggttaaacgcccaaaacgtaaaaagaaattcatagaaacacaaaccattgggacgggagctcctgacaattcacccgaggtattaaatacccaaatactgccatcgacaaataattcaaaagagtttcaagcccctgtagatggcagaatcattggattatggaaagcttgtgtaaaagcaatggaagttaatccacatttaattcaacaagtgagctactacacatttgaaaagggatttaattattcagaactcccgatgttgatcggtttttttacagaatctgaagtacaagttcacaaaacctggtgctatgcaaattcattaaaaacccagataagaggagctttaattatcagattaactttatctcaattagaacctgtttatatttttgatatacagcccgccacatatacttctactatacaaggtgaaactctaacaaaagaaagaggacatgccggtttagttttccaaatgaaacaggaaaaagatcttgaacagtttatttctgatttaatgtatcttctgcctcttcatgaaggttcatactcgccctcagtgttccaaagcttgctggtcactcagatattcttatttcgacattcaaatacaaaagggctcactgaaggtgagtcaactttattgaatgctttaagaaagataggaattgataaaataacgtttaagaattaa

SEQ ID NO: 47076 - DNA, 1602 bp, Acinetobacter baumannii
atgactgaagttacttttactgaaacacttgtacaaacggtaaatcctccatttgattcattaaagactgcacaagagtttgcaactacaattcaagatttcattacatgggatacagtcggcctacttattgatgaaagtggtcaaaacttagttattttattattagcagataatgctgtaatcagttccctaagggctaacctgtatgagactgatctacttcaattcatattagagctatctaataaacaaaccaaaaaaattattctgcatgcttggcaaggtcatacaataaattgttctcatttaagcgatttaaaaaaacttgagcatatttggcataataaaagcgcttatcaagctacagaatttattaaagtaaatgacattaaaaaattcatcaaaagctattttaagccagtaaaaaaaattggacgaggtaatccgtttactgccgagacaaagcggttggtcatgcaagatagtcatggacgctgcatgttcactggatgcggtgatcgactagatatcgaacaacttacaggcatgaagggtaatataggatatctggctcataatgtagcctcttcagaaagaggtgaaagaggaattccgtacctttccgacatactttccgatgacccggcaaacgtactactcttgtgtgataaacatcaccgattaattgataaaattgcagcaagtgattactcagcacaacaactgagcgaaatgagaaaatcctattgtgatttagctaatactttacttgacgccctagcattcagcccaattcctgtatattcaattttatggtctgtaaatagtaatgctgttggtcatccagaaccaaaagagattgcttcatgtttatcactcttacaacatcggatggatggctaccttcaaaggttatgtgatagtaatacgttatatatgaaaaatcctgaccagttttcaaaacaactcgtcatgattatccagaatgaagctgacaagattatccaacagacaagtttaaatggacattgtgctgcaatcttcgcatttggcccaatgcctgcattaattggcttaggtgctttattaggtaataaaagtaaattcctcccaatgctgcgcgatagagaagcaaataaatggggttggccaaacgcttcagctgcggatcaatcttatgaaactattggaattgaaacccttcaaaaaggtcccgatgtagttttatgcgtaaatttcacggctattattgataaaattaaaaataaagctcttgagctaaaaactgaattgaatgctgatattgttgaaattaatgcacttgaagcatatttaggaagtaaggctgttccacatccgcataatatttcaaaattcactactgaacttcagaagctttttcatctattaaaagataaacatggcgtaaagagagtgcatcttttaattgcagctccaaatgcagcctgtatagctttagggcaagccattgatttacatcacccagatatcattatctatgacttcgcacaagatactatgctccctaatctaattattagaaatgattcccgtggtaatcatttagaacttccataa

SEQ ID NO: 47077 - DNA, 492 bp, Acinetobacter baumannii
atgattgaaaattattacttgctcccctctaaacagtttgaactctatatttcccatgaagttattcaaacatggacgagatataagcaacttgatagaaaagatctagaagcatgtggtgttctgattggcaatcagagctcctctaaccctaatcagtactggattgaagacttaactgagcctatgccaaaagattgcagatctacgcataggttcaccttaaaagatccgggacatcaaaagaaagtagattcggcattttcaaaatcaaacggaacctcggtttatttaggaacttggcatagccacccgcaaaacatcccaactccgtcacatattgattatgcagactggaaaagttgcattttgaggaatcctgaccgccagcttttttttgccatagtgggcattcaagcaatacgaattttcttttactgctcccttcaagggtggaatcaagcagagatcaataatcatcacgtacgataa

SEQ ID NO: 47078 - DNA, 1731 bp, Acinetobacter baumannii
atgaactactcttcaatcattaatcatctgacagaccgcggataccaagtatccgcaacagagttctgtttgtttccggctctgagtgtcgaatgttccgttgcgggttacgatatcaccttaattcatctaaaagatgaagaacttactgctctaccttctttttttctaaagtctcctgataagtatgggcgaatcgcgcatacacttgcgaataagaatttaaatgtggcttcaatatgcgtaaatgttccggattcggtgtctatcaattttgaggtacccgaacgagcctttgaagaatccttaaaacggcatatttctttattagaaagatgtttatctgattccaaatggaataaagaagagttattacgagaatttttggcaggctggaatcatattcaagaccagaagtatgaggactttttatgcttgtctgataaaggagaatttgagcttcttaatattcttcctcccaagaaaggtgttaaatacggactgaatgcttgccattttgggatacctcaggaatttaaacaaaagcctcaattttcagtaattaatgatcacatcaataaccgtggtaaacctaaaggaattggatgtattgttcctttagaaaagttaatcccagccccatggcagagtgcagacttagaagaatggtatcttgaaatactcaagtttatttctcaggatgtttttgagtctttaacccgtaccctcggacaaactcgagaccatgccttttggcttgtatttaatgcggatacaccttcaggtaaaacttggtttggtatccattttcatttaaaacataatattaaaagcaaaaaaggtctgcctcttaatcgtgagcatttagagttctgggaactcaaggcaatgaatgtacgtttatttaataaagaacgagtaatgccacgaagtggagctattcaggaactccaaaacaaaaaagttttacttgtaggttgcggatcggttgggagccaaattgctaatcaacttgcgtccacaggtatcggccatataacactttcagatcccgagacattttctttagataatttataccgccatactcttgcagctcactatattagctggcctaagacttggggcttacaaacagaattgagtaataaatatccttggctagaagtccaggttatgttttcagaactcctaagcctaagatatgaaaatatattaaatactttcgatctcatcattatcgcaatcggttcacctacacaagaacgtatttttcatgattactgtattaagaattcagttgaaactgctgtcataaatacctgggtggaaggttacggaattgggggacatgctgtactagatattcctgattcaaaaggttgtttaagatgtgcatatgttgatccaattgatttttcacgaggcctaggttccaaccttaattttttgaaacctaatcaaaaccttacaaaaaatcttgcgggttgcggaaatgcattcttaccttatagcaacttaagtgcattacaaaccgctcttattacttctaatttagcaatcaagtttttaatgggccaattacacagctcttcaaaagtgagctggaaaggtagtgattttgatgttatccaagctggtttccaggtaactgatcgatatacacagttttcaaaatcattggaaattctccctcttctaaatagtgggtgtgatctttgcaatgattga

SEQ ID NO: 47079 - DNA, 1041 bp, Acinetobacter baumannii
atgagtttgcaaaataaatttaatacgtttaatcaacgaatctatttaacccgtcatgattccgagtattcaaatgctcgtgaaaaagacgatagcattacagctacaatcaaggctaaatttaaagaaaaaggttatccagttattgataactttgttcaagggtcacttgctacttatacgacaatcaaagaaccaggcaaagattttgatattgaccgtgccatagttattgattatgaagaatctccatcagatccattagttcctaaaaaagtcattttagaaattctggaagatcgtggatttcaaaatgctaaaatcaaaaaaccttgtgttactgctgattataaatttaagaatctacatattgatatcccagtgtatagaaagaattcctggggaggatatgaattagcagtggggaaaaaagactcagctgatgaacataaaatttggtcagaatcctcgccaaaagaactcattgactgggtcaatgactcatctcaatatggcgtatacgccacagaaaaactacatcaatttcgcagattggtaaggtacctcaaacgttggagaaacctgaagtttagtcctgatgtgtgtagaaagatctattcaataggtctaactgtaatgattaaacagaactttaaaccaagtattgatgaagacggatttccaaatgatttactcgcactaaaagctacagttgattcaattctggattggtcttgttattttcaattgcactctgatgatcaatggaaagtaaaagtagaacttcctgtttatccatctagagatatttttcatggtagtagcctaaatacgggcactagatttagaaatcaattcactaatttacgatcaacattgcaggatgtaattgatacatcagatgaagctgaacaatgctctttactggtcaaagtatttggtgatgactttccaaataatgtaaataccaatagtgcaagcaatgctcaaaaagtgcaattcgctacctctggagctgtagggacatctcaaggcgcatga

SEQ ID NO: 47080 - DNA, 129 bp, Acinetobacter baumannii
atgtctacaaacgacgatggtattgaatatgtgtacacacgattcattaccagaaacggcaaacgtatttatcaccaaaaaggtggtttatataagtttccgaaacgttcaaaaaagtcaaagtcttag

SEQ ID NO: 47081 - DNA, 1071 bp, Acinetobacter baumannii
atgcctacatttaatccagacatgttaagaattgctcgggacctgagagggatgagccaaactgagcttgtccaaaaaatgggaaatattactcaagctgccttatccaaaattgagaaaggcgacattaagccttctgatgaaacaaaatttaatattgcaaagacccttaatttcccagaaaggttttttcaccaaaacgaccactttaaagtgtccccaattagtttacatgcttaccgaaaaaaagcttcaaccacagctaaaatcctaagtcaaatcaatgctgaaatgacaattaaagcttcaaatctagataaacttgatttgttttgtcagttagaaacatctttaccattaccaagttatcaaatacatataaatgttagttcagccgctgaagctgcattaaatcttcgtaaagaatgggatttgggactaaaccctattgaagatttgactggactcattgaaaaagctggggtctttattttctattgtaattttgaagaagatcacattgatggggtatctttacaaactcaaaatagccctccatgtattttcctcaatgcaaaccagcctaatgatcgaattcgctttaccttagcacatgagttaggacatttaattcttcataaatatgctccatcaatagacatggaagaagaagcgaatgaatttgctgcagagtttttaattccaactgaggctgtgcaaggccagttacaaacaactaatcttaagacttacgcaacacataagttgttctggaaagtctccatggcggctctaattgtgaaatcaaaacacattggagaaatcagtgacaggcaatcggcaacattatggcgccaaatgagtatgtatggttaccgcaaagctgagccttattccttagaaagggagcaccctcaacgttttgctaaattaatgatggatttttgccaaggtgataagtcaaaagtcattccagatttatcatccttctttaacttatacccagaagatttcactcagctttataaagcggatatcgaagagatggagagattttctatggcttcttaa

SEQ ID NO: 47082 - DNA, 204 bp, Acinetobacter baumannii
atgaaggacttcgcgatagcaatcatttacggtgcagcgttatttgtatcaatcaagtatgcatggcgttggtataacggagagctttcaactcctgcaattatggagtggtttggcagaggattcttttttgcttggggagtaataacagcgacattaactatgtttttggttattcgcttaattacggagcatgtcaaatga

SEQ ID NO: 47083 - DNA, 267 bp, Acinetobacter baumannii
atggataaagaagcttggaatttaacttatcgctggcacattcaaaaactcaaaaattggtactcagaccaatggtatgacttcctagatgctcttgaagaattattaaaactaatgtggatagttctaaggttgttgttatctccgttgctttggatgattgtcttaatgtttgacttaagaacctattacaagcaattgaaaacttatgatcaagagagtcgtgagcgagtaagaaaacatatcgaaagatcagagaagaagtga

SEQ ID NO: 47084 - DNA, 555 bp, Acinetobacter baumannii
atgaatgcagtagcagttgagaagtttgaacgttttgaatggttgactcatggtttaactgcgagttcaccaagtattgagccagtggtgcgcggaacaggagagaaaccattgaactatcaagaccgcttgggtgctattgcttcaatggatacccagttagcaaagtcagtcaccgcactgattatttttgaaggtaagtcagaaagtgattatgagtatgttcgtaatcatctggctaagatcatgattcaaaatgctgcagttgataagaagcgagagcctgagcatgtcgctatatatcacttggcatggttgatagctcgcatggtattggacttcgcattaaatccagagttagaagaacattacacagctaaagggcgcttggcatatgcagggcttaagagtcatcagatgaatgtggaatgctaccgcaagacatggaagccatacgaaaacctcatgactatggcaattgagtcagcaattgatgaagcaggcaaagcagttgaagcctacaaaagaaatacttacaaagatatgaaagcgtag

SEQ ID NO: 47085 - DNA, 249 bp, Acinetobacter baumannii
atgcttgtgtttggctatattgaaactttagacgtgattgactctaatggtgataagtctcaattagagaagtgtagaatcgattcaaatgaggcagtctacactcaaggtgatctggaaggcttacatattggcaacatgctcattagaacttattcagatgggtttactgagcgattcaaaattataggcatatctggaccaacactaatacctggtgttaagaagattgaagttgtagaagtgtaa

SEQ ID NO: 47086 - DNA, 204 bp, Acinetobacter baumannii
atggacacaatcgaagcgaagaagaatttagaaatctataaacgtaatcttagccggttagaaaactataaccatttattcagcagccatacgtttaagactgaatgtcagcgtgaagtaaatactctcagaaccagaatagagaatctagaaaatgcgttcgacaaagaggctaaacgaaataagagcgctaccttgcgttag

SEQ ID NO: 47087 - DNA, 276 bp, Acinetobacter baumannii
atgcgttcgacaaagaggctaaacgaaataagagcgctaccttgcgttagatgcggctatcctcactcacaagcggctcattctaattcaggtaagcatggcaagggtaaagcaataaaggcctctgacgagtttacagtgcctctctgccataagtgtcatttcctattcgacacataccaattaggcacaagacaagaatcagaattgctttttgatcagtggttagaaaaaacagagcggatgcttaatcttaaagatggagatgttttttga

SEQ ID NO: 47088 - DNA, 408 bp, Acinetobacter baumannii
atgactattacatcaaaaatctaccaactaagagaagaatttatctgtaagcatgaaacggaaccagaaatcctatttgttaatcttaaagcatgggaagaaatgctaaatgcaccacagtcaattaatggtgtgccaaaagaaataggcgggtgtgagttgatacctgcaaatgacatgcaacaagatttgttctactgtaatcatgaggacttgaagaaagcctttgaatattttgatggaacaaacagagaagtgagcgttagaaaattaaccgtgtctgatcgcccagaagctgctaatgcttcacgacttggaccagagcttacttatcaatattttcagattcctggcgaggcaattaaagcctatcaaaggaatgaagaacataaaaagctaactttttaa

SEQ ID NO: 47089 - DNA, 195 bp, Acinetobacter baumannii
atgattaagtttgtaactatatgggtgctaacagtgatggtagaggttcctggcaacggagttagttattcatatcaactcaattatgcaacacagaatatatgtgaacagcaaaaagcaaaacacgttagtaaatacaaagaagcaagatgtgactttcaacaactgccaatgtatctaccaaagccaaaataa

SEQ ID NO: 47090 - DNA, 492 bp, Acinetobacter baumannii
atgaacgcagctatatttccaatacctaaccacacagaaatatcaaaagtaataaacttcttaaatctgaatcatgctcaagctgcagcagaaggaaagcccttaattgtcaccattaccaacaaacaagaagaaaggagttctgcacaaaacaggctctattggaagtggatgacacagtttgctgatcatgttggatcaaccaaagaagaacagcacttattctttaagcgcaaattccttatttcaatattcaaacgcgatgatgctgaatactcagaaatgtgtggcgccataaccgcacttaaacagaatgagtgtgcagagtacagagctattgcagagcatgtcattaagcttacaagcaccaagaaatgcacagttaagcaaatgaatgaatatctcaatcagattgaagcattctgcctcatgcatggtgcaaagcttcttatccctaatgaacttatgtggtgctatcaaaatggcctgtaa

SEQ ID NO: 47091 - DNA, 234 bp, Acinetobacter baumannii
atggctaagcaattaagtgttgcgaatattgaatatgcaggtggtaagtctgcaaaaggaacaaaggtaaagctaagtgatggtagttacttggcaggtgttagctttgttgagactacagtaggtgttgaccaagtagcagaagttctaatccggttgacaccagactttgagaatccaaatgaaactacaaacgctcaagccgagactccagacacaacgtgcctcaagtaa

SEQ ID NO: 47092 - DNA, 192 bp, Acinetobacter baumannii
gtgaataagaaagaagttagctctcttaaagaaggtttgtactacatcttttggaaggaaggtggttggtcttatgtgtcagtgggtgtgacaaaagatggtggcagatggatagctccgacaaattggtgtgaacccgcacttgatcaaacaatatggaaaaaggttgagagtgtgaagttaattgtgtaa

SEQ ID NO: 47093 - DNA, 450 bp, Acinetobacter baumannii
atggctttaacagaaaaaaagaaggcatttgccctcgcaaaacgtagcggaaaagacaataaagaagcggcaattttggctggatgccctgaaaagactgcatctgcggcaggtgcacgtttagcaaaagatcctgatgtgattgcttatcttgaaagacttgataaagccacgcctgaacaagttgttaaacatgacgttaaaccattaacaaccaacacaactattcaagctgctaagaatcttgcagacccattagcttttttagagtcagtttacagtgatcctgttgaagatatggctttaagagttcgggcagcacaagcagcccttccatacgtccacggtaaagtggccgaaaagggcaagaaagaaaccaaagaagatgcggctaaggctgcaactaagtcaggcaagtttggtactttgaataaccaattgccaagttaa

SEQ ID NO: 47094 - DNA, 183 bp, Acinetobacter baumannii
atgctaacagacgaaattaagaaaaatgctccaaaaggggctgaattctatgtgaggcgagacggttactattacagatatgaccattatgaagaattgtattactggcagccagactcgcagaagtggatagaaatgaaaaaggcttttccagaacctcacgaattagaacccctcaattga

SEQ ID NO: 47095 - DNA, 1677 bp, Acinetobacter baumannii
atgaccgcaatgcttccagaatggacaaccgcttgcccagactgggaggagcgtattgtcaataaacagtcgctcatgccttgtgagccattattcccacaagttgcagatgttgctgagcgaatatttaaagaacttattcttgttgatgtgatgggtagcccgaagatgggcgatgtcacattggaatgggtaattgagtttgttcgggcaatctttggctcatacaatccaaatacaaagcgtcgattaatccgtgagttcttccttctaatttcaaagaagaataccaagtccacgattgcagcaggtgtgatgcttgttgcattgctgctgaatgaccgtctttctgccgaactaattatcttggcgccgacaaaagaagtcgcagacaacagctttaacccgattcgtgactttatccgcgctgatgaagaactcagtgcaatgatcaatgtttctgagcatacaaagacagttactcacttgggcactggcgcaacactaaaggttatcgcagcggaatcaaatgcagcagcgggtaagaaagcttcaatcattttgatcgatgaggtatggctattcggtaaacgtgcaaatgctgaatcaatgttccgtgaagcaaagggtggtttagcatcacgtcccgaaggctgtgtgatttatctgtctaccatgtcggatgaagtgccgtgtggggtatttaaacagcttttagattatgcccgtgatgtaagggatggaataaaagaagataaggcatttcttccacttatctatgagttcccaaaatatttagttgaagcaggtgagcacttaaagcctgaaaacttctatatcacaaacccaaatttgggcgcatcggttgaccttgaatatctaatttcagagtttaaaaaggttcaagacgctggtgaagaatcactgagagacttcttggccaagcacttaaacatcgaaattggcatgaatctacgtgcaaatcgatgggctggtgcagagttctggaatcaacaaaaacatgttttcggcttagaccaactaattgaacagtcagatgtcattacgattggtattgatggcggtgggttagatgatttgcttggatccgcggttttagggcgtcttaaaaaagatcctcgcatttggtggctttggaatcatgcatgggcaaataaagttgctttggagcgccgaaaagaaaacatcccaaagtaccaagactttgaaaaagagggaagtctgactgtagttgagaaagttggcgaagatatcgaccaattggcagcaattgctaagaaagtctatgacagcggcaagctttataaaattggactagatccacttggtttagggggcttacttgacgggttgttagaagttggaataccagaagagtcgatgcttgctgttccacaaggctacaagttgatgggttatatccttacaacagaaagaaaacttgcagagggaaatttatttcatgcaggtcagcaactcatgacttgggcagcgggaaatgcgcgtgttgtaatggttggtaatgggatgcgaatcactaagcaagaatcaggggtggggaaaattgaccctttgattgcaacatttaatgccgtggctctaatgaccatgaaccctgagccaacaaataaagaatacaacgtctattttttctaa

SEQ ID NO: 47096 - DNA, 594 bp, Acinetobacter baumannii
atgcctgctctacagaaatcatttggctcttttgaaattaagagcacgaacgaggaaaagcgaacttttaaagggattgcaagcacaccaaatgcagaccgcgcaaaagacatcatggtcccaagcggggctaagttcgatcttccaatgccacttcttttccatcatgagcacagtgctccgatcggacaggtcattgatgcaaaggtgactgataagggaatcgaagtagagattcatatcccagaaatcatagaagaagggaacttaaaagcccgtgtcgatgaagcctatcaaagcctcaagtatggattagttaaagggctttcagttgggtttttagccgattgggaacaggcccaatttatcgaaggtggtggcatccagtttaacgaatgggagtggtacgaactctcactggtgaccattccatgcaatcgcgacagttcaacagattattcaaaagctttcgaggaatacaaagccgcgttgggcaataaacctcagaaacccgcagcagatggcgtttcatctgagcaaaaacacgtaatcgtaaaacttggtagcccaactaagggtggagtatctctatga

SEQ ID NO: 47097 - DNA, 1320 bp, Acinetobacter baumannii
atgaataaatatttaaaacaattgcttgatgcgttggcaaaaaaacaagcagaaaagcaaggtgttatcactaaagcattggatgatcagcgcacacccaatgaagaagaagaagagcaaattactgctattgatgaagaaattgccacaattcaaaaaaatattgatcgtgtaaaagacatgatcaagcaggccgaagaggctggggaaaatggaacacctgtagcaggtggcagtccagaagaggctgctaataccgctggtggtggtaatccagcaccacgtgttgaggttgaatccaatcttgaaaaaggtgttggttttgcaaaatttgtaaagtgtcgaatgattgcctcaattgaagcgaagaagggcaattataaatcagcagttgatgttgctaaaagcttaggtgagccgccagaggtaattgccttaattgaaaaagccactctaggtacaacgactgatgctggttttgcttcaccattggtgcatacaaaccgtttagtaggtgaatacattgaattgcttcgcgctaatacagtgcttgataagctgcaattccgaaaagttccatttaatgttgaaattcccgcgcaggcgacaggttctatgacggcttgggttggtgagggcgaggccaagcctttaactaatccaacttacgcagatgtcaaagtcggcaagcataaagtagctgcaattgtggtttacacccttgagcttttagagggtagcgatccagcagttgatgtattaattcgtgatgacttggttgcttcatctgctcaattcactgatgctgaattccttagcgctagtgcaggaaccaccaaaaagccagcaggtcttttaaatggcgttacgccaattacttcaacaggtaatacacctgaagcagttgctaatgacttgcgcgctttacgtgctcagttcctatctaacaacctttctcttgctggcgcttactaccttatgagtgaagttaaggctgcagagcttgcagatatgcgcgatgctttaggcaatacctactttaaaggcatggaagcaggacttaaccagaagaccttaggcggcatcccagttattgaatctgaaactgtgggtgatgtgattattcttgttaaaacatctgaaattctgatggcagatggtggtcaagttgaaattgcttactctgaccaagcaactttagttgatggaacaactgttcataacttatggcaagaaaacaaatttgctattcgtgctgaacgttttgtttcttgggctaaacgccgtccgattgctgcaagcttcattcaatacacttaa

SEQ ID NO: 47098 - DNA, 168 bp, Acinetobacter baumannii
atgaaaattgaatatttaaagcagatgcatgatgccaatgttggcgacattaaggatgtaccagacttggcagcaaatgtcctaattaaaataggtgttgcaaagccttatgaagagcaaaaaaaggcacccgctaaacctaaaaaagaagtaaaaccaatcgaataa

SEQ ID NO: 47099 - DNA, 1434 bp, Acinetobacter baumannii
atgggcattagagactggtttaaaggtaaaaaaagcctccaaagtgtccatacttctgggcaaaatgtttggaatagtttaaccgttcaagagccatattctggcgcatggcagaaaaatgatgaattaacacgcactgagctgacagcatccgatgctgtattttcttgtgtgagccttatttctaaagacatcggcaaacttcctattgtactcaaaactaaagttgatggtgttctggtacatgctgacatcccagaaaagcttcgggtgttaaaaaagccaaataactatcagacatggcaacagtttcaagaacaatggacatcaagtctattattgcgcggcaatacctacgtttggaaattacgcgatgcctttggtgaggtttatcgaatggtggttttaaaccccgatttggtaacaccgctaattgataaaaatgggaatgtcttttaccaattaagtaaggattgtttgactcaggcagaatctgaaattctaccagcttctgaaattattcatgatcggattaatactttttatcatccattagtagggctatcaccaattatggcgtgtggtgtagttgcaaaaatgggggtgaaaatcctgaataatgctgcaaacttctttggaaatggtagtagaccgggtggaattctggttgctcccggtccaatcgcaaaagaaaaggcagaagaaattcaagcgagatggaatcaaaactattctgggtctaattatggcaaaactgctgtgattggtgatggaatgacttatacagttttaggtatgagtgctgcagattcccaaatgcttgagcttttagaaatgtcaggtcgtgttgtttgtagtgtatttaatgtccctcccttcaagatagggattggaactgttccggatgacccagaaaaggcaaacggtatttattattctgattgcttgcaagcatttattgaatctcgtgaaaacttaattgatgaaggtttaaacctagagtcatttaaagtagaaagcttccttgatattgacacgttaattcgtatggactcggaaagattccacaacatgattcgtgaagatgtcaaaggctgtattttaacgccaaatgaaggccgagcaaaaattggaatgcttcctgttcttggtggtgatgcaatttatatgcaacaacaaaacttctcacttgaggcactttcaaaacgggattctaaagacgatccatttggaaaatctgaatcttcatctcaaaaaacaaatgatgcccagaaatcttttgattcactttatcaaggcgttttttctgttaatgaaaaatatcaaatgggccaatttgtgacccataaaggaagtctgtggcactgtgaaaaggaccatactggcgaatttgatcatgctaactttaagctttgcgtgaagggggctaaataa

SEQ ID NO: 47100 - DNA, 294 bp, Acinetobacter baumannii
atgtcaattacagatttggccactgttaaggctcacttgcggtatgactcaaacgacaatgatttagagctagaagcatatagagaagcggcagaacaagccgtcttagattatgtgaccgatgaatttgcagatggcaattatccaaatcaatttaaagtagcggttcttcttctgtgcggttattacgatagcaatcgaaatcttgaaagcgaaatgctggtcgatggcaattatttacctccacctgttagagccttgctctataaatttcgcaatcctactgctatttga

SEQ ID NO: 47101 - DNA, 357 bp, Acinetobacter baumannii
atgggacagaaagcaagcgacctacgtcaccgcatcactattcagaaagcaattcaaacccaagaccaaaacactggaaaattaatcacctcatggtctaattttgcaacaatttgggcggaagttaccgacttatcaacacgcgatgttattgctgccaaagctgccaatagctcaattcaggcacgagcaaaagttcgctacagcactacaaccaaacaaattaacagcactatgcgggtattatttggtggttactattacagaattgatggtaacccaatgcgagacccagactcacgccgtgagtatttaactatcaaccttgcaacaggtgaaaaagcatggaatgggtaa

SEQ ID NO: 47102 - DNA, 486 bp, Acinetobacter baumannii
atgacaactcaaatacatggcttggagcctgcattaagacgaatgcgggcaattggtaatgacaagactgtcaaacgtattgcccgtaaagcgatgcggcaggcaatgaatattgcaagagatgcagcccgtcaaaaagttaaacgtttagatgatcccaccactcctgaaaaaatttggaaagaaattgtggttcaaaatggccgaagtggaaataaaaacactttggttatgcgcgtgggagtgcgtggtggggcacgtatcccatatacaaacaacgctcaaaatagacgtgctgggcgtgttggaaaaacgtatcaaacagatggccgtgtcttttactggcgattccttgagttaggtacaagtaagcaaccagcaaccccatttttaagaccggcgctatacgaaaacattgaacaaataacagataagtttgttcaagtatttaattttgaacttagtgtggttttaggtgcagcttaa

SEQ ID NO: 47103 - DNA, 375 bp, Acinetobacter baumannii
atggttaaagtcccaatttttaaattagcaagagcagatccagcagtaagagcattactcgaaagtaataatatcttgagagtttggcgttttggatctgctccagaacagcctgaaacaccatatgttacttggcaaattattgcaggtgaccctaatagtagccttgattcgcggcctgtttccgacagtgcaattgttcaaatcgatgtttatgcaacagatgaagatgtagttgatcaagttgcagaagcaatccgttttgcaatagagcttgattgttatgtggttcgctatggcgaagcagataaggacccagtaacaggaatgcctcactattcttttgatgtaagttggattgtaaaccgcgaataa

SEQ ID NO: 47104 - DNA, 477 bp, Acinetobacter baumannii
atggctaaacatgttaaagctcaaaaaacgcagttatttactgtaattgcgggaaccgttgtgcgttttatttgccctaagcgtatttcgtttggtcaagactcatttggaaagattgatgtaacctgtctagatgctgatgtcaaagaatatgaacgcgggatgcgcgatccgggtgaaggtgcaattggtattgatttggatgatgaaaacacaagtcatgacaaattattggaaattgccgcatctggtgaaaagctacagtggtatgtaggttcaagccactcaacaacgcctccaacatatgatgcaactacaggtattgatctgccagaaactcgttcttggtggtcatttgaaggctatctaaatgatgcagcccctaatgacatcgaagttgatacagtgatcggttatgagttcactttagtacgaacttcgggtgtaacttatactaaacgtacggtgactccataa

SEQ ID NO: 47105 - DNA, 417 bp, Acinetobacter baumannii
atggcaagactaacacttgaacaaactcatcaagagctcggtattggtagctacgtagaaaagcctattagatatcgtgacaagaacggtaatgaagcgggtggtgaagtcttaatcttaatcgcatcacatgatgaaattgttaaggcaccggatgtatggaagctaaaaaataaggctgagttgacaattgatcagctcaagaaagctttaatttttcttactgtataccatgaagagggggaaaagtttttccctacagttgaagatacagggcgtttgtcatccgaagttattgaagccttgtacaaagctgccgatgaggttcttgatttttcgggaaagaactcgatctcgaaccagacgatgagttctggtgcgagctcgtcctcaatggaattggcggaagaacaatag

SEQ ID NO: 47106 - DNA, 138 bp, Acinetobacter baumannii
atggctcatataacgagatttaaagttaaagaaggcacggacgttgatgctagagactttatgcctcatgaggaaagacctgaaaatgatgatgagctatccttggaagagtattttgaaaagtatcatagcggatga

SEQ ID NO: 47107 - DNA, 384 bp, Acinetobacter baumannii
atgaaaaaaattattttaattagcgcactttcctctctagctgggtgcgctactactgaaaatttttattctcttcaaccttcacctttggctacttatgggcagtggagtggtgcacataaagatatctcggttgcaactgtccaactgaataaagatggaactggggtaatttgccaagactttaagggcgttgcaaaattgtcagctattaaaaagatagatgacaaaatttatacgcaagatgggagttactggcgcattaaagaatttaattctgaaaagctaacccttgcttatggtgctggtggatcatactttctaaccaaagatgattcaggaaataatatttcaccagagtgcaagataaaattaattaaataa

SEQ ID NO: 47108 - DNA, 3579 bp, Acinetobacter baumannii
atggcagcaaactcacttggacgattaacgcttgatttgttagttcaaactgctgaatttacagggccattgtctcaagccgaacgtcaagcacgaacagcgagtaaaaatattgcaagtagctttgacattgctacgttcgctgctaagacacttggtgcagttgtagccggagtttcggtagcaagtcttgtagagtttgcaaaccaaacaattgaaacgggcagtgagattaaaaagtttgctcaattgtctaatacatctgtgcgtgaatttcagtattacgctaaaggggcagagacagcaggtatatcaatggagtcttttgcagacaaaatgaaagacatgcaggacagaattggtgattttcagcagactggcggcggacctctagcagatttctttgaaaatattgctcctcttgttggagtgactatacagcagtttcaaaagctttcaggtccgcaggctttacagctttattacgactcgctacagaaagtcggtgcttctcagaatgatatgaagttctatatggaagctatcatttctgattcttcattgcttattccattactgcaaaatggcggtgaaggttttaaaaaatggggtgaagccgctgaacaggcaaatgcaattttatcagaggacatgattcagaatttagcattggctaaagaaaatctaaggttaatggatctgcaatggcaaggccttgaagctagacttatcaataatgtagtaccagttgtaaaagcagttgcaaacaacatggatgacattaaagcaatcacaattgcacttgctgctgcaattggatcaaaacttgtggttcagggcgcaattttagcagggacatttaccatggctgcaatccgtggcgctgcaatggaattaacgcttatgggtatgcagcggcaagcgctgggtgctgctacctcaatgggggttttgcgtggagtaatgggctttcttggtggtcctgctggcttagctatgttagctgtacaaggtgttgctgcaggtgcagctttttactatatgaaaaaaagtagtgatgagctggatccatcccttacgattcagcaaaaaagtgtagcagagttacgagccgaatatgaaaagctagatgctactcaacaaagagttttaactagaaaagctactgatacacttgaaacagccaaccagctatatcgtgaacaaaaaaatgaaatgcttggcttaattgacgctattacacgatcatcaaaagtcagtgaaaatgataaacagattgccgaaggtttattcgaaagataccgattaggtaaaattgatgccaatcaattagctaatgcaattaatggtctagctacagtaagcgattctgcaaaagcgagtattgataacaaagctaaagcagtaatggatgaggctggtaaagttgttaaggcccaatctattttggatgtttataccggtaaggtccagaacaataccaaggccaataatgataatgcaaaatcaattggtgagcaggaaaaggcacttcttagcttgactcaaaagcaacgtgaagctttgaaagatattcaaggtcaactagatcgagagtcatatattcaagcgagtatgcgtaccggcattagccgtgaacatgcagagtattatgcggattacaaagataatgctggtatttcttactttaagccactttcgaatcttgaagtaaaattagtcgaacagggctacaagcttaaagagcagaccaaagaccgagaggagtctgaaaagaaaattgaggagacaaaaaaacgtcaacttgaattaactcaaaagcaggccttagttgtggctagtggaaatgaaacctcgcgcaatatgttgaaagtgtatcaagcatttatgaatactggtgtgttttcagatcaacaagcacgctatcttactgcagaggttggccgtgaaaatgactttagaagctcaaaaatgtttggtagtcataaagacaaaaataacggcttcactaatgtcggcattatgtcttggcagaaatcaagagcaaaagatctaatgtccatgcttttttctaaaggcttgctagataacaagggggcaattaaagaaacacaagaatctttgaatgcacaggcattgttcttggcaaaagaagttttcaccgatcctagttacaccaagtcaaagaatgctttgttgagtaatgctggatataaagagcttgaaaagatctttggcaaaaactatgtccgctgggattatgaaggccgaaaaattaaagcaggtcctcatcataaaaaacgtgataactactataatcaattaaatacattacttggtgatggtacaactaccaatattagctcagctattcaatctttttcaaagcttgatgatgagttagctaatgttgcagaacgtcttaaaaacgacaagcgaacacttgttgaatattatgatgagtggcaaaagatatcaaatgcgaatgatgacaaggtaaacgaaattggtcgactctatgctgatgatccagtaatgcgagatcgtttgttaaagcttcaagctgaagcttatgcaaaggatgttgaaaactatatcaaagctcaagatgagaaagtggctgctcaacgaaaggtcgcttgggagatccttgaggctcagtattcagtcattaatgcatctaaagcaatggacgatcaaatcagagggttgtcgtcaggtgctgacgatatattcgctaaagccactatgtctccaaatgattatgcaatgtggtcactagctaatcaaaaaagcaatgctcaacttgcattatctaatcaacgtgtagccgttgaacaaggaatcatgacaagtgattctttttccagtgacgatgagcgataccaggcgttgttacaggctcatgaagagtatttgattcagaaaaatgctcttgacgttcagtacgaccagcaagttaaagatttgcaaaaaagtcaatttgaaactcagttgggcttgtggtcaacccttttgggccaagcgcaaaacacatggtcccaaatgacccaatctgttaagacagcgcaaggtgagcagtccagtgcatataaggcaatgttcttaatgcaacaatctattgctattgcatctgcaatcgtttcagctcacttagctgcagtccaaacaactgcagatatcacactaccattcgtaggtaaagtgtctgccgcaaatgcaattttggcgtttggttatgctaacgcagcaatgattggggcgcagaccattgcagggatggcacatgatggtattgacaatatcccacgtgaaggcacatggcttttggatggtggcgaacgtgttttaaatccgcaacaaaacaaagatttgacgaattatttaaataatcgtcaaaacggggctagtgatggcaatgtgcaaataagccaacagattacgtttgctgatggatctgcaagcgtcaatacacaagggcaaaagcaaattgctgaatctctgaataatgcaatggacgcatgggctagacgcgaaagccgtcaaggtggtgtcttgtttaatctagtgagacgctaa

SEQ ID NO: 47109 - DNA, 342 bp, Acinetobacter baumannii
gtgagtaatcgtaaattcacttggtgccaagatctagaaggcaactctggttcacagagctttaatactttgtcatctaagtttggtgatggatatgagcaaaatgtctcaataggaatcaataaccgaacaggtacttggcaatattcacggacagcaaaaaaagccgaaattatgcaaatcaaagcattctttgatgaccataaaggagctgactcgtttctttgggattcacctttagacggtgaggtccgagtaaaaacaggtgaatatcaaccccgctgtttgggtggtgatgtttggcaaatctctacgacattcacccaagtcttttatccttaa

SEQ ID NO: 47110 - DNA, 1305 bp, Acinetobacter baumannii
atgactaagcaagttattaatgttggttcagctgcaaatgacggatcaggaacaccagctcgaacagctttccagtatgtgaatgctaactttaccgagttatatgatttcctaaccggaaccactaatgcaaccacactccccacagctctaccaattgcaaaaggggggacaggcgcaacttcggcagcggctgcacggactaatttaggattgggtgatgctgcaacaatgacaaaaactgccagcaatacagatgcaactttagggcgatctttagcagttggaaattttggtatcgggcgtggaattcgagttgcagacacagatgcatctggagatttaaataaagtcattactcctggtttttatggcaatgatacttttgcgtctggaacactggctttaaatttcccagttgcaggtcaagtgggaacattgattgtcactgatatcagtggggcaaataactatagagcacaaatttatattccgctaactggtggctccgtaagtggaaacttctactttcgatcaacttcagatttaggtgcgacttggagtccgtggacacgtttaattagtagcaattcattggactatcaacgattacttaacaatggttttgccgcaaataaaaacttggggtcaacagcattatccggttttgatgcaggtggttcatatattgggttacaaagtactggagctggtgctacctcagctggtgattatcctttagcccaagctcaatacattattggtatgaatgctgggaacactgcagaacacgctgcacatttaagtattgcaacttcagcaacctatatcggctttagacgtaaatcatatcaaggcgcttatacaccgtggtacgcattgcgcggagagcataacaccacagtcgatgcaaacggatttatcaaatccgcttcacccgttgctaaactctttgctgattcaattgagttaaacgatgacgcacaaaaacagccaattactttagaaaaattaggtgttggtgattatctgattaaaggctcattaggttttgctcaagaaggttggtatatcgaaatgccaaaggatgcaaacggtaacgtgttggttgctgtagcttataagcaacttgaaaataatgacatctcaattaagacatacaagaagaagtttgatattgaaactgcttcgattgttcctgatcttgaaaatcctgtagatattcctgaaggtcgtaatattgacatccgtttccatgaagaaattgtattagaggagacactaccagatgacattgaacagtga

SEQ ID NO: 47111 - DNA, 810 bp, Acinetobacter baumannii
atgacattgaacagtgatttccagaaactttatgtagacggccttataacattgtatgaattagatgccagcagcttaggtgctggcattttacgtttccatggacatatttcttatgaagactgggaaaaaatttatgtctcagcggatttgacgagctggaaagctgatacagcaacaatcaaggctgataaagtttttaatatcggcgatcagaaagtatggatgcgaaatattatttggcaaggtcaagtatttgagccaatggcgcttgaagtctctggccttgaaatgcgttcggatggtaaagcttctgcaccgactttaagtatggccaacaatattaatggaattcaaaatgctgtctctgcctattgtttgcaatttaaagactttgctggtgcaaaacttaaagtcattaccacgcttgctaaatatctagatgccgaaaacttcacggcaggtaatccaactgcttcaaatgagttcaaggagcagctttggtttatcgagcaaaaaacatccgaaaatgcccagcaagtgacctttgagctttcaaatccaattgattttgaaggtttgaaaatcccagttcgtcaaattacctcattatgccactggtgcatgatgggcaattaccgtggtgaggaatgtggatataccggagcggcaatgttcaccgataaagatgagcttactgatgatccagctttagatcgatgcagtgggagtttgcgttcttgtcggttacggttcggtgaaaataaaccattaccttttggtgggttcccagcatcaagtttattgtga

SEQ ID NO: 47112 - DNA, 756 bp, Acinetobacter baumannii
atgaaactgacggcaaaacttaaaaaagcaatcttggcccatgcagatgaatgctatccatatgaatgttgtggagtgattgttgacaagcaatacctcccttgccgcaatgtttcagctctgtctgatcagtttgaaatccatcctgaagatttagctatggctgaagatcaaggcgaaatcttagcttatgtacattcccatccagacggtactacacgagcctcagaactagacttaattcaaattgagttacatcaaaagccgtgggtaatttgttcatatccggatctggattttcaagtctacgagccttgcggttatcgcgcccctttagtggggcgtaattattttcatggctggcaagattgctatgcacttatacgtgatttttatagccgtgagttaggtgtggagctgttggattttcagagaaaagatgcttggtgggaggataaatcccatccatcactttatcttgaaaactatgaaaaagcaggcttctatgaagtagatacaccacaatatggcgatatgcttgtttgtcgtgttgggcgtactgagcatcccaatcatgcggttgtttggctgggtgataatggtcagcttaaatctgaacagacagaacaatgcataggttcaagtttaatactgcatcatccgtataacagaaagtcagtacgcgaaatttatggtcaacagtggcgtgaacgtactgtaaaaatcttgaggcacagagatgttaaaaacaattaa

SEQ ID NO: 47113 - DNA, 666 bp, Acinetobacter baumannii
atgttaaaaacaattaagttatatggcgttttgggtaaaaaatttggacgtgaatataagctagatgtcgccaatactcgtgaagccatgcgggctttatctgttcagatcgctggctttgaacattttatgttgcatgcacatgagcaaggcctacgctttgccgtatttttaaaatcaaagaactcaagtaataagcgaggcaagaaacgcccagcaatttacgatcatgaaactaagcgtcttatcactggtgacaatattggtgaagaacagcttgatatgaatactgaagctgaggttattcatattgttccacgtgtagttggtgcaggcggtaatggaatattacagactgtattgggtgctgtgatggtcgtggtgggggttttagtaactgtaggcacattgggcggtggagcaccactcggtgctgcattgattggctcaggtattggaatgatgcttggtggagtggccatgatgcttatgccaaaggttgatactactcaagatcaaaaccaagatggaaacagagcgaataaaggctttggcggtgcagttaccacagttgcacaaggtaatcctgttccaattctttatggtcaacgggaaatcggcggcttcatcgtgagcgcaggtcaatatcctgaagatcagatgtaa

SEQ ID NO: 47114 - DNA, 6015 bp, Acinetobacter baumannii
atgaatgcggtagtaggcgcaaaaaaaggcagtaaaaaacaacggcaacctgtcatttcaccagattctgctcaatcgaaaacctttatcaaggttctatatggtttagctgaaggcgagattgaaggtttagctaatgggcttcagtcaatttatttagaagaaactccacttcagaatgcagatggaagccttaactttgaaaatgtaaaagttgattttagaaatggtactaatgatcaggaatacattgagggttttccagcagtcgaaagtgaaactgccatcgatgtggagttaaagtctgaaacgccatgggttcgagcttttagtaatcttgatcttgatgctgttcgtttgcgcttaaagtggggtcctttgcgtactcaagacgcaacaaatggggatgtgagcggattaacaattgagtatgcgattgatttgcagactgatggcaatagttggagtgaagtattaagagctaaaatttcagataagacttcggcaaattatgagcgtgctcaccgtattgacctgccaaaggctgatagtggctggttattgcgagttcgacgtattacccctaactcatcttctgaatatatcagcgacaagatgtatgtatctgcggtaacagaggtaattgatgcaaaattacgttatccaaatactgctttacttggtcttcaatatgatgccgagacttttggaaacgtagcaaaagttgctatggatacaaagggtaggctcctaaaagttcctactaattacaatccagcaacacggcaatatgttggaatgtgggacggcactttcaaagaggcttattccaataacccggcatggatctattacgatatatgcaccgtagaccgttatgctttgggtgaccgattaaccccactcatggttgataagtggtctttatatcgtttagcacaatactgtgaccaaatggtgccggatggtctaggggggcaggaaccacgctttacttgtaacgtttatcttcagagcgcagaaggtgcatttgagattttaactaagttagctggtgtgtttcgtgcgataacgttttgggatggtaatagcattatttgcgatgcggatattccccaagatacttactttacatatacacgtgccaatgtcattgatggcaattttgaatactcaggaacccgtgcgcgtgatcgccataatgttgtaaaaattgcgtgggataacccagctaatcactacaaaaccgaatatgagtttgttcgtgatgagaaagcaattgctgaagcgggccaagttcgtattttggaaattgatgcttggggatgcacttcgcgcggacaagcgcagagagcaggtcactgggctttaaagtcagagcaacttgaaacacgtacagtgtctttcaaagttggtctagatgggcacattcctttgccggggaaagtaattgaagttgctgatcctctatttgcaggtcgtgcaaatggtggtcgtgtatctgctatttcggcagatcgtaaaagtattactttggaccgagataatgtggttgcaaaagctggcgaccgactcgtaattaatggtgaaaatggcaaagcccaaacacgtattgttcagtcaatagcaggtagagttattacagtaaccacggcttttgatgtgaattcgattgctgtgcaaaacatttgggttttagatgctcaagacttggcaacaatgaagtttcgggtcatctctattactcaagatgataaacatcaatttagcattactgctcttcaatacaatccttcaaagtttgatgcaatcgacactggagcacattttgaagaagcaccaatttcaattgttaatcctactgttcaagatgcggttacaaacgtcaccattacaagtgaaagccgagtagatcaaggtattaatattgccacaatgattgtgtcatgggcacaagcccgtggggcggtaaagtatctggttgagtggcgtaaagatgacggtagttggattaagcttccacttacaggtaataactcagtagaagtacccggtatttatgcgggccaatatcaggcgcgtgtgacagcaatttcagcatttgaaatttcttctttaccggcatactcagttttgactgcattgactggtaagcaggggttaccaccaaaattagcttttatccgtgcagttggaacaatgttcggaatgaaagtggaatggggattcccggcaactggcgcattagacactgcatatacggaaattgagtattctacgacttccaatggtgccaatattcagcctctgggttcttatgcttatccaacgacttcactacagcagcaaggtttagcagctaatgtgacactttggtatcgtggacggttggttgaccgaatcggtaataaaggggattggtctagttgggttagtggtacttcaactgcacaggcgaatgatattcttgatgcgcttgatggcttaatttctgcaacacagttagatcaggacttaagagatacgatcaataaaattgatacgattgagggtcttgatggagatatcggaaatttaattgacaaagttactgctcttgagggtgaaattgatactgcgaatgcagcaatcaatgctgaaacccagcaaagagtaagtgatatttctggattaaatgatagtcttacgcaagaaattcgtgatcgaattgcagcagatgcagctgaagcgcaagcccgtgcagatgcaattgcacaagaatccttggcacggcagggggaagttaagcaagtttctgatgccgttgcaaaagaaaccaatgatcgcattactgcggttaaaggtgtcagtgatggcttaactcaggaaattcaggctagaactgatggtgaccagcagattcttaatgctgttactacctataaagaaagcaccgacacctcaattgcagctattcaagaatcggttgatattgttgcagatgacttacatgctacagcaacaaaactggacggtgtttacgcacaggtaacacctttaacggctgatcagaacaactggaccgcagataatggaagtaaccaagctgctgcttggacaattcagtcagcatttgctgaaggtgatttagccctaagtaaacgtatcgatgttgttaatgctcaggtgggaaataaccaagctgctattcagcaagaagccttagcaagagtcaatggtgacagcgcactaagccaaagaattgatacgttgagttcagattttggcaataacaatgcttctgttcagcaaaaacttattgctttggctgatgccgatggagcacaggttcaggcactgaataattacattgcttccaatgacttggctctggcttcggttatagacgatgtaacagcagttgttgatgacactagtgcaaatacacaggcaattgatggtttaagagccagtgtaaaggttgccacggatgatgctggcaaagcacttgaaaatagtgctactgccataagcaaggctgatacagcggtgtctcaagcaggttcagcttcatcaatggcacgggaagcaacagcaacagcacaatcggcaagttcaaaagcagatggtgctattaatacagccaataccgctagtagtgatgctgcaactgcaaaaaccaatgctgcaactgctatcagtaaagcgcaagctgctgctgatgcttctagtgccaatgcattatctattaatgaaatcaatgctgctttagaggacaaggcttcaactggtgcgcttgaagaagtcaaagcggatgtagaggatattgatggcgttgttaaagctcaaacgcagaagcttgatggtgtttatgcaaaagttactccattaactgctgaccaaaacaactggacagcggatagtggaagtaatcaagcaggggcttggaccatacagtcagcttatgctgaaggtgacttggttttaagtaagcggattgatactgtttcagcttcagttggtaaaaacactgcattaattcaacaggaagctacagcaagagctaatggtgatgctgctacagtacaagctttaaatgtttataaagcgagtaacgatgcagctttagcagcagtgagtcaacgagttgatattaatactgcagacaatgaagcaaccgctttaaaagttgatgcaattgatgtcaaagtcaatactgcaactgatcaagcaggtcaggcacttgaaaatagtgctactgctgtaactaaatctgaagcagcagtttcggaagctgggtctgctgttactgtagcgaatcaggcgaaagcaacagctggcactgccagtagtgacgctgcaacagccaaggcaaatgcagctacagcattatcacaagccaatgcagcagcagatgcatctagtgcagcaattgatcgtgttgagtctgtagaggctgaacttggagacaaggcttcaaccggttatgtggatagcgtgaaagctatcgttgatgagcaaggggatttgatcaatgcaaataccgagcgattaagtggagtatttgcaaaagttaccccactaaccgcagatagtacttcactaactgcggacagttcatcaacagaggctggctcatggtcattacaatcagcagcagctgaaggtgacttggctctaagtaagcggattgatattactcaggctcagatagatgaaaataaggcaactattgcctctgaatctactgcgcgtgtaaatgctgatagcgcacttgggcaacgtattgatactgttcaaactcagtttgaaagtaacaaagcaacagttcagagccagatcaaaacgcttacagatagtcagtcttcgcaagcaagtcaaattgatattgttcaagcttctgcttcatctgcaaatgcagcagcgggtaatgcacaattaacggctaatgatgccttggataaggcaaatacagcgaacactaatttggcgactgttcaacaaaaagtgaatgcggttacggatgctcagagtgctactgctgaaaaagttgacacaattcagacaactgttgatggacatacagcatcgattcaagatgtctctaaaagtgtagacggtgtctatgcagaacagttcttgaagtttgatgtgaatggacatgtttctggacatggttcaatgaacgatggaactacttcaacttttatttttaactatgactgcattcaatttggtactccagtgggtatagatggtattgagccaaaacccttaatgacattgcaaaatacgcctgtgactttgcctaacggtactgtcattcctcgtggtttgtatgtcgataatgctagttttgggtatatcaatgcgaatcgaatctgggcagaaaatctaagtgccattagcgctgatctagggacgattaaagttaaaaatgcaaatattgaagatggagctattgatacgctaaaaattaaggatgaagctgtaactgttccaataggtgtaaaagcaattgatgtaaagactatcactacttttgcaggtggagttacaagtggacagcctaataatgattttaataaccacttagctgcatgggaaaaccatataggcacacttttacaagttactctgaatagaagtggtggaaaagttagacttgatgcctcagtaaatatttgcaccccaaccttcggggcatttagtgtaagtgatggacgaggtaatccaattgcagctaacgatagggcaatggcttccttttatatttcaatatataaaaatgggtctttaattggcagaggctctctgggcgcgaatattgagactggtaatattaacgttaattttaatggtacagcggttatcgtttcagctattgatgataacagtactattggcaatgttacctacacacttaaagcaggatttgctcgacaggagggcgttaatattccattgaatatcagttctaacaatactttcatgattacttcaagaacattaagtgtaattgaaatgaaaaagtaa

SEQ ID NO: 47115 - DNA, 276 bp, Acinetobacter baumannii
atgtctgaaactcagtctgccgttggggttacggcagcaacaataacgcaaaaagtaacagcaactactggtgtggggtcgtttatcggatttatagccaaaattgatgttattgcgtggggtggtttatttattgcggcacttggtttggttattcaaatttattttgcaattgcccgtaatcgccgtgagagagtcgagcacaaattaagaaaggctgaatatgaacttcggatcgaaaagttaaaaggtgactgtaatgtcaaacaagactaa

SEQ ID NO: 47116 - DNA, 513 bp, Acinetobacter baumannii
atgtcaaacaagactaaatatttcgcagcattcttagcagcttcggctgctttttttgtgggcgtaaaaaacgatgaagggtttacatcaaagccagtaatacccgtcaaaggggatcgtccaacacagggccatggttctacatttaaacccgatggctcaccagtaaaaatgacagatccaccaattacacgcgcgactgcagataaatggttgcgtaatgatgtcgcaaaacgtgaagtagcatttaaagattcattgaagggcgtgaaattatcacaaactgaatatgacctttacttggatttttcatatcagtacggggtaccaacattcgcaaaatcatcaatgcttaaacacttgaaagctggtcaatataaagcagcttgcgactcattacttaaatataagttcgttgcaaagcgtgactgctctattcgcaaaaatggctgctatggagtctggactagacaactcgaacgtcatgcgaaatgtatgggggtcaattcatga

SEQ ID NO: 47117 - DNA, 363 bp, Acinetobacter baumannii
atgacatgggttttaaacaataaacgttggtcattaatcattgttttgtcggttctgtacttaatccaaattgggtacacgaaccacttggcgggaaaaattaaccaagcagatcaaaagtgtttatcgcagatccagaaaattgaaaagaaaaacttagatgccctagctgaaaagcaaaatcagatcaataaagtgagcgcagactatgaaaaagtcaaagcagagcaaaacaccaaagtcgaatatattgagcgtgaagtgcaaaagatcgtggagcgtcctgtttataagtctagctgtattgatgatgacgggatgcagcaactcaatgaactcattaaagccggcaataccagctaa

SEQ ID NO: 47118 - DNA, 171 bp, Acinetobacter baumannii
atgaactcattaaagccggcaataccagctaatctcattcagccatgccctaatttaagtgaaattaagggtacaactggtaaagatttaatgatctggtcagttgatacagttgcaaaatataatgactgcaaagcaagacacggtgcgattgtgaaggctcttgaataa

SEQ ID NO: 47119 - DNA, 198 bp, Acinetobacter baumannii
atgcagcaattaatgattatggtcacagaagttggaaagcttgagcacacatgtaatttgcttgctgatgtaaacaaaggcggtaaagtcataaaggttttcgactacaacggcaatcaattaccaataagcattgatggaaccgtgacatttaatagacgccgttgggaacttcccattaaagtagatttaaaataa

SEQ ID NO: 47120 - DNA, 1374 bp, Acinetobacter baumannii
atgtcaaatcagaacgataagcttaagagtttaaaaacttcttccatggatcgacgcttatcaatcgcgaaagcttctttactggcaggaacacgttgggctactgcaagtgcctcttccctcttttctagtgaagaagaaaaagagaagaagcgtaaaaaggcaatgagcgagcaagctaattatcttgtttctgaaattggcaaacttaaaggttctattgtcaagattggccaaatgatggctctttatggtgaacattttttacctgaagaaattactcaagctttaaataccttaaataaccaaactgttgctttagactggccagcaattaaacctcatttacaagaacaactaggttctaagttaaatgatctaacaattgaccatgagcctattggtacggcttctctggcacaagttcatcgcgcaacacgtaagtcagacggtttagagttagttttaaaaattcaataccctggtgttgcgaatgcaattgactccgatatgagcctgtttaaaaacatgcttaagcttacacgtatggttcctcaaactcgtgagtttgatcagtggtttgatgaagtacgtgaaatgatgcatcgtgaagtcaattatcacgtagaggcagccacaacacgtcgctttgctgagcgtttaaaagatgatgagcgctatatcgtccctacaattgtagatgaatactgtaccgatcaagtcttatgtatgacctttgaacgtggcgtgcctatcaatagtccagtcatgctttcccttcctcaagaacgacgtaatcagctcggtgaagcttcactagagattgcagttcgtgagatttttgaatggggcgaaatgcaaactgaccctaactttggtaactaccttgttcgtttaggtaatggccaagatattcaggataaaattgtactattagactttggtgcgatccgtcagttcgatgaacatttactctcagttgcgcgtaatcttatacaagcgggttatcagcatgataaacatgcaatggtccaagcaatgactggatatgagtttttcgatgcaatgcctgaaagtattaaacctggcatggccgatgtatttttacttgcgacagaagcattcagtacccctgtaaataatccagatatgccagctggcctgatggatgaacatgaacgttatgactggaaaaagagccagttacatagtcgtgttatgcagcaagcaagcaaatcaatggcgtctcgatatttctcggttcctccaaaagaatttatgtttattagccgtaagtttattggcgcatatacatttatgactgttattgatgccaaaacaaatgtacgacgtatgattcgtaactttgcttaa

SEQ ID NO: 47121 - DNA, 402 bp, Acinetobacter baumannii
atgaaaaagattattttattagggataacagttttattaaatggatgtttaaatcctgctaatcaactgattaataataagtttattgaagtaaaaccatccatatcttcagtgtcaggtatatggacgttttcgagtggccctaacatatcaacaataaaactttacccagatgggagtggaataatttgtgatgatattagtggaaatattgtatttaacaaagttaagtatgcaaataatatgatttacattcaaaatggtatggttctagaagttaagcttcttaacaaagatatactcaaagttagaacaattttaagtgtctcgacttcaaatatgatctataaagctgataacgacttaaaggcagcttcattaaaatgtgttaaagaaatatag

SEQ ID NO: 47122 - DNA, 552 bp, Acinetobacter baumannii
atgtcaaaatctgccttaaaaatattagatacagccgagaagctatttaatgaaaatagttttgtcggggttggcgttgacctgattcgcgatgaatctggctgttccaaaaccaccatgtacacgtactataaaaataaaaatcaattggttaagtctgtgctcgttgcgcgtgatgaacagtttaagcaaagccttttgggttatgttggagatgcaacagggttagaagccatcaataaaattctggattggcacactaactggtttagacaagatttttttaaaggctgtttatttgtaagagctgtcgctgaatctaaccaagatgaccaagacattatttcgatttcaaaagcccataaacaatggattaaagagctcatcgccgcaaactgtaatatgccaaatggtgaagctttatctgagctgatctatacggtgattgaaggactcattagccgctttttagtcgatggtttcgatgaaacacttgcgataaacatgaaaaactctattaatcaattatttaatattaacaaaaatttataa

SEQ ID NO: 47123 - DNA, 534 bp, Acinetobacter baumannii
atgttctctattttttatggcaaagaaaaactggctccatcgcccaataaaattgatattttaagaagccttgttggggggacagtcagtatttttatactgttgtggttgagtaagctcacacataatatctttatcatggcaccatttggtgcaacttgtgtattgctctataccgtgtcgcagtcacctttggcacagcccagaaatattatatttggacatcttatttcggctttcgtgggtttgttttttctaaaatttatcggtgtttccatttttacaattgctttttcagtgggctgtgcaattgcgctcatgcaagtgtttaaatgtgttcatccacctgctggagccaatcctttggttattttactcaccgcaagcagcatacattatgagtggaatttcttaattttccctgttttggtcggtgcagtgtctttagttttagtggcgatgctcattaataatattaaagcgagtaccaagtggccgatgtatggtttaggaattttaaatactaaaaagtag

SEQ ID NO: 47124 - DNA, 528 bp, Acinetobacter baumannii
atgaaattatttataaaaattattttatccttattagctgtttttcttattctattagttttaacttcatcttttaatctgaaattaaaagtttttaaattatttcatcctgattgggttgaagtaaaaggttataaaattttagattatagcgtctattgtaaaagaaaatattggcatagaggaatggatagaagtgcacgcggagatataaggtatcaatatacatatcaaaataaagtttataaatcagaggaaaaagattttttggttgtatatagattatttatttctgaaaactgtgatgagatgaaaggccaaaatttatctatatttaataagataaagaaaaataatgaattaaaagtttttatttcaccagatataaaaaaatcaaaaatattaataactaaaaaaggcttatcatttagaaactcttggatgataaaccttattttagaaattcagctaatatttttggtcttaattggattaattatatatttgattgtgacttctaagaagtaa

SEQ ID NO: 47125 - DNA, 780 bp, Acinetobacter baumannii
atgaatttaaagtgtttaatgttttctagcctcataagtatatttttattaggtaccgcaggctgctcagaaccgattccacaacaaaataaaactcaaagtgaagcaagtcaattatatgaacaaggtggtagatatttcttaggtaaagatgtcactaaagattatcaaaaagccttttcttatttccaaatggcagcggaaaagggattacctatcgctcaaaatgatttagctggaatgtactttaaagggattggaactcagaagaatgaagaaaaagcttactattggtatgagaaagctgctaaaaacaactttccggaagctcaatataatttgggtttgatgtacgataatggctattatgtaaataaagatagatcaaaagctttagaattttataaattatcttctgatcaaggatatgctaaagctcaatataatttagcaaatgcttatctttcaggaaatggagtaaaaaaagatattaatttagctttagaattatataagaaagccgcagatcaaaacttttctgaagctcaatataatttagcaaatatttattctgatggcagtcttgttaaacaagataatgaaaaagctttagagctatatataaaagtagcagaaaaaggcgtacctgaggcccaaaataacctcgcctatatgtatgccaatgtatactcagattatgaaaaagctaaatattggttccaaaaagctgccgacaatggttatcagccagcaaaagaagcattagaacagttccaatag

SEQ ID NO: 47126 - DNA, 780 bp, Acinetobacter baumannii
atggcaaatgaacagaaagatttacaacagaaagtaaatcaaaatggtaggcccgtttcagtgtttaccagagaacatctcgaaactgctgctaatgtagcttcagaatcttcagatatattagggcgcttaaaagatggaacttctgttgtagataattacaattttagatggggtcttatacattcaaagaatactccattatttagtaaagaaaggttagaaaaagccaaagaattccgattttataaagaaaacccccagacaggacaaatttttaagggtaatcagcatacaaaagtattcgatactaaaaaatttggaaccaaaattgataaattgggatcaaaagcaggtaattttgcagatggagtagagttaacgttagctatcgttgatagaaatcctgaggcccttgcaacaaaatcttctacattagtgttatctaaagctggagaaaaaacgggtgaagtagctgggcttgctgctgcaggaaaatgcgcaaaagtagcaataaaacggttagatcctagaaaagctacagttgttggtctcacctgtgctggtgcagccataggtttcaaatattggttaaaagacaaaggagatgagttaggaaatacggttggaaaaacaaagaccgctatagaggcagctcaaggcgttctcgatgcagtagatatattggatcaagttgagacaaaagcggcagagagagagaaacaagaggctataaaaagagatccaatggtagaatggcatatagttggagcagattaa

SEQ ID NO: 47127 - DNA, 687 bp, Acinetobacter baumannii
atggctggtggttctcaaatcattattaataaagatggtattaccctgattacgccggggaaatttgagccaaaagctggacaacacctttttaaaggcggtgaaaaagctaattattctttaccagagatccctaacgttcaatctccttttagcaataaattagatgtttataatctatttccaaatacatcaaatattaaatattctgttttgcattcaaatggacaagtaaaaactggcttccttgatcaatatggtaggactggacgtatcagatcacagaaacaggaaaaagttaaagttcttattggtggagatgaatggcactactatattagtcgttttggtggaactattgaggataatacttatattaaattcctagattttgtaggagatcctataccaaatttagaatttaacttaagcaatgataataataaaattcttatggaatgtagaacaaataatgatggtgaagccgtatttgtatgtcctaaagatgactttccaatattatccgtgaaaagtttaattactaatgaatttaagccaatactaagaatagaaaataacttggtaagggagataattttagtaagtcctaagatcttaaaagaaatcgatttattacaagaaacagatgagaaaggcgattatttaagaagtaactatcataaataa

SEQ ID NO: 47128 - DNA, 702 bp, Acinetobacter baumannii
atgactttcatcatagctattcaattaaacgatagcattattgttgcagctgacaataaaagagtaactttgaataaagattcaaatatagaattttctactacgaatgattctaaattatatgcttgggaacaaggtattattactggtactggagaatcatatgttgttcagcaaacagttgatatatttaaaaatatagcaaattctaaactaaagaatctacctgaatgtctagatatttctaagagaatacgtatcttagaattaggtcaaaaccttgaccaagttcataatggaaaactactttgctctagttatggtcaagaaggtgcgcaattatataaaattgaaagatttgataaaacatctcagcatacactgaaaaaggtttctcccatggagattattatttggttgtttcatccaaatgtagacttgattgcagataatttgaagaggctttattctgatctcagagattattctctattttcaacacaagttgattggatcaattattatatcaatagactttcaccaatttatcaaaaacaaagtaaggtcgatccatatatgagtcaaagctttgatatcttttttcaaacgaaagatgagcatttctttgggcatattcctaatacacaaaatattcctttaagctttcaacaagtttttaaaaagaatagctatattaaatag

SEQ ID NO: 47129 - DNA, 216 bp, Acinetobacter baumannii
gtggataaatatctgacatctaacaatgtgtgtgagatgtttcatattactaaacgcacacttaatcggtgggaaattaacacaccttgggggattccattcccagccccggcattaagttctgagggcggaacaatgaaaagatacctcgctactgatgtaatgaagtgggaggaagaatgccagcaaaagaagcaactaaaaaaagctatataa

SEQ ID NO: 47130 - DNA, 483 bp, Acinetobacter baumannii
atgaatgcacaaattttagatccatgctgcggttcaaagatgatgtggtttgatcgaaacaacccaaatgtagtgtatggagatattcgaaaagaagaacatacattatgtgatggtcgtaccttagtgattgaaccagatgtattaatggactttcgcaaaatgccttttaacgatgagcaattttctttagtcgtttttgaccctccccatcttgtgcaagctggaaagaaaagttggttagctgccaaatatggaaaattgtcacaggattggcgtgaggatatacaaaaaggtttttcggaatgcttccgtgttttagtgaaaggtggagttttaattttcaaatggaatgaagcacagatcaaagttagtgaaatcttagagctaacagatcaaaagccattgtttggccacattagtggaaagcgcagcaatacacattggattacttttatgaaagcggaaaataaggaggggtaa

SEQ ID NO: 47131 - DNA, 225 bp, Acinetobacter baumannii
atgaaagctcttaaaattacttggcttgatgcttgctctaattgtggttttggcgactatgcagaaataacaactgaacgtggcattgggtgctacttgtggaatggggacaaggttcagtgtcctaattgcaatcacaagggtgaaatagaatgtgattcagggtttgcctttgtcaattggtatgaagttgaagaagcaagcgaatcgggagctgagggatga

SEQ ID NO: 47132 - DNA, 381 bp, Acinetobacter baumannii
atgtttgatttgaataaggaaagagaggcttttctaaataccttccaatattacaaaggaagaagagacattatttttagtcatgagcatgaactgtttatgactagatcaaacaatccttctgaaattgctcagaaagaaataagcaacatgaatagccgttgggatgcttggcttagatgtgcaaagcatcgtgatgcagagctagaaaaagccaaagctcagtcggtgccagagggttatgttcttttaccaagagttccaacagaaaagatgttccaagcatacgaacgatattcagtcgcgccgatgtcgacgctgagtaaaaccggatataaggcaatggttgaagcagcaggtgatcaaaatgaaagctcttaa

SEQ ID NO: 47133 - DNA, 1077 bp, Acinetobacter baumannii
atgaaaaatattttaactgctcaagaagcatttgcagcacttcaaaaaggtaaaactgttctatgtcgtcctattggagacatgttggacttttctgacttagatcaattccccgcttctgtttttggtaaaccgggttttgaattctgcatcaaaatcgaaactattgagctggctggcattacattcacaaagccattaactattgatgaatatgaggaaggacaggatgtttttgtaattactacatattcgccttctatttacgtcgtgaattttagaaccaccgcattaattgaatctattaatagcggctttgttcaacgtgatgcagaaaacgccaagcttcaattaaaagcactatctaaagcgttaggttttgaagttagtgacgattttagtgttattcgcctaggtgacgaaccaaagaaacagcgtgctaagaaatcaaaaggtgcacagacagtagttgtagaaaagacttctgaaattgttgatgaagttaaacaacctacaattgttattactgagcaaacaaatgtaactacttctgaagactcattggtgcaatccgaagatatttcagaaaatataggatcagctttagatagtgcgattgttattacagaacaaccttatgtgtcttcacctgaagattttttaactcagcctacacctgagcaagaaaaaaacaatgagtatcagcaaaccctagatactcttctacagcgtgtaaaagagtcaaaaacacctgcagaagtaaatgcggtttatcgttatacccgcacatgggatgacgaacaaatgaagcctatccttctcgccactcacaaacgtcttgaagagctagaaaaagaaaaggcatctgctaatgagccaccctctttaatggttcaaatccaaactgcaccagaccttacaacgctagatgctttggaaatagacgtggctgcacgagatccgcagattcaaccgaagctaatggggtatgtgagaaaacgccgctatgaattagagaatcctacacctactcaacaagaatctacccctgattatttattagtggacggtttctaa

SEQ ID NO: 47134 - DNA, 2298 bp, Acinetobacter baumannii
atgaacaacgttagcgataaccgtaattttaaaactgggaatgatcaaagaattaatcaccgttcttttgtattaaatggtgttgcatctgcacaaatggcccttcgattaggctatgcattaggcaccgtatttgttctatgtgcatcaaatacctatgctgctgttattgataattcagcaaaaactctagaacaacaaactgctcaaacaaatgtagcagctttaccagcaattaccgtaaaagctgaacaagatgatatttatgcaggtgggcaagtttcatcgaaaagctcagttggctttttaggtaataaaaccgctatggaaaccccgtttaataccattgcgtatacagaaaaatatattgcagatcagcaagcgaaagatatcaccgatgtgattgcaaaaacggatccatctattttttcaactggcgcttacggcgtaattgcagaaagttatgctattcgtggatttagatcaagttctgtggctgctggccgcgatacttctatgggcggattatatggtattgctcctttataccgcgcttcaccggaaatgtttgaacgtattgacgtgttaaaaggcccttcagcaatgttaaacggaatgcctccaggttcaactttagggggaacagttaacttggttccgaaacgtgcaggagatgatcccttaactcgttttacaacgacgtatatgtcagattcacaattcggaggccatctggatattggacgccgttttggtgaaaacaaagagtttggtgtgcggttcaatagtgtatatcgagatggtgaaggaccgattaaagagcaagaaaaaaccactcatctattttcacttggtttagattggaaaggcgacaatgcacgactttcagccgatttatatactagccgtgaccatgctgacggtataaatcgtggtttaaccattttaccgggtgtcaatttacccaaagcgccaaatcccgatactttgttgaacccaacgtggacagtctataacacgcgtgatacgggaggtatgatccgaggcgagtatgacttaaatgataagtggatggcgtatgcaacggcaggtatgagtaaaacagaatataacactttaggtgctgctaaaactgaaatacaaaacgaagcgggagatataaagtttaatattgcacatttaggtttcaaatatgaacgtaaatctgctgaagtgggtttacgtggtaaatttgatacaggtgctgtcaaacatgcactggcattaaatgcaacacattaccgcgaaacggatgacgaagctggtattagacaaggatttcctgagggagatcgtgtaactaatatttataatccgaattggggcagtaaaccgaatcgcgttcctattgctcctatttttagtaataaagaaaatttaacaagtgttggcttagccgatacgatgtcggttcttcaagatcaagtccaattaaccttaggactgcgttatcaaaatattgtcaccgaaagtttaaatgggcagggcgtccgaaatattaacggtcgttatgataaaaacgctattacacctgcagctgcaattttggtaaaagcaaatgatcatgtttcattatatgcaaactatattgaaggattaagctcagggggaaccgtacctacaggacaaaactacgaaaatgaggggcaaatattttctccttttaaaactaaacagatggaaaccggaattaaaattgacagcggtaacttcaccaatacgtttagtgtatttcagatcaaatctagaaattcgtatgtaattaaaagtaccgatgaaaaaatcaaatctatttatggcgctgatggagaacaacgtaatcgcggagttgaatggggcttttatggttcacctgttgacagtattcgtgtaatgggaggattaacttatattgatcctaaaattacaaaaaccagaattgcaagcgagttaggaaatgttgttgccggtgttccaaaagtgcaagctaagcttggtattgaaggtgatgtgtcgtatatcccgggcttaactttgactgccaatgcgacagctgcgtctaaacaatatatttataatgataattcaacctcagtgcctggacgtgaagtgtacggaattggcgcacgttataatacgaaaatagctcaatttcctgtcactattcgcgggaatattgataacctcaccaataagtcatattggtcaatgcctcaatttacaagtttaatgcttggtgcaccacgtacttatttattatctgccacaattgatttttaa

SEQ ID NO: 47135 - DNA, 381 bp, Acinetobacter baumannii
atgaatatgttagttaacaagccagagttgctgtgcccttctttcccttacttggatatgtctaatgatattcaagttgaaggtgaaacggtttatttcgatctaacttacggctgcaatgttcttaactgccagattaaagccgaaacaacttatgacactcgtgaagtaactgatcagttcagtggttgtgctcgtgaccaagagtatgaagtacttgtagttgacacaaaaacttatgccgtagtgactgataaagacggcattgagtcacctataggcttacgtttcaagctcacagacgcacaagtaagttgcctaaacgagcagcttaaatactatgccgaagaattggcagatgaagaagcgggagtggtgtga

SEQ ID NO: 47136 - DNA, 228 bp, Acinetobacter baumannii
atggatacaaaatcagttgcaaccgtttcagttgtggtaattgaagccctaatgatgcttgttgaacatgaaggcatagagcttccaagcatctcattgaagcttaaatctgaagatggttcaagaattagttatgaagttgatttctcacacttagttgaacaaacccttaaaggacttaaagagcttagtgagggtgagcaagacaaggagccctctcatggataa

SEQ ID NO: 47137 - DNA, 192 bp, Acinetobacter baumannii
atgaatcaaagaattgaaaagtacaagtttagccaagcctttagggatggctcgaaagcttttttagctttctggattatcaccttcattgtatttgcattcctaaaaggctgtgccgacgagcaatacgccaacgaactcaaagcaaaacagagcatgtatgtgcgtgtgcaagtggaaggagctaactaa

SEQ ID NO: 47138 - DNA, 228 bp, Acinetobacter baumannii
atgagatacttagcaattattctagggtgtttattattggttaatttaggatttactggttatatctattcagaaaataaaaatcttaagcgtgatgtattgaatttagaaaccactctagatcgattagatgttgaagcacttgagaaaatacgccttccaaaagagaaacagaaatgtgaactttcaggaactggtgattggctagcctctttaaattgcgaataa

SEQ ID NO: 47139 - DNA, 690 bp, Acinetobacter baumannii
atgaaaactgcatcagatcgtattaatgcccgcatgaaagaacttggcttaaagcctgctgatttagtgagaggaacgggcgcaggacgcgctactgtttctgcttggacaaatgatggaaataacccaagcgcaaaatatttagattctttagcgaagtgcttaaagacaacaacaagctggattcttactggtgaaggtgaaaaagagactaaagccgaattgcaaagcgaaccggtttatagcaatgtaaaaacatcatcaagacaattaagaaaaattcctttattagattttgtgcaagcggggatgtggagagaagtggtttatgacggtttaaacccattaggtgaaagctatacatcatatgttggtagcgacccctattcggtgttttctttagaagtagatggatacagtatgtcgccagaatatatgcctggcgatgtagttgttgtagatgcagcattagcgcctaaacctggtgctttggtaattgcgcaagagattcagcaaggagtagctgtcacaacatttaaaaaatataaagttcttggaattaatgaatatggggtagaaattattgaattgaagccattgaatgatgattatccaacttacaactcaactcaaattgaaatctcaataattggagttgtaattgagcaccacaagaggattcgttattaa

SEQ ID NO: 47140 - DNA, 189 bp, Acinetobacter baumannii
atgaatgttgagcaactacggaaattctacaaggtagcgaacaattcgcagcttgccaaagaacttaaaaggggccgttctactattcacgactgggaaataaacggaattcctccacgtactcaagctgcaatacaagtgatgacagacgggaagctgaaagctgacaagtctgcactagctgggtag

SEQ ID NO: 47141 - DNA, 336 bp, Acinetobacter baumannii
atggctgagaaattaactgcaagtgtcacgtttaagtgcacggaagaaatgaaaatcaaattagagcgtattgcacgttctagaaagttaaacggctcatcagagctaatgcgtatagctgccatggacataatcttcgaggttgaggagatgcttaattgtctacaaatgcctatcgatctgaccacagttaccgaagatacaaggaataccagtgactttgaattgatgccatctccgcctttaagagatgtgacaccaaaacacacaggcacaaaaaaggcccaactgcgggaacagttgaacctaatttgccattccactgcaaaacaatga

SEQ ID NO: 47142 - DNA, 897 bp, Acinetobacter baumannii
atgagtaataaaattgttaatgaaatccgcagattgcctattgaaagcactccaaaaatgcttctttgggttatctccgatattgcagatgatgacggtaatactagttggtatgcaccacgatctcgtttaatggaagagactggatatagtcgtactacgattgcatcatgtctttcttacttaaaggaatgcggaatcttaaatattactggtggaaatgggcgcctaaaccagtacctagttacgccccaaaactttaatccatcggtcaaatacgagcctaaaaaacaatcaaaaccagtcagcgaggttgaccagtcagctaagcaaactagtcaacttggcgaaccacaccggtcagccacgctgactacaccagtcaacttggcgacaaaaccagtcagcgaggttgacactatccatcattccatcatttatccatctgttaatccatcattgggtgattcagagaatgcacctaaggctaaaacagagcctaaggtaaaacgcattactaaaaaacaggcaggtattaatcgtcttgttgaacttggatgtgaagaaaaatatgcacatgattggatggtagctcgcaaaggagcagaacttacagattcggttattgagaacctaactgaacaggcacataaagcaaatattacgttggctatggcagttcaatggtctgccaagaagggttatcaaggatttaaagcagattggtacttgaaagaccaacagccacagcaagtaagaaatgccaattatcaatcttcgcaacaacaaaccatctcagagcaagctaagtgggacgagttcctaaatggtggctcaaccttttgggatgtcacaccaaaaaagccgttactgattgagggggtgggtcatgcgtga

SEQ ID NO: 47143 - DNA, 840 bp, Acinetobacter baumannii
atgcgtgagttcacctttgaagacgctttacgtctgattactaaaatgcgtgggttttatggaaagaaattcactgatcaatgggcaggtgtagacccgaaagatatcgctgaatcaatggttgagtgctttcaaggactaacagcagaagatttcaaacgcggtgtaaccaagatgatgaaatcaactttctgcccgtcaattccagagtttcgttcatggtgtgagcctaaagcatctgattggttagatgctcatgaagcttgggcaatagctaaaaactcaatcgaatatggcactggtcgtgaaatgactgtggtgtggactgagcaagctgctaaagcatttgagaagtgtgctgacttggttgctacaggtgataagttccaattggcagaagctaagaaaatctttgtgtccatctacgaacgcttagtgacagaagcaaaggatcaaggattaaagccagtctacaacgtgagcttaggtgtagatccagaccagcgcattactgcaatcaaacaagcagaggttgcaggctttctctctacacaagaaacgcagcttcaacttgagcacaaacaaaccaaggaagagcaacaagcaggtgcagagcgatacaaaacgattgcacagaaagcaattgcggagttgcgcgagaagctaaagatccaagcaccagtaaacaaaatggctgaggaaattaaacaagttcaagaatgggaactaaaaccagactcagaatattgggcagacccatttgatcaaaaagaacagtacatcgaaagcttaagagcagaaggcaagccagtaccttttgcattacgaggtgcggcatga

SEQ ID NO: 47144 - DNA, 189 bp, Acinetobacter baumannii
atgacactaacagaaattaaattccgattaatcacaatcgcagaaaaaagaaagcgtccttacttcgacatgatcgtggttaaagaagtgcatgaggcattcaaaaacaacacctaccacgaattaaaaaattacgtgcttgctgaaatggaagtttctgttttgaacatggtggagttaggcagatga

SEQ ID NO: 47145 - DNA, 153 bp, Acinetobacter baumannii
atgaactacaaggaaatgatggcattgcgttgtgcttacaaccatggattaaagactgctgaaacaagagcagcagcatgtttgtacgtaaaacttagaagagctggcctgttagagcagttcaagacccaacaagaaggggctaaatcatga

SEQ ID NO: 47146 - DNA, 420 bp, Acinetobacter baumannii
atgagaataactgaacaacagctagaagcaattcaaaacaagcggaatatcgcacaaaaaggcacattacagcgcgataaaagcaaaagtgatgcaagggtactaggaagattaaaacaaggcgctatgaacaaaacagagcgtaaatacaacgactacctagaaagcaaaagaatgaaaggagaaatcctttggttcaagtttgactgtatcaacctgcgtttagctgaaaagacgttttataagcctgattttttcgtacttacaagtgattttgagttgcaagtacacgaggtcaaaggccattgggaagatgatgcgctagtcaagatcaaagtagctgctgaattatatccattttcatttaaatctgtgcattggaatacgaaaaacaatgcatgggatgtaagacatttttag

SEQ ID NO: 47147 - DNA, 405 bp, Acinetobacter baumannii
atgcgtgttgatagtacagcttttacagacaatcctcgcgcacgcgcgcgttttatcgaatctagaaaaaaagccaaagggttcttgctcaaacgccgaggctataaacgcccagacttcaaccgcatgattctagatttacgcaaccttggatggtcacacgaaaagatcgcttacgtccttgatgtgtcgggtggcagtactgtttcttcttggtctactggatccattccagagtacatacacggtgagcaattcatcatgttgtggcaagagcaaacaggcttacagcgcgtaccacgtgaaggcgaatggcaaacatataaatacgagatagggcagcttgatctacttgaaacgttagacgtattcgctgctcagttagatgaggaattacaacaatga

SEQ ID NO: 47148 - DNA, 303 bp, Acinetobacter baumannii
atgaatatttacatgacagaagaagatgtattgaacgcaatcgctggtggtgatgttgatgctaatgacttgttgaatgaagctaaccctaactttgaaaagcagtttaagaaattaacaaagggcttggaaaagctcatgaaggatattcgtaaaagttttccagatgcgaactattacagtgctagtgatggcctgattattatgcttggccgttcacatggggataatactgagccgcaaagagatcttgaggctgctgatggcggtttacatggaatgcttggtgggggtgacttttaa

SEQ ID NO: 47149 - DNA, 369 bp, Acinetobacter baumannii
atgaaaccagaacagtttattcgtaagtacggtgttgagaaggcgagagaggttgttgagggggcacctagcaatgctgagagcttccaagatggctactacttcagaacaaaaccacaatttgaatttcacaatggcattcatgaggcttggaacttaaccgataacgattgtgattacttcaagaagcgtggctttgaaccagtaaaaatcaatgacctgaaaatgatgttggaaagcatccgcatcgtggatcagttcggtggaatagaaaaagcaaagctagttgcgaaaacaaaagacgggatgggttatttgaagggatgcatcaaagaccacgaatcaatatacggaggcggggatgagtaa

SEQ ID NO: 47150 - DNA, 192 bp, Acinetobacter baumannii
atgagtaatcaaattaatggctttagaccagatcgcctaagcctaatcaaatatgaaattgtggatctactggaagaaaacaatgtgcctaatgaggtaattgggcaggtggttcgattaattgcagaagttaaaacattagcgtcaaatcaaaagcctgattatttgagtgaaaaaaggagccagccatga

SEQ ID NO: 47151 - DNA, 351 bp, Acinetobacter baumannii
atgagtgagtttaaagagggggattttgttgtgttgattaagacaggaacaaaagacttcctgttgcaaatagtcgaccaaacatacaccaatgatatgtatcgagtaaatatcttatcaaatggtcaatacggtccaatatttaaagatgagatacgattagcaaccatagaagaaatcgcagcaggccaccgcattgacatgccctctctgcctgtgccagttggaagtttgcaagagttacatccagagtttgcaaaggttcttaatgagaattttctagagttgataagtgacgactcccacacagaaaaccgcattggcccgctgtgtaaatcaaaggatgtttga

SEQ ID NO: 47152 - DNA, 399 bp, Acinetobacter baumannii
atggataaaccaatgacatttaacgagtggatgggcaagcaagggaatttagctttagttcatgccaattgctgccgcattgcctatgaagctggtcagcaatcaatgcaagcgaaagtggaggagctgcaaaagctggtggatgagcttgaaagaatgtttgagatcaaatggagtgatgagcagatagcacctcaaaaccatagtggaaatcgaataatctacggtgattgtgttttgggtaagttctcaatctggtggcgaacttggaaagcgtgggaccgcccagggctagagattaatgacgaattcattaaagaagcccgtgacgttgaagaagcaaagcaattggcaaaagagtatttagagcaagcgcttaaaggagaaaatcatgattga

SEQ ID NO: 47153 - DNA, 183 bp, Acinetobacter baumannii
atgattgaaatgaataattcaactggatcaattaacggccataagtatgactttacgggatataacgcgacacttagctttgacgggaaaatcattaaggttatagaaataaaaactggcaaagatgttacccaagaatttaaagaaaagtacgggcaagcgctcaagggggaaggacaatga

SEQ ID NO: 47154 - DNA, 327 bp, Acinetobacter baumannii
atggctgcgaataaacgagaaattaaaacaccgggtgtaactgctgaacctattcaagaagaaacagtagaaccaacactaccaaaaactactgctgagcaggcagaagaatcattagacgcaatcaatagtggtgaatctgagggcgaaaaagagccatctcaagaagaactattgcgccaagagttagagcagatgcgcgctcaacttgccgagctaaagaagtctacgcaaacagaagcgccaagtgccgctggtgcagcacagcctaaaaaacgcattccagttttgactgaaaagggctggtcaactaaggaggcggactaa

SEQ ID NO: 47155 - DNA, 231 bp, Acinetobacter baumannii
atgtgcggaggcggattagggaaactcatttcagctgcgactgacatggttgggcttacagataccaaaggcgcttcaaaaggttttgatgcagaagcagcagatgcggccgcaaaaaaccaagctcaattagatgcaaatgcagcaacggcagagcgtcgtaaacgtaatgcttcaactgttttggcgtctgctacagacaaccaaaagaaaacaactttaggcggctga

SEQ ID NO: 47156 - DNA, 1644 bp, Acinetobacter baumannii
atgagtgagctagtagcaaggttatgcaaacgcttaagcgagcttaaagcagcgcgaaaccgcttagaaccgcattggtctgagtgctatcgctatgcagcccctgagcgtcagcaatcgtttataggtgatgatgtaacagatacacgtaagacacaacgagctgagctattagattcaacactatcagaagcaacgcaattacttgtatcgagcatcatttcaggaactacgccagctaacgcgctgtggtttaaagctgtgccgaatggcgtggatgatccagccgaactcacagaaggtgagaagtggcttgatgaggtgtgtcaattcatttggcgcaacattcacggggctaactacgatagtgaaatctttgatttagtactcgactgtgtggttgcgggttggggcgtaatgtatgccgatgtagatcgtcatgcaggtgggggctatgtattccagacttgggatatcgggcaatgctatctagcttcaacacgtcaagaccagaaagttgacacactctatcgtgaatatgaaatgacgatggccgcgttagtcaatgagtatggcgaaaacaaggttagtgagaaggtccgcaacacttacaagtcaaagccagattgcaaggttaaggtcttgtgggtagttgagccgcgtaaaactggctacatcaaaggtgatcgtcagttgatgcctaaggaaatgccttttgcgtcatatcacgttgaagttgatgaaaaaaatgttcttcgtgagacgggctacaacgagtttccttttgtaattccacgctttagaaagattccaaattcagtttatgggactggtcaggtctctattgctttgcccgatgctaaaacagctaacaagttaatgcgtgacacgttgcgtagtgccgaaatttcaactctaggcatgtatgcaggggtagatgatggcgttttcaatccaagaactgtgcgtcttggcggtgggaaaatcattgtcgttaatgatgtgaactcattgaaacgcattgatgacggcaaaggttatcaagttggtgttgatttgttagctcatcttcaaggtgcaatccgtaaaaagatgatggcagatcagttacagcctgctgatggtccagcaatgacagcaaccgaagtgcatgtacgtgttgacttaattcgccagcaattagggccgctgtatggtcgttggcaagctgaattattaacacctttgttagagcgtacttttgggcttgcttatcgtgctggtgcggttgagccggcaccaaaagaaatgcaaggccgcaatctgtcattcaagtttatttctgctttggcccgttcacagcaacttgaagaagtcacagcaattgagcgcttcttgcaagggctttcagcagtagcagagttagacccttcaatcctagacaacgtagatatggatgccgtagcgcaagtttcaggcatgggattaggtgtgcctacagcaattctacgtactcaagatcagatcgatgcaatccgaaagcagcgtcaagaagcacagcaacaagctgcacaacaagaacaagagcaggccctagcacaaccactcgcaaatgcagtcggtaagggccttgagtctgaattaactagtgagacacgacaatga

SEQ ID NO: 47157 - DNA, 570 bp, Acinetobacter baumannii
atgattaatgtcctttttgtagttgcagttcttgcctttatcgtggctgctgcatttgccttcgcttacaaagttagtggtgaggaatggcaggaaaagtattgggctgagaaccgcttgcacttagataccaaagttggtctggaaaataagtggcacaacgctctcgatgaaatttcaaaacttgaagcacaaagatttgagcagtgggaacgtgcagagagtttagagcaaaaaattatttctctaaagcatgagctttctgaacgtccattacccaatcccattcaagagcaacaagaagaacacggcacctatgttgttcaccgcaacttaaaacccgcaacaccagatctatatcgagtcgtatttgagcttgatgttaatgggcaacgagtccttgaagatctaacaaaacgctttaaccgtcacgcctttgtgcctgattcacaaggtggagagcgtgagacatgccgacgtttagggcagagcgaaccagtgaatttcattttaagccaaatcaacaaagcaaatgacccaaattacagtgaggtagagaacgatgcttaa

SEQ ID NO: 47158 - DNA, 624 bp, Acinetobacter baumannii
atgcttaatgaacaacaagagacaaacacagaaaacgttcaagcaactgaacaaactcaaacaacacctgtggatacagcaacgccaccagttgagagtcaaactcaagagcagaaacagccagaagcagaaacagaaaccaagccagatattcctgaatctgctgacgcatacaaagttgagttggaaggctttgatttcgatgcattcaaatctaatgaagataacaaagcttttttagaaagtgctcataaggctggcgtaaccaatgaacaaatggctgtagtgatgaaggcttacgagcagcacacagccgtgcaagtggaagcacttcaacaggattggggtaacgattacgaagctaacctgcgtttcgctaatcaagcaattcaagccgctggtctgcaaacagcagatgtggactctccaacattcggtattcgtctagctgcctactttggcaaggcattacaagaagatatgccgcctcaaaacacccaacaaagcggtgccgagaacattcaagaattaatcgcatcagaggcatacatggatgaaagtcatcccgaccacaaacgtgtcactgcccaagttcaaagttattaccaaaaagcatacggctag

SEQ ID NO: 47159 - DNA, 903 bp, Acinetobacter baumannii
atggcgaatgaaaataaaattacggcagcgtttgtacaacagtttcatgacacgtacgaagttgcctcaatgcaaaatgagtcacgattacttaaaacaattgtgaaccgtggaaaaattgtcggtgaatcattcactgtaaatgacatgggtcaagtcgaaatgtcaccttctggtgcgcgttttggtgatacaacttggacaattcctgatgctggggtccgtacagcgctaatgtcagattgggacttgtttattcctattgaaaagcgcgacctaccaaagctaaaagcaaatccgcaagataaatatatgaagcttttgcttaatgcgcgtgggcgtaaaatcgatgacttgatttatcaggctgctgttggtggggttacacgcacaactgtagatgatgctggtacaaaaacaacgactactgtcaacttaccaaatagccaaattgttttgtcttcatatggagataccctaaaagacaaaattattaaagctaaaaccctattccgtgataatgaatgtgatgagcaaaatggcgaagagctgtatgtaacttacaatgccaagatgcttgaactgcttctaaacgatgcaattttgatgagttccgactacatggaagtcaaacgtatgcagtcaggggatgtatcaggcaagtggcttggtgttaactggattgcttacaacaagctcaacaatggtgctggcggcgcaactgaaaagcgcgctgcaatgtacacgggaactgctatccacttcggtgatgcggacattacaggttttgatatctcgactcgtccagacaagaagaatatcaaacaggttggtggtgttcactcatttggcgcaggccgtgctaatgagaagaaagtggttgctatcgacttcttagtgtaa

SEQ ID NO: 47160 - DNA, 561 bp, Acinetobacter baumannii
atgtctgtatctaaagtcaccatttgtaataatgcattgagcatgattggcgggcagcaaattgctagttttgaggaagactcaaaattagctcaaacgtgccgtaatatttatgacactacgcgtttatcaatacttcgctcacatccttggtcatgcgccaaaaaacggcaaattctatctccaatctctacatatccaagctttgggtatgctcatgcattcccattgccgagtgattacgtcctgattatttcggctaacactgaatgctatgaagtagagaaccgtcatatcttggcaaatgctgaggtaattcatcttgaatatgtttttgacaacgacaacgagcaaacttgggatgcaatgttggttgaagccatgacgtacaaaatggcgtctaaactttgtaagccagtaacggggagtgacgcggctgggcaatcagcagaagcacaattccagtttttgattaagcaagcgcgtaccgtgaatggtcaagaacgaccaagccaagatgttcaatacgcagaatcaagttactattgggagcgcttctaa

SEQ ID NO: 47161 - DNA, 2079 bp, Acinetobacter baumannii
atgagacagtggatcctaaaaaataacctgagttctggtgaattaagcccgttactttggacacgcacagacattcagcaatacgcaaacggtgctaaaaaattgcttaatgcattgcccttggttgaaggcggggcaaagaaaagaccaggaacaaagtttcgttctatttttgcaggtgcattacgtttaattccgtttattgcaaactcagaaaacacctatttgcttatcctcggtgtgtcttccctcaaggtttataacccaagaacttatgcagttgtttatgagactgttacaccttacaacacggctcaaaaagtacgtgaagtacagtatgcgcacactaaataccgcatgtatttcgttcaaggtgatacacctgtacagcgtttattgtgttctgctgactttactaactggcaatttgcggcttttacctttggcgtgaatcctaatgatgagttaggcagcactccaaacgtagctttatctccatccggtacagaagttggaaaagttatttccttaactgcttcatcattcccaaactggtctaatactgagacttacttaacaggtgatcgtgtaattcacacaagtaaaacttggcgtgcaacgattgacaataaaggggtggagccttctgcaactactacagaatgggaagaagtgacaaacgaagcagcaaatgtttttacaccttcaagtgtaggttcaattgttgaaattaatggtggacaagtaaaaataactcaatatgtagacccttctcgtgtaaatggtgaggttttagtaaaactgacttctgcagtacaggctattgctaagtcttgggttttaaaaagtatcgcatttagtgctacagctggttacccaaaggcagtgtgcttctttaaacagcgcttagtatttgccaataccaaaacaagccctaatcagatgtggtttagccgaattggtgacgatggcaacttcttagagacaactcaagatgcagatgcgtttagcattgcttcaagctcagctcaatctgacaatattttgcacctatcacagcgtggtggtgtagttgcattaactggtggtgctgagtttctaattaattctcaaggacctttaacgccagcttcagcacagattgatgagcacacttcttatggtgttcaggcaaatgttaagccttgccgcgtgggtaatgaactgctttttgtgcaacgtggtggtgagcgcttacgtgccatgtcgtaccgttatgaagttgacggccttgtctcgcctgaattatcacaaattgccccacacatacctgaaaaccatgcaggaattaaagaactaacattccagcagacaccaaactctattgtctggattgtcatgggtgatggtgcagtttcaagtatcacactaaaccgtgatcaggaaatgaatgcttggtctcagcacgattttggtggacaggttttatctatttgtgccttaccaactggcttaggtgaggaccaatgtttcatgctgactattcgtaatggctctacagttttggaagagtttagcaagtctgcacaaagtgattgtgaatttgatatcaacgtaactaatggtgttggttcaattttaaatcttgatattcaggttttagataatccactggttaattttaataatgcggatggatatttctattcaacttatacgattagtggcaccaacataaagctatctaacactgatctaacccaaacagtacaccttggccaaccatttaaaactgaaatcgacctattgccaccagactttagccaagtgccaacaactgcaatgtttcataagattcaggtgcatgaaatggctatctttctgaatgcatcagtcggtggatatatcaatgggcaagagttatctaccaagtattacaaccaatcagcgtttgtaaacttgccttacacaggctatgtactagattcatttgttggatggcaatcattgcatgaacttgaggtcaagataacacacgacaaacctatgcctttacacatgcaaagtatctctatgttggtatcaattaatgagaaatga

SEQ ID NO: 47162 - DNA, 453 bp, Acinetobacter baumannii
atgcaagtacgggcagcaaacctaaatgatttagatacgcttgttgatttcggcaagcgtctcactaaagaatcgccaatcttttcaaaacaaggatttgatgagcaaagcgcatctgatctattcgaatatttaattaaaaaacataactcaatttttctagccctagatgaatatcaaaatccagttggcacagtcattggtgttattgaaacggactggcgaacagggcacaaattagcttttgaacaaggcgtttatgttcttcctgagtaccgtaaatctaatattgccaagcttttagtgaacactttcattgggtgggcacagcttaagaatgctgaccgtatccagattggaaccatgacaggcatccatgctgataaaacagtaaaactctatgaaagcttggggttcaacttggttggctatgttcttgagatggaggtttaa

SEQ ID NO: 47163 - DNA, 396 bp, Acinetobacter baumannii
atgtgcaaaggtggtgctatttcttcgggccttgaagccgttggcaatatctcaaatgcgcttatggcagacgctacagctaagggtaatgcaaaaaccattcaatccgtttccaaggttcaaagcaaaaagattaaagaacaagggcagcgagacgcatcaagtgctatggctgcggctgctgaaaatggcttggatgtaaatgtaggtgcgccagttgtaattagtgatgagattatctcagatgcttcttacaacgcattattaaaccaaatgcaggcaggttatgcggctgcggatgtacgtcgtcaaggtaaggcacaacgtaataattacggcatgaaggcggcaagtaacattattgatactgctgctcaagtttatgggtggaaataa

SEQ ID NO: 47164 - DNA, 2043 bp, Acinetobacter baumannii
atgcgtattcctatttctcgtggtcgtgaagcaccacaagctcaaatgcaatcgtttacgcctaatactggtttgtctgaaattggccgttctattggtggggcaatacaggcacgtgatgaccagcagcgtcagcaagaagttacagctaaaaaccttgagctttacaacaatcaacttgcagaaaaagaaggcaagttaaagcttgatgagtcattatctactgactttaacgacaaggtggttgatattaaaaaccgtcttggtaatggcgtaatcactacacagcaagccgatgaggagcttaacacttggtcgaatgccaagttttcggaactacaaaacagcttgccgggccacgctcaagaagatttaaagaaatactgggatagtaacgtaacgcgccaacgtacttcgttcttgcctttgcaattgcgtgcagatgagcaaaagggcggggttctagctgatcggttcttcgatgtggcaacacgtatggaacgggaagcaggcaaagaatatcttttaaaaaacattgttggcttgccattgtcggaagctcagaaaagtgagctcacaaataaatatgaaacaacacgcgacatcacagatattaactcgcgtatcacaacggcaattgctcaaaacagtattgatgatctccaagaggttgctacaggtttaaaagactataagtttattgatgggcaaactgttcaaaagtatcaaaccgaaatccaaagcaagatcactacactacaacaacgtcagcaggtgcaagagaacaagcgtattaacgaagctgaaaaggtcgttaatgagtttattcaaagtactttgacaggtcgtccattagacttgaaatatcaaaatgatgtcgaacaggcagttaaaggcacaccttctgaggctgaataccagttttataaaaaacaatctgctgatttcatgcggtttcagggcctaactactgatcaacaacttgctgagatcaatagtcgtaaggcaaagatgaagaatagttcatccgccgatccagtcgcagaaaataaaatcttggcgacctaccaaggcatttacgacaacaagcttaaaactgctaaggaaaacccgactcaggcattgcgtgaaaaaggtattgagctaccagaagtaaacccattaacactaaaagttaaccctagtgactttgctaaaaacattgtgaccattggttcttatcaagtagcacagcgtgataaggacccaaatgcaacaatcaaacctattccaaatgaagcgttaccagcagctaagcaggcatgggaagaagcaaccgtagatcaaaaactaaatttaattagttctatgattgcccaaaccaaaggtgtgaaggatggggtaaaaatttggggtgctgcattgggtcagttaggcggaggtaactcaaactatgttatggcaggcgtagccaaagctaatggctatagatcaactgaaggtcgagaactagcaaactctattgttattggtactcaacttttaaaaaataaacagttaatcatgccaaaagaagatgacatgagagaggcttttaacaaatatgtgggccagacattaactggtactaatgctaataatgcttatgaagtgtttaaggcagtatatgcagataccatgaacgagcgtggtttaagccacaattctaaggatgaaaagcctaatgaaaaagtccttggagttgcactcgacttggcaactggtggggtatacacacagccaacgtcattcagaaactacagaggggacaaggtttcagattggaaagtaacgaaaccttatggaatcactgatgatgcttttgaagctcaacttgaaaagggctatcaaactatctccaagcaaactggaattagtgtcaataatttaaaagagttccgcttacgccaaggcaagccgtcaagtacaggtgcaattcaatacgacctgattaacgagcgagggcagcaattggtagttaaaaatgctatctggagaatcacgatggatggggtgactaaatga

SEQ ID NO: 47165 - DNA, 2871 bp, Acinetobacter baumannii
atgacttggtatgacacatttgcagatgatgagcagaagtcagtagaagaactccagagaaaagggattactggcaagccaactgttcaaaaggaagttggtattttcgatggcgctatctcttcaccttttcgcggtatggcaattggccttaacaaagttggtgatgcaatttcggcacccattgatgccgttgtagaccgtgttagctatagcctgaaagacgtttcaacaaacgaatttattgagccgtatgaagagttcaaggcaaagcgtgaaaaggcccgcgacaatctggtttatggaactattgctgacctagaagacaaagacaatacaggcattgtcgggaatattggtgttggtataggtgattatctctggcgtggtgcgctgggtgtagcaacaagtggtacgcttggcgctgctacgcttacaggtggttcaactggtaattacgtctataccgacttaacccgtaaaggcgtagatgaaaatactgccttaaaagtggctggtgtgaatgctgtgggcgatgcgattggtacagccttgcctattggttatggctttaagggtacaggtggtttagttgctgacgctgcattatctgtgggtggcgctactggcttaaacactggtatgcaatatgcgagtgagcagcttctaaaatctaatggctatgataagcaggctaagcaatatgaagttacaggcgaatctgtggctactgacttacttattaactcattaatgtttggcggtgcacgttacttaggttcaagacaaaatcaactagaccaagacgttgacgctgaaattaaccagcttaattcagatgattttgaaaccagtaatgatgtgttaaatgatgctctggtcaaaaatagctttgagtttgaagacacaactttgcctgttcaaactacagatccagttcagcaaaacaagcactatcaaaacctagatgctgctacggaacaaatcttaaaaggccagccagttagtgtgcctaatacagtgcaaggagagccgcgtagaaacacgattgattatgcaactagctcactacctacaaatgctaaacaaatcgcactacgcgcgaaacaagacggtatagaccctagtgttgctttgacgataagtcatatcgaaacaggtggcaaatttaatcatacagcgcaaaacccgacatcaagcgcttatggccttttccaagtcttagatgactcttggaaaaacttaggcggtaaagaccgcaacaatgttgatgagcaaatacgtatcggcttaaagcacattaagcaggccaataactacatacgtaaaaacttaggccgtgatccagttgcacatgagcaatatcttgggcacttacttggaccaggaggagctgtcaaagttctaaaagctgatcctagccgtccattaattgatgtagtgcgttcgtacgattctaaaaatgctgatgctatcgttaaaaataacggtatgtcggggatgacagtaggcgaagctattaataaatggcgcaacaaatggaaccagctaagctcacgctatggcggtgaaacaagcacagcttatgggatggatggctcaagctatgatttcgcttatgaagtgaaagactgggccgatttaattgcatcgaatgaccgtttatacggtgtaaatccgctttacccaagtgaactacagccacgtgaccgaacccgtgaagcatcgcgccagcaaattgaacgtatagctgacgacttaaagcctgagttattgggcgaatctccaatgttgtcaaacggtgcaccaatcattggccccgacaatgttgtcgaatcaggtaatgggcgtacgttagcaattggccgcgcttatgataatggccgagcagatgcataccgtgaatttgttcagaattgggcgaatagcagaggcatggatatatcaggtttaaatcagcctgttttagtgcgtacacgtcttagtgatgttgaccgtgtagctttctctcgtttagctaacgaaagcgatgtggcgcaattcagcgcaactgagcgcgctatgagtgatgttgatcgtctaccagactcaacactactaaaaatcaataatgatggttcaatcaatattgatggctctatggattatgtccgtagttttgtagaccaattgccacagtctgagcgcggatcagttatcacaagtgatggtcgcttatcccaagaaggtaaacgccgaattgaatcggcaatcgtacagcgtgcctatggcgattctaacctagtaactcgtctatctgaaaacttagatgatgatagtaaaaacgttctaaacgccttactccgtgcggcaccgcaactttctcagcttaatgatttagtgaagcaaggtggacgctttgagaacactatttctcaagacttggcgcaagctgcacaaaagcttacagacttaaaagcaaatggcttacaggttcgcgactatttaaatcaaggccaacttattgatgatggattaagtgatggagcaagaagatttcttgaggtgtttgataataaccgcaagagcgcaaaggcgattagtgaatccattaactctgagattcaggccattgaaaacatgggcgacccgcgacaaggctcattgtttggcgaaacaccagaagaaaaagccgcgcttgatgtgattttctcaaatccagatcaaccgattgcagtaagccgtattaattcaatgggtgagccagaagaattcaccatgacattacgtgactatcacgccgaacttgaagcagaaattaagcaatctgagcaagatattttagcagcacaaactgccttgaactgtgctttacaatttggagcagcataa

SEQ ID NO: 47166 - DNA, 309 bp, Acinetobacter baumannii
atgcgtgatgatcaaacaaaagagttagaagaactcactgagaaaatgactgatgaccttattcaaattgcatatgcagcaagtgaatgtggttttgaaacacctgaggatcgtggcaataaagtatggctctataagggactgaaccaatgcgcctcagctatcacaaaagttgagcaagtattggcatatcgcagaggaacattgccaccagcaagtaaagacgaggacacgcaaaagaaacatgaacaaaatctaattaaaaaagcagaagcagaagcggaaaaacttagacaacggatgagctga

SEQ ID NO: 47167 - DNA, 1677 bp, Acinetobacter baumannii
atgactaaaccaaaaatcagctttctagctttctttttaatttgggcagatatacaggggtggaaggttccagacttccatgcccttgtttgtattttcctagaaaacttctatataaagggccgtaccgcactgctcatgatgccgcgcgggcattcaaaatctacaattcttgatgttttcaatgcatgggttatttactgttggcctgaaacgcaaatactccaccaaggtactacagatgatgatgcctataagtgtagtaacgggactaagttagtcttagaaaagcatccactttgtgttgacaatccagaagtcaaaagaaaaaaaggtgaaacggaacgctggtgggtagctggcacggaagatgttcgctatggaaccatgttggcaaaaggcattctgtcgggggtgacaggtcaccgcgctcacttcatccaaaacgatgacgttgaaacaccaaaaacaacgggatcaccagaagcccgagaaaagctcacctacagattatctgaacaaactcacattgcctttcctggtgcaaagaagctttggatcggtacgccacactcacatgactctctttacgacaagattaaaaagctacgtaaagtagatatattggtgctcaaaatgtttgaaaatgaaaagcgcattgagaatgcattagcgggcggtaaataccttttagactttgagccaatacatgcttttgctgggattgggcaaggggcgaaataccttagtaaaggccaagactacactctaaaaaaagtaaatgatctctatgaagtgaccttggctaatgatcattatgtggctgatttctattcagaaggaatttgggcagaacgttttgatgcggaagaaatggcatcacgccgagaggaatgtaaaacccttaacgagtgggactctcaatatcaaatgcacgctaagcctattggtgatgtgcgtttagacccagataagatcatagcttataactgtgaaccagttcttaaacgagccaatagaaccaccatgtttatgattggtgagcgtcaaattgttggtgcaacattccgctgggatccatcatcaggaaagcttaagtcagatatttcatcaactgcattagtcttccatgatgatataggtaataaatattggcatagatcgattgcacttaagggcgaagtaattgaaaccgatgctgatggacgtgtgataggcggtcaggtttggcagctatgcaacatcatcaaggaattccatttatctaaagtcactattgagacaaatggtatcggtaactttgcaccagcagcgttaaaagctgctctaaagactcgtggaatacgttgtggtgtaacagaacagcattcaactaaatctaaaaataaacgcattttagatggtattgaagggcctttaatttctggcctgctatgggcacatgtatctgtacttgaagatgagaacggtgaagattcagcacaagtaaaacaaatgcgagaatttaacccagccattactgatcaaccggatgactatttagactcattagcaggtgcaatcgtagaagctcctgaaagagttggaaaatcactcaaccaaacagactatgaagaaacgcctaattggagaacaaacggtggcgtacatgaggccgccttagatttcgaaaattag

SEQ ID NO: 47168 - DNA, 2514 bp, Acinetobacter baumannii
atgtcagtgccagttcaaacgccatcaaaagaatatatcgcgaatggaacaacaactgcttttccattagagtttaattgtgataaagcagagtatttaattgtcacccttaatggtgaagaagcgcctgtaggttcatggacattggctaatgatactgtcacctttaatgtagcacctctaaatggtgtggtcgttaatttggaaagaaatacgccatttcagcgcaccactaattaccaactttatgacaactcatttcgcccttctgctgtaaacaaagactttgatttaatctggtggaagcttcaagaacttggttatcgtgatcaggttatttggctcgctttagttaaagagatttctgaccgtattgcaggtgatgacaatctacaaaatcaaataaatacgattgatgaatggcttggcaatttacaagaaaatgtagatcaaaatacaaatgacattgagcagcttgttaatgatctttcaaaagaaattgctgatcgcattaagggcgaccaaattctaaaagatatgttcctctctatgattgatgaagcaatcaatgaagggacaattaatgcattagcagttacgcatgttgatagtttggaagggctgaatgctatttcaaatgtatgggatgggcgcacaatctatgtaaaagatctgggtaactatcgttacgatgcattaactacatcttgggtgaaggcatatcaagatgctgataatgtgaaagatggtattgaaacgcagaaattaatcaataataaaacaattcaaaaggttgaatctatttctgacctaatcaacttaaatccaagagataatggtcaggtcgtacaggtattatcctttcatgaaggaaaagataggggaggtgattacttcaaatggtcagcaactttgagcaaatctctgcatgatggaggttatttcatagaccctcttattgctatacctccattagcaactttcaatacttattatttgccaagaaatagtggcaatggcatttgggtgcgtttaaataataaacaagatatttatgcggaggcatacggtcttgtaaagatgtcagatgatcctacagctgtatggtcatgtgctgcgattcagcaagcaatttataaagcttctgtaaaatcaaatactgattattatcctaaaactgcaagggttatgccgggtcgctactacacaacaaaccctattgtattgacacaaatagatggattttctgctcgtttaccagctttaattggtggtaatggtaatagtatttatgatgttgaacttataaagactacacaaaatacagtcggtcctggttactatggtggtgatgttgatgcagttatatttacatctgcaaagacatctggatcacagtacgtttacggggagaaaacttcagggttcacattaagtcgaactgatttagatgttggttatggatatttcgcacaaaattctgtccaaggttatcgaggaaatattcaagctgttggacatgcacaaaacatttatacaaatgattgctggatgacgcgtttggggtttatacgttcatatcagggtaagaaagggatcgcaatccgtggtggaacatcaaactttggtgggccactatatgtcgacatggcaaaagaacatggctatgatttttatgggctaagttattctgatcttaactgtgcttgtgatggggttggtgcaggcttggcaaatggcggtattgcttacgatttatcattctgtaagtctgttagtggtacatttgccgtagagaggcacaaaggtattgagttctatcttaataataccgatggcggctcggcgaaagggcgtagttatcactcaactgctgttccagcaccaacttacaaagtatgggttcaagctggcagcacatttagctttacaggatacaactggaaagaatcattagttaatctatctactgctgataaggcaaactatagacttacaaataaagtaaagtatcaagggacctcatcagttgaatattctggatgtgaattctcacctgagtttgctcgagatggcttcgcgggacaacttgatagtaagtttgcagcaaaggtagtggacgctgcttatagtgataatgctggaatcattgctcatacaattgcaattagtaatacagtattcaaacggctttgctggctcggccagtcttctgcggttgaattgctatctgcaaatgcagtgaatccaacatattcagatcgttattacagcaatgcttttgtgcttactgagggaactcctaatactattgctaatccaaaacccaaccggatagcaaaaacagcaatttcaactgattcagcgaatcccaccattttgtggtatttatatcaaagtggagcaattacaaattctcacttacgtggatatatagatgcagatggttggctctgtgtgcagcatagtgtggctgggaatggtttggaatatcggtttttagtggtagtttga

SEQ ID NO: 47169 - DNA, 1110 bp, Acinetobacter baumannii
atggctattaagatgcttaaatcccataatttttttaatataaagtattcattaatagttggcgcttcaattaccctacaattgttggcatacatactttactatgtaactgatagttatatatttttaggcatgtatttcttagccataatcccaaaccttatattgttgtttagatataaattaagcaaatcattcattgctattatatccattttattactgttttttatggcagcaagctacatgtcgcagacatatccgcttgtaatcaacctatataatataatttatggcattaattcacttatagcggcattcttactgtataaaaacaatgaaccagaaaagtacattaaaattgttttctggttcttaactgcaatcatctattatcatatttttaagttcggcttatctaaccccgacttgtataacgaggtatttgcaaaatctagtaggaactatgttagtgcatcttatgtaattattttgtgtctattagctctatgttatgagaagaaaaaagagacagttcccttaatatatgctttgcttactaccatcgcatgtgtttttttgttcggacgaagtggaatcgctttatcttttttaatcactctatttgtactaatacgacaaaaaaattactacctaattggcatatctacagccgtattagcaatagtacttttagcaaatctctcccttatagaaaactttgtttttgaaaagacgaacttctcaacaggacttgaaagtgaacgttctattttcttaaatgaatatttaaatcatattacttattcaacttacgatcttttcttcggaagaagcattaaccactgttgtacatggatcaccatgtttaatgggaatccacacaattcatttattatgggtcatattagatatgggttattacacaccttatttactttagccattcttatttacataatttcatccaagaatctgactcttatattttttggactaattattttgagcaggttttttacagatcagctcggactttttacaggttttgatatagcactgtatttcctattatttttagtatatcaatacaaaaaatataatagatag

SEQ ID NO: 47170 - DNA, 453 bp, Acinetobacter baumannii
atgagctctaaaatcatattaagcattgtttttataacatttttaacaggttgtaagctaagcctagatgaagaaaataaagatcttgttgatcctaaatactattccagtacatcacagattgattcacaaacctttcttctgctacacccatataaagctgtaattaatatcggcgaagattatacgcgcagccctatcctaggaattagccgcacaagcaaacaggttatagtgaaaacaaaactagatgtaaaaaatatagatattattttcgatgaaaaaattcatctcacaccaaatataataaaaaaagataatgatatttacactttagattcatttgatgaaattaaatccaatttaataaggtcaaaaaaattcactatagagttaaataagaagtctgattacaaatcatattatcaggtgtcaaacatcaatggctattaa

SEQ ID NO: 47171 - DNA, 372 bp, Acinetobacter baumannii
atgcaagaaaatgcaattccatgggttttaaaaatctttccagctgtgatcggggcaattcttgcacttgttttaagtggggatattgataaagacggaaaaatcaaagtttcaatgggagttatcacaaaattcgtctgtagcgtgacggtaagtttatatggggggtcagcattcattgagcactttgagtatcttaatcactcaacaatgttccaaggcttcatcatgctgattttcgcagtctttgggttattagtaatcggcattgtttatcagtcaattgcattactaaagggcaaaagtatgtctgaagtgattgctgaagttaaggcggcatttgtttctattattggcggcaaaggtagctaa

SEQ ID NO: 47172 - DNA, 366 bp, Acinetobacter baumannii
ttgttaaatatttattatttaataaattttaactcaatttgggacgaggggaatgctggatattttgttacaggatcaaaaacaataggtttgggcgcgggcataggtgttagttttgattactggcaaggtggtcgtagtggttttgatggcaaagcgatgacaaatactttatgtggtggttctgcttgtataggtctacatactgatacctctggaaattatgccggttggagtttttctctaggaggtgatagcggaggtggtatggttccaggggcttcatttacacactccactgattatactaagtcattgatgataagagacttgattcagttattaaataagaaaggaaagaactaa

SEQ ID NO: 47173 - DNA, 249 bp, Acinetobacter baumannii
atggaaaagcaacctattgatgaaaaaatgcaacaatactttcggttaatgcgtttacgtagagactttgtattatcagtattggtcatcccaacggtttttattattgtattattgctggtgagagcagaagaaaaatatctatctatctatctatctatctatctatctatctatctatctatctatctatcttccgataagtatgattcctatcatattgtttactatgttcagactattagctaa

SEQ ID NO: 47174 - DNA, 213 bp, Acinetobacter baumannii
atgcaatataccaaggaagttttatctataacttccattttggttgtatttgcatcgacatttttttgcttatatgcttggtttaatggaatttttaccttcgtatttgctatagatggtaatagtagtacaggagaggtttataggagatggtgtgtaattatttttagctctttgttctatgtatatactttaattgatccttttctataa

SEQ ID NO: 47175 - DNA, 780 bp, Acinetobacter baumannii
atgaacaaaacaatccaaagcttagtcgtagcagcttttgctggtttcgcagtcacaacttatgcaaatgaacaggctcagccacaggaaattcattttccagcgattgaaaagagttatttgaaacaagtaaaacgttatgaataccaagatattgctcgtttagatacaggactaaataaagatcaaattcgaactttattaggaaacccacaatttagtgaagggctttttgtagtaaaagtttggaactatgtgctagatatccgtgttcccaacacacaccagtaccagcgttgccagttgcgtattgattttgataagcactatttagcagaacgtttatcttggaagggtgaagcgtgtgaaggtttagttgttttgggagaaaataatcaggcaccagcacatagcactgtgattgcagatcgtatagcgagtgtcctatttgcttttgaccgatttgatgcgagtgcgattgaagaaggtactaatagcgttgtgaaaattgctgagcaaattaagaaaagtccaacaataactccaattattgtttctggattcacagacccattgggtaagtttagttataaccaagagttatcatctaaacgagcgaatacggttgccaagttactggtacaacaaggtgttgatgcaagccgtatacaaatacaggcgaatagccagaccgacatatacaagcagtgtagtgataacaatagttcacaacttattcaatgtttagcgccaaatagacgtgttaatataagttggtaa

SEQ ID NO: 47176 - DNA, 1167 bp, Acinetobacter baumannii
atgaaaattattactcatgatctgcttaccatttcaaatctctttatagattgtttatatcaaggggcacgaaatggtaatgcatcggatgatcctctacatcttttattacctgtcagtaatcaaggcggctttcgcatagttggtaaaaaaacagaacctaagttagtcgtccttacgacaagtatgaatgacccagattggcccgatgaggttgataaagaaacgggtatttttacttattttggagacaacaagaaacctggtcatgagcttcacgatacaccacgatatgggaatcttttattaaaaaatatgtttgcactagctcatggtagacttgaggatcgtttaaaagttccacctatattaatttttgccaaaggtggtggttggcgtgatgtagtttttataggtctagctgtgccaggtgctccacacctagactctaacaatgatttagttgctgtctggaaactacgtaatggtaatagatttcaaaattatcgtgctcaatttactatattaaatgaatctatggttagtagagagtggatttctgacattgtaaaaggtgatcctttaagctcagcatgcccttcaagttggaaaacatgggttgagcaagggctatatctacccttaaaagcccctagagcacttgaatatcgaacacgtgatgaacagttacctgaaacccaattaggtcaaattctgattaaaagaatacattctttttttaaagaagatccatataattttgagagatgtgcagggaaaatagctgaaatgatgttaccagctattgctggtaatatggactttacacgtcaatctcgagatggtggtagagatgcaattggttattatcgaattggagaaggtgcttccgcggttcttgtggaatttgcacttgaagctaaatgttacgctttggaatcatctgtgggagtaaaagagatttctaggctaatttcacgccttagatatcgtcagtttggtattttggtgaccacttcttttgtggcagctcaggcttataaagaaatcatggaagatcaacatccaatagttattatatgtgcctctgatattattaaattattaattaggcatggtattaatgacttagaaactcttgatagatggttgaaaagatttaagtaa

SEQ ID NO: 47177 - DNA, 1821 bp, Acinetobacter baumannii
atgacagctagtatcgcatataaagatttaatagaagaagcttttattgaaccaattagaagtgtaatggtaatagatgatgaatacccaacattaactaaccttatctctatattgcaaaatggtaaaagtcaaagctatagtccagctaacctagaaaggttgcaaaaaattatagagatgtgccatcaagaaaaggaatgggtggtagatgtatttgatggtaagaatccccatttagaagcagtcaaccatataccggaacgactaagacatagtgatctagttattttagattaccatttagatggtgataaaagccaagatgggagcaaagctcgttcgatattaaaaaaattggataataataaacactttaatcttgttatcgttcatactaatggattagatggggatattcaaaatgtttttaatgaaattctatatgaattcatggctgttcctgagattaatgtatttgaaacctcatcagaaattgaggaaaaaatagaacaatggttagatgttaataatacagatgggcatttaagaatactaagcaatccacttgatgttaaggatttacttaaacttgtagatcataacaataagaaaaatgtattaaagtacttagcttctgaacatttatttaagcctttttctgccgatattgatgagataaaagacggtattcaagtaaatgtaaaagagattgtaaaatggttaataaaagaaaaaatattagagattagtaaaaaatttcatggtaaccataattgtaggactttaaagtgggaatgggattcaaaggaaaatattaactatatctgtactggtagtgtatttataacagtaattaaaaaggaagatcatagtccagtagaggaaatttataaaaaactaatagacactcttgttaaattagatccttcaccaatgcacttattaattgcaaagatacgtcatcacatggatgagattgggttagagcaagctaatttgattacacaaaataaactagctcaagcaggctggttatatagcttattattaaattctaaaaataatgaattagaacatgataaggctattgatattcattgggaacagttaggacgtgctagcaaaacagatcttagagagttctctaagaaattatgttgcagtcttaatattacagcaaatccagaggaaatatgtaaacggtttttccaaatatcaaaacaagatggttttcaagcactttctaaccttaatgcattttcttgtactataccacctactagttcacatttaacaacaggtactattttaaagttaaatgatagttctctatggttatgtttatcacctgcatgtgatttggtacctgggcaacgggcaaatgcttggagagagagaataggaacagactataccgtaataaaagctgttaaattgaaacctgcaaatattaaagaggcaaatataagctcaaatactaatgaatatttatttgttaaacatgatgatggaatagtacacgcatattatatagctttggcaaatagtaatccaatttgggatgttttttatgcggataactccggccgtcttgatgaaaattaccaggtaaagctaacttgtattcgaaaggatgataatccatcggtaaaagtactacttacagctaaaaattatgatgcggaggttattgctgagttgagatatgaatatgcactaaatttcttacaaaaattaggaaataatcaaatgcgcattggactcggttatacaaatcagatgtttggggtggagcaatctataaaatcgaaaccgtaa

SEQ ID NO: 47178 - DNA, 2982 bp, Acinetobacter baumannii
atgaatgaagacgaaaaatattcattttttaaaacaagagctagaacaattgatcatttggggcgtgaacaaattgcagattgtcctactgcagtttcagaattatggaaaaatgcttatgatgcctatgctgaaaatgtagcactgcatatttttgatggcgatattccagttgcatgcgtagtagatgacgggcatggaatggatattaatgaatttaaaaataagtggttaactgttggtacagagtctaaaactgatggatttgaagtaactattgaagatcgtaatgatctacctaaaagacccaagcaaggtcaaaaaggaataggccgtttatctagtgctgctttagggtcgctattattattagtttcaaaaagaaaaaatggaaaatttgttgcagccttaatagattggcgattatttgaaaatccatttatttatttaaatgatttaagaatccctattaaggagtttgagaatttcgatgagatatataatttactacctgaactatttgatacattaatgggtaatatttggggggaaagtgatgatccaaatagaaatacaagacttgctcaagcttgggatcaatttacaaagcaagagctagaaaatgatatttctgaagaagagactacaaaagaaaagatcattaatacattaatctcggaagttttttttgaaaagcattttaaggtttggtcggtagcaataaatgaaaagtcgcatggaacagcgatgtttatagctcaacttaatgacgatctaatttatcagttgtcaacaatacctctactagatgccccagatacagagaaattagcgcgtgagcgtttttttcaaaccttatctaattttacagatccatttaataaagaaaatgaaccctcaattaaggattttaaatatcttgttcaagtttggaagggcgcatatcccaaaactatacttggggatttaattgagtttgatataggaaaattagaagatttagaacatatccttgaagggcaagttgatgaacaaggttattttagaggtagagttaaagcttttggggaatggatagagaatttcaatgtgcctcctaaagctgtatatagaacacggaaagataccttggttggaggtttccatttacgagtaggaacatttgaacaacgagtaaatagttcctctcttacagaagagcagcatgcccattttagtgaacaagccgaaaaatattcaggatttcgagtatatagggatggtttgagggttatgccgtatggtagagaagataacgactattttgaaatagaattccgccgctctaaaaatgcaggtagatatttctgggctaatcgacgtatgtttggccgtgttgcgattacgagaactggtaatcctaatctaaaagataaagcgggtcgagaagggttaattgataacaaagcttccaaaatttttcgagaaattgttcaaaaaattcttttagatgtttcagataaatatttgggttcaaaatcggaacttagagagccaactattgctgcaataaaagaaactaaagcattggaaaaagcagaagaagataagaaaaaattgcaatctaaagaaagatctagaatcagaaaatctataaaggagaaaactgagcctctgttaaagcatatcaaagatttagagggttatagaaatactattagtcatcatttagaaatgagtaatctggatgagcttcagcttctaaaaaataaaattgataatttaaatgaaattacgcaatctttctctttaagtcctattcctactaatttaggtcgactagctgatgattatagagcgtatagaaagcatgaattattggctaaagaattagtaaaagaactgattaacgtagttaatcaagctattttagactcaaaagatagaagtgattttgaaaaaatttctgagatttataggtctaaattatcgagtgtaaataataaaattactcatttagcctctcaaggcaagagtatgctatctaaacagtctaatgagctagatgatttaataaaaacttgtcgacaacagtttaaagtattaggtgagtctataattgaagatgtaaagcttcaacggattactattgaagacgcattacaaaagctggaagagggtcaagaaataatagaggttgataacgcacaaaagttaacgccatatattacagcgttagagcgaattaatgagcagatagacctagaaggtgttgccattcatagtttaaatgaatcagaaaaatatagaagtgagttgtcaagattttatagtttggctcaactaggtattactgttgaaataattggtcatgaactacaaagtctagataaaactgttactggtaatttgaaattattagctaaggaagacttgactgataaacaaaaaaatattctacaagtaataactgatacacatagttcattaattaacaaactacagtttttatcaccacttaaattatccggtgagcaaattattagagaaattactggaaaagaaatatatacttatataaatgattatttctctgagtattttgatagtcagaatattaaattagatgtatctagtgattttctgaaaatcaggataatggataatatttctcgtattatgccagtatttattaatttaattaataatgctcaatactggacacagttcagtgaacaagaaagaaaaatactattagatgttagaaatggagaagtaattattgctgatagtgggccaggtgtagaaccagatgatataaatagtttattttcattattttttactcgtaaacaaagaggtggtcgaggtgtgggcctatatttgtgtaaacaaaatcttcaagcaagtggtcatcaaattagatatgaaactatagacaataaaaagttgttatcaggcgcaaattttgtaattcaatttaagggaatggggaaccattaa

SEQ ID NO: 47179 - DNA, 1176 bp, Acinetobacter baumannii
atgcaactgaaagcaatagacttatttgccggcgcagggggatttacattagcagctcatcaagctggtgttgatgttgtagcagctatcgaatgggataaagcagcagccgagacataccgtcgaaattttattgaagaaaaagcaattaatataaatttaattaataatgatattaatcaagttaacttatttgaactaaggaaacaactaaacttagaagtcggcgaattagatttaatattaggtgggcctccatgtcagggattttctacgcaccgtataaaagatgctggtgtagatgaccctcgtaatttactacttttaagatattttgaagttgttcatgagtttagaccaaagtcgtttttagtagaaaatgtttctggcttattatgggaaaggcatgctgattatttaaagaaatttttagaattagcacaagcagaaggatatgaaatccaattttgtgatattttaaatgcaaaagattatggtgttcctcaaaaccgtaagcgtgtttttatatatggggttagaaaagacttaaactgttcaaatattatatttcctccagaaccaacacattttgctccgacctctggaaaaacatcaatctggagaactgcttcctcagtttttgaaccaatacccaacagtattattaagagatatatagaagaatattttgttccaaagttaaaagtttctgaagaagaagcatataaaattttgagtactttagaatttggtacaaaattagataaaaatgacccatgtaatattcatatgaaaccgagtgaaaatatgataatcagatttatggatactaaactaaacgggagtcgtgaagatgcaggtgaaaaacatcgtttaaaatgccattcaaatggatataaaggccataaagatgtatatgggcgtgttattattcatcaacctagtaacacaattacagcaggttgcaacaatccatctaaaggcaggtttgttcatccttggttaaatcacggtataacattaagacatgcagcccgattacagtcatttccagatgattttattttttatggtaatgctacagatcaggcaaaacaaattggtaatgctgttccacctctattaggatctattttaattaaacaaatttgtttaaacttaaaaaaaacaaactaa

SEQ ID NO: 47180 - DNA, 900 bp, Acinetobacter baumannii
atgtttaaaggaaaaataagaccagtccaactgaaagacgcagaaatgattttaacatggcgtaatcaagattctgtccgtatgaatatgtataaccatgatattattgaattagatgctcatttgaagtggtttaattctattttggtaaatgatacttgccgttattttatttatgaacaaaataatacaccattaggtgtgctctccttcaatgatatcgatttcaaaaataagaaagcatcttgggctttttactctggagataccacggtacgaggtattggttctgagatggagcaactggcattagattatgcttttaatgaattagatttaaataaattatgttgtgaggttttagagtttaattttgctgttgttaatttccatcgcaaatttggttttaaaatggaaggtattaagaagcaggattactatagagacggtaaattctatgatatctatcagttggccctgttcaaaaaagattatcaaaaaatacagtcgcaagcttatagcccaatagaaaaaagctatgtatggagtttttctattccagaggaaaaaattgatcagtttgctaccttatctggcgataaaaatcctgttcatttggataaagaggctgcgatttcactgggttttgaaaatagaatcgcccatggcgctttacttgttgctgagatatcaaaagttgcagctatggactatccaagtagaaatgcaatttatttaggacaaaaccttgattttaaagccccgatttatccaaatgtagagcttactggaaaggcgaagttaaaaacacaaataggacgttatgtcattattgagtatagcgtttatcaggaagaaaaacttatagctcaaggcgaatccgagtttttattaagctag

SEQ ID NO: 47181 - DNA, 1083 bp, Acinetobacter baumannii
atgataatgcggataggctttagagttgatgctgctaaacatattggaactggtcacctacagcgctgtttaactcttgctaattatttaaaggcaaaggggcatcaatgtattttctattgtagagactatgggcaagctttttataatttagtattgaatgcaggcttccaacttgaaattataggccaaacaacaattggcagtttgccaaagtcggaaaaagactggttaggcataagtatagaacaagacagtgaagactttattgaaaaaataaaagagaaaacgatagatatctgtatcgttgatcattatgcattaaatgttaattgggaacggattattcggaagcatgtttcgaggttagttgttatagacgatttagctcgtgaacatgaatgtgaaattctattagatcaaaattttttcccatattataagcagcgctatgatcttacaacaccattaacaactattaagttgttggggccagagtattgccttcttaagaaagagtatagtctgtttagatcgttgagaaatcaagaacaaattaatggtaataagattttgattaactttggcggtgtaggtaattttacacttttgcaaaaagttatatctgtaattaatcgtgtggataagtatgattatattttaattacaggaatgctagagaaagagcaatttcagtatttaaagagtttagctactgataaatcaaatatcaaaattatgcaatcttcattaaatatggctgaattaatgaatagttctagctttgctataggggcatgtggttcaacggtttgggagcgtttttgtttagggttaaatgcagccttagtacaagtagcagataaccaacgtatcttattaagttatttggctgaggaagatttaattgataatttaggcgatagtaacgatttaacagaagatcgattattcgaatttttaagtaaattagatttcaccagtgtttcttaccgtcaaagaagaatcaaaataatggaacttgttgatgggcttggtgttgtcagaacatgtgaaaaaatcttggagttaagtaatgtttaa

SEQ ID NO: 47182 - DNA, 2058 bp, Acinetobacter baumannii
atgttgttctataaaaatattttgaccttatccattttggctgccatatctatacctgtatttgcagcagaaaatgaaaatgttgagaagttagaaactatccgcatcaaggcgcacccccttgagcaaacttcaaaagattttgcagtcgcagatactgtagttgaccaaaagcatttgactgaaggggccgccactattggggatgcgctcaatagtgaggtggggatttatgcgaatcagtttggggctggttcaagtcgtccggtgattcgtggccaagatggaccacgtgttaaagttcttcaaaattcatctgaaaatgtggatgtctcaactttgtctcctgatcatgctgtaacagtagatccagttcttgcaaaacaagttgaagtgattcgtggaccctctactttattgtttggtgcgggaactgttggtggtttagttaatgttattgataacaagatccctacacaaatgcctgaaaatggttatgaaggacaagttggcttacgttacaacactggaagtgatgaaaagctggcgagtgctggggtaactgtagggttgggaagccaagttgcattacgtgttgagggggtaacacgtgatgcgaataactatattgcaccaaactatattcatgaaggtgaaaaagagcgccgtgtagacaatacctttgcacaaggtgattcagtgaacgtggggttgtcttggatttatgatcgaggttatacgggtatttcgtatagtaaccgtcgagaccagtatggtttaccggggcatagccatgaatatgagacctgtcatattcatgatctaagtttacattgtggagaccatgaccatgaagggcatagtgatgaagaagctcatgaccatgagcatgaacatggcggtccatggattgacttaaagtctgagcgttatgattttaaaaccgagttaaatgatccatttgcaggcttccaaaagttacgtgcccaagcgagctatacagattatcagcatgatgaaattgaagaagggacaatcgcgactcgattccaaaacaaaggttatgatgggcgtattgagttagtccataaccctattgctgattgggaaggggtaattggtacccagttaggccaacaaaaactaaatttaactggtgaagaagcatttatggcaccgaccactaccaaaaagtggagtgtttttgctttagaacataaacaatggaaagatgttcattttgaactttctgctcgtgcagatcagcaagaaatcgatgtagatgataactctaaacaagattttgacggttctgctttttcctatgcaggtgctgccaactgggagtttgcgccaaattataagctttcatttgtagcatcacaccaagagcgtctgcctcttgctcaagagttatatgcaaatggtgcccattttgcgaccaatacttatgagttaggaaatgatcaactcagtaaggaaaaatcaaataatgttgagttaggtctgcattttgataatgacaaacttgattatcatcttcatgtttaccataactggtttgatgactacatctatgcgcaaacccttgaccgttataaagacttccgtttagttcaatacactcaagataaagcacgtttctatggtgctgagggtgaaattggttatcaaattacaccaatgtacaagatcagtgcttttggcgattacgtgcgcggtaagattgatgccgagggcaatgctccccgtattccggctgggcgtttaggtactaaagttgatgcagattttggtgatggttttagtggttctgctgagtactatcatgtctttaatcaagataagattgcggcttatgaaaccgaaacagaaggctacaacatgctcaatttaggggtagcatactctggacaatatggtgcaaaaacagattaccgtgtttatatgaaagcgaataacttgttagatgacacggtttatcaacatgcgtctttcttatcaaatatcccgcaagttggacgtaactttaccgtcggtgtagattttagtttctaa

SEQ ID NO: 47183 - DNA, 765 bp, Acinetobacter baumannii
atgccttttacaatctcccatgcagttatcgcccctccacttgctaaattgagccgaaacacgttacccattgccgccttagcaattggcagtatgacgcccgatctttaccgcttatttacaatgcaatcaggtatgctgactcatcaatggaaggggcttttctaccctaaccttgcattaggattattattctgtgtcatttggtatttactttaccgacctgtggtttaccgcttttttggtatccaacacgatttaaaactagattcttttagacatttttttagcttttttattggaatcataattgctctactcattggtatagcaacacatctcatttgggatgggcttacccactcagactttagaacttttatatttcaagactttttatcgcaaactgttcacttgtttggccgcccttatccattgcatcgccttcttcaactcggttcttctgctctggcattaccttttttaggctggatgagtattcattactatcagcgccataaacagcattggaaagtaaattataaaattaaaatttttgcttggtgtttatttgctttatctacacttttaggtttattttctttttgggactatgcccgttatattccccatgaggtttggcattctgatacctattattttactggccgctctattaatgagtttatgcaaggttggttaagtacgtttagtttgggatgtctattattcttatttttagaccgacaacaaagaatgggctaa

SEQ ID NO: 47184 - DNA, 1779 bp, Acinetobacter baumannii
atgatgcgaactcattactgtggctctttaactgaagcccaaatcgaccagaccgttacattatgcggttgggtacatcgtcgccgtgaccatggcggtgttattttccttgatatgcgtgaccgtgatggtctcgttcaagtggttattgacccagatactccagaagcatttgcaactgcagataaagcacgttctgaatatgtattaaaaattacaggtcgtgttcgtcgccgttatgaaggtactgaaaacccaaatatggtgagtggtcaaatcgaagttttaggcaaagaaatcgaagttcttgctgcatctgaaactccaccattcccattaaatgatgacactattaacgtgtctgaagaacaccgtttaaaatatcgtttcttggacatccgtcgtccagaaatgttagagcgtttacgcttccgttctaaagtaaccaacttgattcgtaactatttagacgatcatggtttcttagacgttgaaactccgattttaactcgtgcaacccctgaaggtgcgcgtgactatttagtaccaagccgtgtacaaaatggtagcttctatgcacttccacaatcaccacaattattcaaacaattgttgatggttggtggtattgatcgctactaccaaatcgcgaaatgtttccgtgatgaagacttacgtgctgaccgtcagcctgaatttactcaaatcgacattgaaacatcgttcttaaacgacgatgacattatggatttgatggaaggcatgactattaaattatttaacgacttgcttggcgtaaaatttgaaaaattccgccgtatgccatacagcgaagcaatgcgtgattatgcatctgacaaaccagacttgcgtattccgttaaaactcgttgatgttgcagatttaatgcaagaagttgagttcaaagtatttgcaggtccagctaaagaccctaaaggccgtattgcagcacttcgtgtaccgggcgcaggttcattaacacgtagtcagattgacgaatacactaaatttgtcggtatctacggtgcgaaaggcttagcgtacattaaagtcaatgaaatcgaaaaaggaattgaaggtcttcaatctcctatcgttaaattcatcgaaccaatcgtaatgcaattgcttgaacgtgttggtgctgaaaatggcgatatcgtattctttggtgcggacaaagctaaaattgtaaatgatgcaatgggtgcacttcgtgtcaagatcggtcatgacttgaaccttgcgacttgtgagtgggctccactttgggttgttgacttcccaatgtttgaagaaactgacgatggcaaatggacttctgtacaccatccattcacattacctaaatctagcgtagaagacgtgaagagcaacccaggcgaagcactttctgttgcttacgacatggtattgaacggtactgaagttggtggtggttcacttcgtatttacacattagaaatgcaaaaagcgatttttgaagcgcttggtatttccgatgaagaagcagaagaaaaattcagcttcttactcaatgcgcttcgttacggtgcacctcctcacggtggtttggcatttggtcttgaccgtttagtaatgcttatgactggcgcgacttcaattcgtgatgttattgcgttccctaaaacgaaaactgctgaatgtccacttactcaagcaccggctcctgttgaagcaaaccagcttcgtgacttgggcatccgcttacgtgaacaacaaaagaaagaagcttaa

SEQ ID NO: 47185 - DNA, 1029 bp, Acinetobacter baumannii
atgccgattgataccatacaacaaacacttcatataagacgtaaaaaaaatacacaagtctttcgtaatattgcccgactttgggatgctggacaaaagtcacaaacagatcaagaactcttaaacgcgttacatccctggcgtgaagatcataaccttcgttttgtgaataccctgtcttatttattaagtatttgcagtattacgacgctattatttggatatttttttcatcctcatattcaatatagttggagtctattatgggcatttttaactggtttcctcgcctatttgctctatgaaccgcaaaaacctttaactgaagttattcattatttagaacagcgtatgactactttacgttatggcctaaagtttcagcagttaccagcttatcttccaatacaagcccaacccattttagtcttaagcaaattaaaacaacactttccactttttaaccgaggcaatgaagcgaatgaaattaccgagtttgcttcagtaacatggaatgacggcattacagatcatcaagtcctgctatttaaataccactatgtaaataatttacctattcttcaagaccagaacagcgataaaaaaatagtaaaagagattcataaagacttatggggcgcttttatttttcaaataccagctttaggtattgctgtaagtaatcaacgttctcgcttttttgaaccatacttaagcgaatggcaaagtagcgacattctcattaaccaagaactgagtattttcggaaccgaccagcaccagttagctaaagaaatgagtccaagtctaactttaaaacttcatgatttttttcaacattttagcggggatttaatttatcatcatgaagagcaaatattatgttatctcggtgagcaagatctttttcaaaccaccagtaaacgtagtgaaattcatgatattcccgcattacgtggtcacttacgtaccatgactataccgcaatatgaaaaatttcagcaattcatgcttaatttaattaaataa

SEQ ID NO: 47186 - DNA, 435 bp, Acinetobacter baumannii
atgcagcttgcaaccaaaagctttcttggcttgtgtttgatatgttcaactgccggagcagttgaacctgctgcgacaccagcaacgcctccaactgtagctaaacccgcgactacaacagcaccaacctcaacacaaccgcatacagcagaacaaatcgcaaagaacaagcaacagcaagatgcaaaaattaaggctttagttcaagatcaagcatctcgtctaaaacagctagaacatgcaaaccttgaagcgctagcacaaaaccaagaattgcagctaaagaacgataacttgtctgttcaggtacaagttttacaaagtgaacgtagtgctcaaatgttcttatatggcgcagtaactcttgcaggtggcgtactgcttggcttctttattgcgagttatgtttacaccaaacgtcgacgtcagtggtaa

SEQ ID NO: 47187 - DNA, 270 bp, Acinetobacter baumannii
atgagtggattaaaagttaaaacatgtgaattttgtgatgatggaaatggcgaatgcatcttcccttattacggtcttgctcctcatattcacacaaaaccaattggaggcacggtatttctagatgagtcatttcctgaaaactttattcctgatggggatggtttaggtatgtatacacattgtctgaattgtgggggtgacggcacgtttgaaggcactcaattagaagttaaagcggaaagtaaggagggcttattgcatgactga

SEQ ID NO: 47188 - DNA, 465 bp, Acinetobacter baumannii
atgacaggtttgaataagttaagaagtgagtttgaggctcaacacagtgacaaggttttcaagatagtcaaatttgatgaggcaaccaatgcatattgcttacatgctcatttgccactaactgaaattaacctatctgccctagccgaaattaattatggatgggatttgtggcaaaaagccaaagctcaggcggtgccccaatggataaatgttgaggtgggtgttcctgttaattttggaacgcgagtaaagataaagcgcaagtcgtgggatgaggaagataatcttattttcgttgagtcagaggctacttatgacaaagattctgacttttgcgagctttctaacagaacttatgaatatgaaacttggtttgatcatgaactaaaaaaatatcttgaagaagatgaaatcacccactgggcaccattggataaaagcgaatcgggagctgagggatga

SEQ ID NO: 47189 - DNA, 369 bp, Acinetobacter baumannii
atgacagatcaagaatacagagggaatatgaactacccttttcaagatcatatcgtcttgaatgtcgaagaaaatgtagttccttttccaagaacaaatctacgtaagtgccaacatgctcaagtagagattgacactaaagcattggaacttacatgtatgaaatgtggcgtgaaagtcaatccagtgatttggataaaagacactatgcgttattgggcaagacaacaaacaaggattacagagcagaaaaagcagatcagtgacgaccttgaggagctaaagaaaagagcccgaaccaagtgccagcactgcaacaagatgactgctattaatttaaagaatttaaaatttacagtaattgggtga

SEQ ID NO: 47190 - DNA, 660 bp, Acinetobacter baumannii
atgaagctattccgatgctcaagcctacataaacttgtaggcgaccctaaaactaaaggctcagttcttagcgatacagctaagactgagatcagaacaattgttaaggaggacttgaccacgttcaagtctttcaaaggcaaccagtacacggctaaaggtaatgcgcttgaagaaatcgcaattagcctgtctggcaaggttcgttttcgtcaacttcaaaaacacagtggtcgagttagcaatgacttaatcactggtgagtgtgatgttcttgatttgaatagtaagctgattcttgatgtgaagtgtacatgggatattggcactcaccctttctttaaagatgaggcagaagaaaaggcaaagaaatctggttatgactggcagatgcagggctacatgtggctttacgactgtgagcaagcaatggtcgatttctggctactaccttgccctatcgagcttacaaatgattgggatgatcgagaacagcttattgatttagttgagcgtatcgacttaagagaacgtttaacaactgtcacctacaaacgtgacgaggcaatgattcaaaagatcaaagacaaaattccacatgctcaagagtactacgcaaagttatatcaagagcgcattaaagcgaaggtggcagcatga

SEQ ID NO: 47191 - DNA, 666 bp, Acinetobacter baumannii
atgcttgctcagaattgggggaatattcagtacggtatccgtgaattgtcttctgaaaatggcgaatcaacggttgaagcatttgcttgggatgttgagacaaatactcgtcaaacaaaggtatttcaggtcccacatattcgctatacacgcaatggatctaaaaaattaacagatccacgcgatatttatgaattggttgcaaacaatggtgcgcgtcgtctacgtgcatgcatcttaggtgtaatacccggtgatgtaattgatgatgcagttaatcagtgtgaaaaaacaattcatgcaagtgccgacacttcaccggaagctgtacaaaaactagttgtagcctttgagcaatttaatgtcaccaagaaagacattgaagactacattcagcgtcgtcttgacgccatcacggcagccaatatcgttgcacttcgcaagatttttactagcttacgtgatggcatgagctcgcctaaagactggtttaaaaatgtcactgtgaaggaagttggcgaagttcaggaagttaaaccaactgtaccagacaacgagttcccggttctcttagagcagatcaaagccgatgcagttactaaagaatatgtattagaaggctatgcacttactaatgcacaaatagctgaggtaaatgcactatga

SEQ ID NO: 47192 - DNA, 1089 bp, Acinetobacter baumannii
atgaagtttaacttaaaaagaataagtggatttttaattattacatctactcttattttaactgcttgtagtggtgaaggctcagatcaaaatacaaatgatcaagctgaaagtaatttagaaaaagaagacactatttataaagtttattatcaaccttcggatatttcttcaggtatctatagtgacttttttgaaattacgccatattcaattaagaataatgagattttctttgcaaagtcacataatcagccattagaaactgaacttttaactgagcagaaagttttaaataaagggaccttacaaacgaatatcgtgaaaaggttaactcctagcagttggtcttatgagcgaatccctaatctaaaacaaaatttaaaatttgagattgtgaaattagatggagaaaacatctttgatcgtgtattgccaggctataaagaatataataatttagaaacgagccttaataatcaacttgataaaaatttaattgacttctatcaaaactataagaatgttaggttcccaaaaaatagttactgttatcgtctaaaagagtctcaatggaatcaatcttatatttcatatatttctagttttaatacaaatccttcatttagtgagagaaaaaagtcaattatcgaaagatataataacctaggcctagataaaaagtattttaggcttataaattcgcagtggtatggttataacttagttgttttagaaaacctagaaaatggtgatgtccaaagcacattaggaaataataatgatcagtctgctactattgattttgtatcaagcagcttatggaatgctgataaaagtttggcttttgagaagtcacatctttattcgacagatgacaacccgcttaatagcgtacactcattaattgctttaaaacagaagttaaaaattgcagatcttgaaaaaggttgctttgcttttaacactcaagcagctcaagctattcaaaagttaaatttggttaattggaaaccgggtgatagttcagttattgccccattctttggtctaagaacttttattgataatagaagtcaaaaacaataa

SEQ ID NO: 47193 - DNA, 690 bp, Acinetobacter baumannii
atgtacaatcaattatgcgacacggtcaagatcgtaccagctcgaagaaaaattggtaatacacgtatcagtgtatccggactgtacccttttaaaaaagattctgcagttccttttgaatctacacttgaacgagattttctcatccgtttagaggttgatcctaatgttcttgctgttgagtctcaaccatttactattgagtatgttgataatggaaagaaacgggtttataccccagactttttagtaacatataaacatgacaattatctcccttttatccatcctaaattagttgaagttaagccagcagcggagttagaacttaatttaaatctatggaaatccagataccgtgccgctatggctatttgcaaagaagaaggttggaaattccacattgcacatgaaggacgtattcgtgatcaaatatggtcaaatgctatgtttctgcaaaaataccgaaaaatgttcttctctttcgccgattcaaaatttttaatggactatgtaagagatagagaagttgtaacttttgacacacttttagctcggcatttttccggtaaatgggctcgtgcaaatgggattagtcaaatttggtatttagttgctcatggctttttagcatgcgatttgagtcaacctttactgccttctactgaactttggataagtgggaattaa

SEQ ID NO: 47194 - DNA, 1890 bp, Acinetobacter baumannii
atgaatgatagacgtgtgaatatcaagattgctgctggagagtcagttcaggtaaaaggtataccgcatacaattattgagattattgaccttaaatctgtctttgttgaaaacaagaatacgggtagaaaaggtattgctgccataagtgaattacagccagcattgcctactgaaaagtatgaagatatagatctcattcctgataaagactgggaggaagctgaaaggcgcttcaatataatccgcccctttattgaggatggggtgagtggacgtaaggaagtggagttacgtgcaaagcaacatgatataaatccagcaactttatacagatggttaaaaatatataacgcatacggaacgattgatggactgagacctaaaaaagaggggttgcctcaaggtcagaagatgattaataagcatgctgaagcaattattgaaaaagcgattaaagatttatatctgactaatcagagaataagtgttcaaaaagttgtacttgaagtgaaacgtttatgtcatgaatatcatattcttgacgtccctcatgcaaataccgtacggaatcgtatagcagcaatcagtcaaagagaagttctgcgtaaaagaggacataaagaaaaggctaataataaatttaccccagccgcgggaaaatttcctcatgcggattacccgcttgcagttgttcagattgaccataccccagtggatctaattctggtggatgattttaaccgacaacctattgggcgtccttatctaactcttgcaattgatgtcttttcgcgggtaattgtcggctattacctgtctttagatgcaccttcggtaatgtctattgccatgtgtgtttctcaagcagtattacccaaagagaaatggttggctttacgcaagatccaggctgaatggcctgtttggggaattatgaatacgatccatgtagataatggtcccgaattccattcagaaactttcagaaatgcttgtatggcacatgatatccgtctggaatatcgacctgttaaaaaaccacgctttggtggacatattgaacgtttgatgggtacttttgctacagatattcatgcagtaccaggtactactttttctaatatttttcagagaaaagattatgactctgatactcaagccgtttttacatttacagagtttgaggattggctgattgattttatctgtaatgtttaccataaacgaaaacattcagctttaggtacatcacctctacatgcttttgaacagggtatctttggtgataagaatactttaggttctggagcagccagattacctgcaaatgatcataattttttccttgattttttaccgagttttgaacgaacaatccaaactacaggtgtaactattgatgggctgtcatattatgcggatgtattgagaagttggatcaattcaattgaccctgataaccataaagagaaacgcaagtttatttttagaagagatccaaggaatattagtgaaatatggttctttgaccctgaaataaaaaactattttaaagttcctctagcagatcaaagtattccaccctttagtatttgggaacataaaaaaattcaggaattgaaaaaagaaactggtgaatatttaaaagatcatgagcttggacaggctttagctaaactgcgtgaacgagtacaagaagcgagtattaaaactcgtcgtgctcgcagaacatatcagcgtaatactcaacatcaacagagaattaaccctgcttcaattcaggacaaaaaatctcaatatgagagtaccgttatggatcaacaatttgaaagcttatatgggttattacctttagatgaggtagaaaatgatgaggatatttcatga

SEQ ID NO: 47195 - DNA, 852 bp, Acinetobacter baumannii
atgagtaattatccacatatttttcaggaatttcgccctattgttgaccaatctaatgaggacagactctatttccttgaagaggaccgttggataggttacccagcagcgaatgatctactggatcaattagcgggcatgctcactcttccaaaacgaagtcgtatgcctaatttactggtgttaagtaaacctaataacggtaagacttctatcattaaccaattttttaagcactatggagagggatatactaatgagcttaataatgcagttaagcctgtgattgttgttcaagcacctgtttctcctgatgagaaagctttatatatggctatcttagatagattttgggaacccttccgcgaaagagatcctgttgcaaaattaagataccaagttgttcattgcctcaagctttatgaggtgaagttacttattattgatgaaatgaactctttgttgtgtggaactcctattaagcaaagaacagttatgaatgcgatcaaatatttgtgtaatgaaacacagataccggttgttggttttgggacggaagaagctgttcgggtactttataccgatccacaacatgtgagtcgttttcgaattgttacccttcctttgtggcaacttgataaagagtttcaggctatggtaaataaatttgaaaaagtgcttccacttaaacagccttcaagattagctgagccagcaactgtaaagtatttacatggcattacagagggaaatttaggcaatttacgcagccttttaagggaagccgccaagaaggctattattaccgggcaggaatacattaattatcaattattagaaagtgtgaagtaa

SEQ ID NO: 47196 - DNA, 1086 bp, Acinetobacter baumannii
atggttcagattgtagagactcattcttgggttattcgtagacttccctatgaagatgaggctttatcctcatggctgatacgagttgcccttgagagtggctgtgatccactgagcttaactgggctactttggcctaaatggagagcatgggctgtagatatggataaaggacttgatcaagaatatttagatatattagtccgcaaggcaggtaccagcccggatcacttcaatacctcaacttttaagacattatttctacaaaatagtgaaataaaccttgaaccatggatattagctttaggaacacggaatcgtaaacataaaagtggttggcaatattgtcctaaatgtttggaaagtgatcctgttgcttactttcggctgaattggcggtatgtattgcacgtgggatgtattaagcataatcagcgcttattagatcaatgtccccattgccataaggctattcaaccaagattattggaagctcctgatcagactctatcttgctgtgccgtatgtaaagagaaactttttgatgtgaaagctaatgttatagatcacaatgctttggcattacaaaaagactttgatcttttccttaaacaaggatatgcaatttatgatgatactttaattcctatatcagagtggttgagtgtcattcaattatttaatcaatttattcgaaaagttcttagaagttccttaaatagtaaaggatgggcatttttaaatgcgctggatattagagttccccatcctcaactttcctcgacgggtttaatccttagtcaaatttcagtattagaaagggagaaaatatttgcttgtatttctcaactgttaaatgtctcccaaataaaatttattgaaacagcacattctttaaatatgaatagagcctctttttgggataagagatgtaaaataccagaaatattaatacctgtagaaaggcaactagacaaggtttctcgggggtatatgttaaaggaaaaggtcctaagtaccccaagaccaacatgtaaaaaagctatattacgaaagatgtggagattgaagcgaaaaatcttataa

SEQ ID NO: 47197 - DNA, 894 bp, Acinetobacter baumannii
atgacaggtatgttcaataaaataggaataaacagtactgcttttccgagtttaagccctgaacaattggttgaagcaatggtcaagcttggatatagaggaattgaatggcgtgtagctgagactaatgaactaaaccctaatatttcatggaatgctgtctcaaataatcgctgcacagttcagccaaatctgaaatcaattgaacagatcactgatctttgcaaacaagcaaatatcgaaatttttgggctaagcccatatattcctgtaggtgacaaaaattacgccttaaaaatgcttgatctagcccatgttgcaaatcatgcacgcgtacgtatttgggcacccttcaattgtaatggttctacttatcaagaaggatattatcagtttcgtaaattcattgatgagatattaatgcgggctgaagagctcaatgttcaattagctctcgaaatccaccaaagaacaatttgttcgagtccttcactcgccgtgcgagtagcagaacattatcctcataatttacttggcgtgatttatgacatggggaacctcgctattgagggccgagaggatgtccaattatcgttagatttaattggaaaacatcttacacatgttcagataaaaaatgttggttatcgaccattagcagagaatgaaggatgggcttggtattgggaaactattgaaaatggtgttttgcctattcctaagatgctgagtaccgtgattaaaaataattttaatgattggctatccattgaggatttttcaagtcaacgaagtgatttagaaaagttaaaacacaatatcgaacttattcgctcttatttagatggcgatttctatgcaattgaaaaggagttggttgctcatgccaaatga

SEQ ID NO: 47198 - DNA, 780 bp, Acinetobacter baumannii
atgccaaatgaaatgttttcaacacgggtagctcttgttactggtgccggtggagaaattggacaggcactctgccgtcgtctacacaaagatggattcaatattatagcggttgatatttctgcaaaagttgcgaatcaacttattgacgatttgaatcaggctcgcaaggaaagtgctcagcttatacttgcggatttgggctcttgtaatgaaatcgaagctttaataagtgaagttcaagctaaatataatcaagttgatgtattggtaaataatgcagccttaaatttaagaggctcaatatttgacttcaaagcagatgactgggacaagatgtttgcagtaaatcttcgtgcacctgctttactgagccaaaagttaagtaactattttatagctcaaaatagtggtcgtatcataaatattgtttcacggtgttgggtcgcaggcggtccaccagcttacgtatcttgtaaagcggggctagtcgggcttactcgatcaatggcaagagaattagcaccctataacgtcactgtaaatgctattgcaccagggattttaccatctgcttttactcttgatgggcgcgatatagaagcttttaacaaaattgcggaaaacgcaattgaagatacacctattaaacgtctgactactcctgaagatgtggcaaataccgcagcatttctagcttcgaatgattcttcatttattaccgctgaggtcatacatgtttgcggtggaggtcaattagctccattcgggcgaagatag

SEQ ID NO: 47199 - DNA, 1323 bp, Acinetobacter baumannii
atggctaactcatctgtggatgttaacaaacatgcaaaaaaagctgcttttagcagtttcttgggaagtgttgttgagtactatgatttctttatctacggtacagctgcagcactggtatttaatcagattttcttttcacaagaagataaaactactggtacattggcagcattactaacatttggtatcggatatattgctcgccctgcaggagcattgatttttggtcatatcggcgataaatatggtcgaaaaaaatcattaatgctagttttaatgttaatgggattagcaacttttggtatcggtatcttaccgacatatcaagatatcggaatattcgcacctttatttttagttttctttcgtttgatgcaaggattatcagctggaggagagcaggtaggggcaagtttattaacgatggaacacgcaccatcggggaaaaaggctttttatactagttggttacttaatggcgcttccataggtgcaatccttgcatctgccgtatttatacctttaacaacatttttaagtgaagaacaattgttagcatggggttggagaattccatttttactgagtgttttaatggtagttattacatggatgatccgacgcaccgtaactgaaagccctcaatttgaacttgagttgaaaaagaaagaacagagtaaagagaaagaagcagtacctgttttatcagttttcaaaaatgaatttggctcttttttaacagtattctgctgcgcattgatttgttcaatctcatctttagtccttatttttggtttatcttgggctacaaacaatcaaggtgttgatcgtactttaatgttaatggccgtatcggcatgtcagttctctgctttattctttcagcctttatatggatttctggccgatcgaattggtaagagagtaatttttgttagtggatgcatagcctgtgcacttggttctttcctatatttatgggctattacaactcattcagctttcctaattattttctcagcaattttacttaaaggcgtgttctatagtgcacctaatgctttatggccatctttatatgcagaaatgtttagtttgaaaaaccgctacactggtgttgggctagcaactcaaattagttttatttttgcaggtttcgctccaagtatttgctatttaattattaattacggtggtggttggattgaattagctagtttctttgctgccttatctgttgtcgctgcaatttctgcatatttatctagattcttgaaaaaagatcctaaccgtgtaattcaacacttaaaacaggtttaa

SEQ ID NO: 47200 - DNA, 1275 bp, Acinetobacter baumannii
atgatagaaaatattttaaataagcgaatttcatatcttagatatttagcagtccttggtggaattctttttcataactcagtatatgcagatagtaaaaatacatttattgaggacacaagtgctgagataaaacttagaaacttttatatgagtcgtgattatcagaaaaatcgagtgagagatacaggagaagcatggacacaaagttttatcgcagattttaaatcaggatatactccagggaaaataggagtaggcttggattttttggccttatatagctttaaaattcgtggtgaagataatgaaattggtacccaattattaccagttaaagaaaataatattcaagaagatgattttgggcgattggcaatagctgtaaagggaaaagtttctaatacagaactaaaagtaggtgagtggtctccagtattgccaatattacgttcagatgatgggcgttctttacctcaaacttttgaaggctggcaacttacctcatcagagtttaaaaatttaaaggtacatttaggccagttttataaaaatagtccacgtgatagtgaacgtatgaaagatatgtatttgacttctcgtagttcagccacttcggatcaatttaattttattggtttagattactcttttaacgaaaagaatgaccagatctccatatggtactcgcagcttaaagatatctatcagcaaaactattttcaatatacaaagagcattcctatagatagtatgaatttaaaatggaatgtgggttatctatacggaacagagcatggtgatgcaaaagctgggcagctcgataatcaggctctctattcaactctatcattagcgaacaaatatcaaaaagtttccttttcagctcagcagatgatgggtaaagacgagtttctacgagtcaatggaacaagtggttttactctagcaaatgacagctttacttcaagttatgataatcctaaggaaagttcatggcagattcgtcacgactttaattttgggaaatttaatttgcctgacttaaatttaatgaatcgttatatttacggtaatggaattgaaaactcacagactaaagatggccgagaacatggttttgaaactgaaatcagctataccatcaaaacaggatggttaaaatctctaagtatcaaagcacgacattctgaaattcgtagaaattggggtaatactaatagttttaatgataatagacttatcctaagttacaccattcctgtgttcaattag

SEQ ID NO: 47201 - DNA, 912 bp, Acinetobacter baumannii
atggctcaatcattaattaagttacgtcatttaaggttctttattgcagtagttgaaatggaaagctttagtaaagctgccgataagctgcatgtaactctttctgcagtttctaaatgcattaaagaattagaggatgagctaaatgtacaattgctgaaaagaaatcggaaatcaatacaaatgacaagtgcaggtgtggaattttataaacatgcctcgcaaacattgaccagctacaatatggctatgtcctccgatttagggaaaaaaactgaagaatacactattactattggcgcattaccaacagctgcagggatgatattacctctagctatacataccttaagggaaaagttcccaacaataagaattaaaattttatctggagtttatgaatatctagttgaaaagcttaatactcaagaaatagatttaattattggacgtcttatcggcaaagatatgacaggtgttatttttgaaactttgtacgaagagaatttattactggtggttagagctaaccacccgctactattaaaaaagcagctgtcactgaaagatattcttccgtatgatattttagtctcaccaaaaaatactttagtacgcattgctaccgataacttcttaatttctgaaaatagttttaattatgaatataaattgattgaaagcactagtgaaaccttctcaagagtttatgttacaaactatgatgcggtttggtttgtacaaaaaggaatagtaaatctggatctgcaaaaaggttacttgtcaaaattgaactttcaaaatagcttactaaaaggacctgtgggtatcactacattagcagataaaaatcgatctttagaagttcaaaattttattgatattcttaaaaagatttgtataacccactaa

SEQ ID NO: 47202 - DNA, 771 bp, Acinetobacter baumannii
atgacgaaatcaacacaagatcctgatagccaaatggataagcaaaattcaggtgtagctgccgtagatagagcattacttattttggatgcttttgatatagatagccccgtcttatctctcgcagaaatttcacgccgtacaaagctatataaaagtactattcttagattactaagttcattagaacgtcatggttatgttgttagaaatgaagatggtcaattttctttaggcattacacctttaaaactatcaagaatttatcaaaattcttttaagcttaaagatgtgctttatcctattttggaaagaatcaccaaagaaacaggtgaaacttcttcattttatattttagataatgataagcgcgtggttctgtttcgcattgaacccgctcgatctgtaaaagtttcaatttctgaaggagataccttccctgtaaatgtgggggcttcgggtaaaattcttcgcgcattttctcaaactgaagtagatgaaaatctacaacaagtccaaaagcaattttgggcaagttcatttggagaacgtgacccagaaacgtcctctttgtctgtacctgtatttagcaatgggagacagttacaaggggcgcttaccatttcagggccttctgaacgtttaacacaagaaaaaattgccgaaaatacttcgcttttacttgaatgcagtatccaagtgtcaaagtatttagcaggcagtatttatggtttagaagatgctataaaacttttaaaagctgcacattaa

SEQ ID NO: 47203 - DNA, 1272 bp, Acinetobacter baumannii
atgttagtctttttaagttacagcatgatcgctgtatttatgtatgctgtaatgtcgaaacgcttatctgcgcttacagctttagtaattattccagtaatttttgctcttctgactggtcatgtcgcggacatgagtagcatgatgattgatggaatcaaattacttgctcccactggcatcatgattacctttgcaattctatatttttgcatgatgacagatgccggcctgtttaatcctcttattcaattcatcattaaaattgttaaaggcgacccgttaaaaattgttgtgggcacaggtattcttggaatttgtgtcgggctagatggtgatggcgcaacgacttatattattgtcgcaacagccttattacctttgtacaaaaaaattggaatccgcccacaagtcatggcaacagttctattactgtcaattggggtaatgaatattttaccttgggctggtccattttctagagctgcgagcgcacttaaagtcgacccaactggactctttttacaaatgttgcccgtgatgtgtgcgggtcttatttgggtcatatttgtcgctttttacttgggtttaaaagaaagaaagcgtttaggtattcatgaaattaaaccagatgacgatcttatccatcatgaacaaaatacgaaaagctggaaatcatggttcaacctgattcttactattcttctggttttttcaatgattaaaggttatttacctttagcgcctctgttcattttggcattctgtatcggtttagtggttaacttcccagaactttctgaacagaaaaaattagtcgcgaaatatgcagatagcgttttagcggtttcttctctgatctttgctgcgggtatttttgtaggaatcatgacaggtacaggcatgatcgaagctattgctcagcatctcatctcaattattcctgaatcgtctggatcttatttatcatcgattactgcttttatcagcatgccatttacctatattttgacgaatgatgcgttttattttggaattttacctattcttgctgaaactgcttcacattatgggatcagtgcaaatgaaatggctatcgcaagtttaattggacaacctattcatttgttaagcccaatggttgcctctacttatctattatgttctttaaccaatgtagattatggtgaaaatcaaaaggcatccatactctggtgtactggaacctgcctagtgatgtatgttgcggctctagttatcggccttatataa

SEQ ID NO: 47204 - DNA, 939 bp, Acinetobacter baumannii
atgagccattcaaaggacatcgatatattggtgagtgaggttggacctcgcgatggtttgcaaagtattaaacaaaccatgccaaccgatatgaagaaaaaatggatttcagctttagctcaagcaggattaactgaaatagaagttggatcttttgtatctccaaaattgctgccacaaatggcggattgtggagagctggttaaacacactttgactttaaaagacgtattcgtgaccgctttagttccaaacctaaagggcgccgaaaatgcatttaacgcaggggttcaaaaaattacgatccctgtctcagtgagtgaacctcattcactttcaaatgtccgtaaaacgcatgctgaagtttatgaagaagtaaattcaattgttcagcttagaaatgaaaaatatcccgaaatattaatagaagcaggtctatccacagttttcggctgcaccattcaaggtgtagttacagaaaatgaagtcctcacgatggcccaacgaatggcccaattaggtgtagatgagattggcctagcagatacggttggatatgcaaatcctgttcaagtccgtagtctatttaaaaaattaaaacaggaagtcggagatttagcgggtagcgcccattttcataatacgcgtggacaaggtctggcaaatgttttagctgcaattgaagtaggtgtgactacatttgatgcctcacaaggtgggattggtggttgtccatatgcacccggtgcatcaggcaatattgtcactgaagatttagtttacctgctagaaagcatgggattacgcactggtattgatatcgatcgacttgttgaagctcgtgaatggttaaagcaaggcataccgggagagccactttacggatttattccagatgcaggcgtaggtaaaaacttcaaatatgcaaaggaccaataa

SEQ ID NO: 47205 - DNA, 1194 bp, Acinetobacter baumannii
atgaaagatgataagaaacttccactggctggaatccgagttttagaattcgtacatatggttatggggcctgcatgtggtttacttctcgcagatttaggtgctgaagtcattaagattgaaccattgccacaaggtgacaacactcgcagacttatggggtcaggtgctggctactggatgacttacaatcgcaataaaaaaagtttgtcagtggatattaaaagcgaaaagggtatgtcgcttatcaaggatttaatcaaaactgcggatgtggtgattgaaaactttagacccggcgcgatgaaaaaattaggactcgattatgaaggggttaaatcaattaagcccgatattatctatggttcaatgaaaggttttttacccggtccttatgagcatcgaactgctttggatgaagtcgtacaaatgatgactgggcttgcatatatgacgggtcccgtgggacgaccattacgtgctggagcatctgttaatgatgtgatgggcggaatgttttgtgcttattcaattgttgcagctttataccaacgtcaattaactggccaaggccaacttgttgaaactggtttattcgagaactctgcatttttagttgcgcagcacatgatgcaaagagcggttacagataagcccgtcgctccaatgccaaatcgtgtttcagcttgggctgtatatgatgttttcaacacgaaaaataatgaacaagtctttattggtgttgtaacggactcacagtggattgcattctgtgatgcttttggcttagaaaacctaaaaaataatccggattttgctcaaaataaccaacgtgtaaaagcacgtgagcaaatccatcccattattcgtgagacgcttagccaattagacaaaacaaaggtaatggagctatgtgaacaggctggtttacctttttctccaatccaacgcccagaagatttatttgaagatattcacttaaatgaatcaggagggatggggaaagtagttctggaaaatggtaagcaagtaaaggttcctttattaccatttacgatgaatggacaacgtttcggtgttcgtcaaaatgtgccagaagtgggtgaagatacctttgaagtgcttacctctttaggttatgaccaagccaaaatcaaagaacttactgattcgcaagttattaaatctaactaa

SEQ ID NO: 47206 - DNA, 1074 bp, Acinetobacter baumannii
atgaaaagtaagttaggaattagtaagcaactttttattgccttaactattgtgaatttaagcgttacgctattttctgtagtactgggttatgtgatttataactatgcgattgaaaaaggctggattagtttaagctcatttcaacaagaagattggactagttttcattttgtagactggatttggttagccactgttatcttttgcggctgtattatttcattagtgattggcatgcgccttgcaaagcgttttatagtgccaattaacttcttagccgaagcagcaaaaaaaattagtcacggcgacctctctgctagagcttacgataatagaattcactccgccgaaatgtcggagcttttatataattttaatgatatggctcaaaagctagaggtttccgtcaaaaatgcgcaggtttggaatgcagccatcgcacatgaattaagaacccctataacgatattacaaggtcgtttacagggaattattgatggcgtttttaaacctgatgaagttctatttaaaagtcttttaaatcaagttgaaggtttatctcacttagtcgaagacttacggactttaagcttagtagagaaccagcaactccggttaaattatgagttgtttgactttaagacggtagttgaaaaagttcttaaagcatttgaagatcgtttggatcaagctaagctagtaccagaacttgacctaacatccactcctgtatattgcgaccgccgtcgtattgagcaagttttaattgctttaattgataatgcgattcgctattcaaatgcaggcaaacttaaaatttcctcggaagtagcatcacaaaactggatattaaaaattgaagatgaaggccccggcattgcaaccgagttccaagacgatttatttaagcctttctttagattagaagaatcaaggaataaagaatttggcggcacaggtttaggtcttgctgttgtacatgcaattattgtggcactgaaaggtactattcaatatagcaatcaaggctcgaaaagtgttttcaccataaaaatttctatgaataactaa

SEQ ID NO: 47207 - DNA, 720 bp, Acinetobacter baumannii
atggtcattttaaaaaaagtatacttcggtaaaaaagaactgtttttaatggtgacttcgggccttctaattatttttaactgggttctactgtttgccgcttttcctaaaacttctatttctttagcgacgattgtttatcacgtgaacccgtttgtcattttatttttaggggctttggtctttcatgaaaatctcaataaaaatgatgtgctatggaccatcgttgcttttatagggctaatcgtgattataggcttaggtagtgcttcggtgaactctaatgagttagtcggcttggggctggttcttattgctacaacactttattcaatatcggtattaatcactaaaaaattaagtaatacaccgccgttattaattgtatttatacaaaccctgagcggggccattgccatgactccatttatgttggtttttgaaaacccgccgattggtcaacaatggttgtttgtggtcggattgggagttttgcataccgcatttctctactatttaatgtattcggcaattaagaaaatacctttaaataatattgcgatcttatcttttatttatccaatatcgaccatagtgattgattatttcttctttgatcatgtgttgacgagtactcaagttttaggtgcaggtttaattttattaggcgtattgggtgtgaagttgcattggaatatttttgcgttgaagagcgcctaa

SEQ ID NO: 47208 - DNA, 594 bp, Acinetobacter baumannii
atgacgattaaacttaatccattaaacgctatcgatttttataaagcggatcacagacgtcagtatccagcaggtacagagtacgtgtacgcaaactttacgccgcgttcatctcgacttgctaaaatgttgcctgactttgacgataaagtggtgttctttgggctacaaggttttatcaaacactttttaatcgatacgtggaatgaaggcttttttaagcaacctaaagacaaagtggtagctgcatataaacgccgtatggatagttcattaggtgaaggtgctgtaccagtcgatcatattgaagcattacatgacttgggctatttacctttacggattaaagctttgccagaaggtagccgcgtcaatatgcgtgtacctgtgcttaccgtaattaatactgactcgcgtttcttttggctaaccaactatattgaaactgtgttaagtgctgaactttggaaaagctgtactacggctacaattgcttatgagtacaaacgtttattaactcaatatgctataaaaactggcgcaccactcgattttgtacctgtgcaaggacatgatttagtagccgtggcatga

SEQ ID NO: 47209 - DNA, 1359 bp, Acinetobacter baumannii
atgagtaactttgatactatttggtcggaaagaaggcttaaagatgaaaaaagacaaactgataaacgatcagaatgggctagagattatgcaagaataatccattcctctgcgtttagacgcctacaatctaaaactcaagttttaggattaggagaaagtgatttttatcgaactcgtttaactcattctatggaagtatcccaaattggagtaggtataacaagatggctaaaagacaaatatgatactaacgaagaaattaaatctatcataccctcgactgcattaatgagttcgatatgtctagcccatgatctcgggcatccccctttcggccatggcggtgaagtagctttaaatttctgtatgaggaactatgggggatttgaaggcaatggacaaactctaagaattttatctactcttgacaaatataccgaaaaaaatggcctgaacccaactagacgtttacttttaggggttttaaaatatccagcttcatataccaatactgtatatgagggtttttatggaaaaactcctgatactaaatggttgtttcaagcaaaagaacaaaaacctcctaaatgctatttagatgatgaagatgatgtcgtaaattttatattagaaccattatccaataatgagagaaaaatatttactgaagtcgaagaaaaatatgatgaagatgataaggataaaaggctccacaataaacctaaatataaaagttttgatacttcaataatggagctagctgatgatatatcttatagccttcatgatttagaagatgctatttctttaggtatgataacaatgaaaaattgggagaagcataatgataaaaaagatgctctatacgaagcttgtgggttaaaaaatgaagaagtaaaaaaacagctattttcagaacatagctttcaaagaaagaaaatgattggggaactcgtccatcgattcattacaaacacatttataaaaccgactaaaattcaaaatgttgaaaaccttttaattaaatggaatgcatgcttagaacctgaacataaaactctgcttgatcatatttttacattagtgaagtcaaaagtaatcaaaagcagtaatgttcaacaattagaatttaaaggtcaaaagatgatagttgagctatttgatgcactaaattcagatcccaagagactcttaccatcaagtaccttgaaaaggcttgaaagtgcaaaaaaagatggtattactcaagaaagagtaatttgtgattttatagcaggtatgactgatgaatatgcaacaagactatatgaaaaattattctatccacataagggttctatttttgacagattataa

SEQ ID NO: 47210 - DNA, 237 bp, Acinetobacter baumannii
atgagttggcaagataaagttattttattggctggtgaagtaattaagcgtgggcaacgaaaagaaaaaggccatttagggcaaacagaaataatttcttttactattgttaataataaaggggaggttgttggaagtggtgagtatacagagcattttaatattagaggattgagctcttcttatatattagaatatagaaaaaatgatggtacaaatttttcagaacgatggtaa

SEQ ID NO: 47211 - DNA, 522 bp, Acinetobacter baumannii
atgaatcaaatattgacaatttctacatttatcatagggttattgacttttgttattgcctatatagtttattttaataattctaaaggagatgtggttgtatatgctaaagttgatatgagcagacagggtattattttattaattattcacaatattggtaagggtattgctcaagatataaagttttctggtactgattatcttctaaaaaattcatcagacattgatataggtgcctttaaggtagggactcccatactttttcctgatgaaaagttaatttattgcttgggtacataccctacattaaagaaatcattaccggattatcctttaaagatttctattacattccatagtaagatcgccttatatccttataaaagaaaaattaagaatgtggtaacagtagatatgaatgcttttagtggtgttgatattggtgaatcaacttttgaaagagaagtaagaaattcattaaaggaaatagcttcctcattacgaaagatgtcctcgtaa

SEQ ID NO: 47212 - DNA, 2367 bp, Acinetobacter baumannii
atgctcaggagtctcgtgggctcggagatgtgtataagagacagatctaatctagagtctttccctattgacctagatccttctttacgtgagtatcatgaaaaaattgcaaataaaattaataatataaaccacagcgattctcaaaattataagactgaaagatattatattcataagactcgccctttttttattggaggttacatttactatgaagttacattttatagggctatcaataaagtcaataaacatgatcgaataattgcttttactaatatagatatatctaaaaattatgcttgtactttaactttgcaaaacgcctctattgaagttttaggttatcatatgccaattattattatccgaaactggaaaatagcaattagacaatgtgaatttaataattttgcaaaaatattagaccttaaaatacaggttaatacaaaatcaactgagtataactttttaatgggttggctaactgaaagatcaggaagtttactcgagttaattgacaaggaagaaaacttatatttaaatattaaaagattttcggttaacaatgacttgagcaacatccaaatatttaaaatattagatacgatcagaaatttaaataagaccaaatcacgtggttataatattcttaggtatttgcttttaaaaatgaataatcaagttatcaaagcacagtatgattccagaggttgttcatatctttcgaatttaaaactttcatatagttgtatcccatttgaggaaatgcctttctgtacatcattaagaggacacaatcctaaattaagagatttattagaatgtattaattctgaggaaagaaatcaggaatttttagctcggcgtataaaaaacaatattgagcaaaatggtattctttatacaccattagcagaagtagagtattttggatcaactcaaaaactaatcgacaaatataacaaccaactctatcactcacataaagaaaatagaaaattagtttttgataaaggccatatatttatcaatcaatatgaaaatgatacttataaaatcattaaaaagttacagagttattctgattcaggtatagctggatactcacatgctgtagagctctggttaaactcctcttcgataataattgatgatcctctcaaaattattgctataaaacaattattcagtgattctaaaatagctataatttatggtgcagctggtacaggtaaatctactatggttgaccatatagcgcactactttaatgataaacaaaaactttttctcgctcacacaaatcctgctatagataatctcaaacgtaaaataagtgcacaaaactcagattttcgtactattaaaagtcatattagtagatataactctgctgaatatgatcttatgatcattgatgaatgtagtactgtaagtaacactgatatcttaaatgttttagaaaaaacatcttgcaaattaatagtttttataggcgatatatatcaaattaaatcaatacaatttggtaactggtttaatataattaaatcatttatacctaaaaaatctgtatttgagctaactaatccttatagaacatctaatgaaaatttattaaatttttggcataaggttagatatattgaagatgatattgctgagataatggttcgtaacaattatacaactatattagataatgcattatttgaaaaaaaattcgaagatgaaattattctctgtctcaattacgatgggttatatgggataaataacattaatcgatttcttcaaagtagtaatcaaggaaaagctgtttcttggggtatatcaacttataaagtaggtgatccaatattattttcagaaacagaaagatttaaacctgtgatttataataatcttaaaggaaaaattatagatattattgaaattgctgaaggtattcaatttgacatagaactagatagatctttggatgaatctagtgtttggggcacggaactgtattgggtaaaagattcaattattcgcttttctgttttcaatgcaatttctagtgatgaagatgatgattcttcatattccactattcccttccaagtagcttatgctgtttctattcataaagctcaaggactcgaatatgattcagtgaaagtggttattactgatgctaatgaagatgaaataactcatagtattttttatacagctattactagagctcgtcaaaatttgaaaatttattggactcctgaaactcaacataatattttaaggaaactttctctaattcctaattctaaggatatccatctacttgcaagtcgaaaaaatttagaagctgtaaaataa

SEQ ID NO: 47213 - DNA, 1785 bp, Acinetobacter baumannii
atgcaagaacttgccaaccgattggcgatacaaaatttcgtcaacgcttatatgcaagagactggcaaaggatatttactttcttttgaccaacaaagttcaactcaacaagcgtttagctctggtttgacgctgttaactcttcctcttccttctatacaagcagaatgttctgtacctttatcttatgtaagtcgtgtaggacgccatcgtctcgccgctttaccgaaaatgtgtattgatggtcaatggcaaaaaatcagtgcaggaaccattgttagtcttttacttgaagagttggttattgaatctcaattcaaattagatgctgcttcattgttagagaaatggatacaaagccgggacgcgctactacaattcttaaaacaacgccacaatgatttcgatgatttagtaaaggctggacagaattttattgaaagtgaacaggcattaattttgggtcatagtatgcacccagcgcctaaaagccggaatggttttgttcatgaagattggttgaagttttcacctgaacatgctggaaaaactcagttacattattggcttgttcatcagaattatattgctgaaggttgtgcaactgagcagccaatttcagatcaagttaaagacgcaatccgttggtatttgtccgaaagcgatttaaacctgttaaagactcatgttgaatttaaattattgccactacatccttggcaagctcgttatttacaaggtaaaccttggtttgagcaattaaaacaaacaggacagttaattgatatcggtttacgtggatggcaattttcaccgactacatcaattcggaccttggcaagttttaacgccccttggatggttaaaacttcactatcagtcatgatcactaattcaattcgagtgaatttggcaaaagagtgtcatcgtggcgaaatttcttatcgtttatggcacagtgaattaggtaaaaaaatattaaaacaatgcccaacactgaaagcagttaatgatccagcctggatagctctgcaaatagacggcgagattattaacgagacaatttgtattttccgtgatcaaccatttgcagtacagcaacaagtcacttgtattgcatctttatgtcaagaccatccaaataaagagttaaatcgttttaatgctttatttgaccaaattgctcagaaaaatcaacaaacgaattttaaagaaattgctttggattggtttgatcatttcttgaagattggcttggctccgttaatgtatgtttatcataaatacggtatggcttttgaatcgcatcaacaaaatgtattgcttgagctagaagatggtttaccgaaaaatctctggttacgtgacaaccaaggcttttattatattgaagaatttgcaactgaaattgtagaagcattaccagatttactagaaaaagctcatgcggttggtcctaaagattttgtggatgaacgctttagttattatttctttggcaacactttatttggtttgattaatgcaattggagcaactggctatatctctgaagatgaactgttaatccatttgcaacaaaatttacttcaattattagagcaatacccagatagtacattattacagggtttattgtttaacgattctttaccgtataaaggcaatttacttacacgtttacatgaattagatgagcttattgctccattagaacatcagtctgtgtatgtgcagctaccaaatccactgtacgttgaacagaaggatgtgagttatgcttga

SEQ ID NO: 47214 - DNA, 1434 bp, Acinetobacter baumannii
atgcttgattttattggaattggactggggccgtttaatttaagtctggctagtctgttacatgataaaagcgagctgcaatatcgcttttttgatcagcgtgagaaatttgactggcatgctggtatgcaattgcccaatgcgatgttacaagttccttttatggctgatttggttagtatggttgagccaaccagcccttttagttttttaaattatttaaaacaccatcaacgtttatataaattctattttagagaaaatttgtatataccgcgtcaggaatataatcattattgtcaatgggttgtagaacaacttaaccatattgagtttagtagccatgtgctggatattaaaccgattaaaggtggatttgatgtggaggtagtgtgtaatgggcaccaccaacattatcgtactcgacaattggtattgggagtgggtacaactccacatttaccagaaagcttacaacagatttactcaaaatcaggaacctgcctgcattcatcagaatatttacagtacagctcccagaagttatcaggaaatgtagttttaattggttctggacagtccgcagcagagatttttttagatctatttgatcgtcagtatatgaatggtcgaactacaccagactttcatctttattggttaacccgttctgctggtttctttccaatggaaaatacaccattcggtttagaacattttagtccggattacatgcattacttttaccatttaccatcaggtttaaaggcagagttaccagcgcaacaagcaaatttatataaaggtattagcagtaaaacaatacgtgatatttatgagcatttatatcatcgtagtatcggtggaatgcctacagatgttacgttggctggacatcatcaactgcaatatgcagagctcttagaaaaccagaaaacaaagttgtgttttgaacatcgtcagcaaaataagaattatattctggaggctgattgtgttattgcagcaacgggttatcgttatccaaaccctaagtttctacaaaatttacaatctttgatcatacgagatcaggccgaccattggcaggtggcttcaaactttaaagtcaattatcaaggtgagggatctatatttattcaaaatatggaagtttatcaccacggcgtaggtacgcctgatttaggcttaggagcatatagggcagccacaattgcaaatcaattggttggtgaagagttattcaaacttgatcattctcagtcattccaacaatttggagtgaatgcaccagcgcaagaagaagtttctgttcgcaatattgcagcctcaaaaataaccgagttttcaagacctttaaataaatcagggccaatgcatcattctgctttgggagcgtatgcacgaagtaaattatctgagcatattgaataa

SEQ ID NO: 47215 - DNA, 243 bp, Acinetobacter baumannii
atgggacaattacatccagttttatcaaatacacatgtgattcaaaatgctttacaggcttggcaacatccaaattcggatcaggcaaaatatgttgagcaacgtgttattaagcaattacttcaagctttaatttttgaagatattattcattcagaatatgatggaaaaaattttattatagaagtacaaaatagtcagtgccaaaccattcgttatgtcgctgcacgttgctttaagtag

SEQ ID NO: 47216 - DNA, 1911 bp, Acinetobacter baumannii
atgaatgcacttcagcccgtttatcaagtaatggaccaaggaatcttacaggattttatcaatagccttctggttgaaacgattattcctgaacagtttatttttgattttgcgactgcccaaactgcgctaaatcaacatggcaaaaatcttcaagaagtatttaaaaacacgtctgaacaattttcttttgtgctattacacgaagagaatcggcaaggcttggtcatgtttacggtacaaaaaggtattactcaagcctggaagtttgctaatgaaacagaagtttttctattggaacgcacaaatgatcatgttcagatcaatgtgattgggataatagaactttttgagtttattcaagcgataggtctttttaatcattgtagtgctgataaagttcaagccttttatgagcagctgcaaaaatgtttaaagcaatatcatttattacaacagcatcgggtaaatgcacatgatttattgaatcaaagcttggcacatagattccgcattttagaacaatatgcaggttatcgggaccgcccatatcatcctttagccaaattaaaagaaggtctcagtcagcaagagtatatgcaatattgtccggaattcgctcaagaattatctattcattgggtggctgtacataaagataaaatgatgtttggtaaaggggtagaaaatattttcaaacaacagccaggcgaaatttttattcctcgtgctgagcgatatcaattaaaacaagaaatgtttcaacgtgggttaaatgaaacccatattgcaatgccaattcatccttggcaatttgagcatttatttcccaagttctatgcggatgatattgccgacggcgtttgtcatcctttgaattttatctctaaaggaatgtatgccagtgcgtctatgcgtagcctcttatcaaaaaatgttttagaagaaagtctaaaattaccgataggaattaaagctcttggttcattaagatttttgcctattgtgaaaatgattaatggtgaaaaaaatcagaaattattacagcaagccaaggcaaaagatgctgtcttaaaacaaaaattatggctttgtgaagaaacacaatggtggtcatacttacccgagaagcaaaatgaccggacagcagacaatgagtggttatttgtagagaaacctacccatttggcagctcagcgccgtcatattccagctgaattattgcaagaaccttatcaacttataccaatggcaagtcttggacatacaattacgggtcagcctgccatttttgattatattttgcagcttcaacacaaggacataaactccaagcagatacttatcgagtttgagaaactgtgtacatgtttctttgatgtaaatttgcgattattccgcttagggcttatgggtgaaattcatgggcaaaacatatgtcttgtgttgaaaaatggcgaatttgatggattgatgttccgtgatcatgattcattacgtatttatttaccttgggtagagcaaagcggattgaaagatcctaattatttgagtccccatgattttagaaatacgctttatcatgaatcggtagaggctctgttattttatattcaaactttaggtattcaggttaatctagggtgtattgttgataatttagcgagtcattatcaaattgaagttaaggatctatggtctgtacttgctcatgcgttacagcaagttattcaaaatctaaacttccagccagagattttgacccagctccaacatttactatttgaagtgcctgaatggccatataagcagttacttcgacctttgctagaacaagatacacggattggtagtatgccatcgggaattgggaaaacccgaaacccactttggtatgccttaaattgttag

SEQ ID NO: 47217 - DNA, 591 bp, Acinetobacter baumannii
atgcaacaaacaaataaacgctaccctttaggggctcatcttattgtaaaacatctcggctatagccatcatggtatctatgctgggagaggtcgagttattcattattcgggcctcgcacatttcatcaaaaaacggcccattgaaatcacttccctagatgccttttctcatggcaagaaaattcatgtacgttcttacgatgcaccacgctacagaggaaaagttgttgtacgacgtatgcgttcacgtatgcatgaaaaccattatcatttgatcattaataattgtgagcatttatgcagttgggcgattactggtatcgaaagtagtactcaagttgagcgtatgatgcatcgtttaaccaccattggttacgtgagttcaatcatgagctatatgaatggcatgatgctaaccgtagcaaccacctgctttgctcttgttctttatattaaaaagaaattacgtgatcaggcaaaaatgaatattccgacttatcaatttctaagagaaaaagccgaaaaaagaaatatagacccaacctcacctttagtctttatagaaccagataaaaaagaaactatctaa

SEQ ID NO: 47218 - DNA, 561 bp, Acinetobacter baumannii
atgaatttacttcttattgtggttctgggcgcgattgttgaaattgccgtatggattggcgtagcacagttcatcagtggatggtatgtgtttttctggttcattattgctttctttattggtctaacgcttattcgtaatagtacggctggtattatgccgcaattacaacaaatgcagatgactggacaattgggtaatgatccgactgtgactaaaaaattagcttatgcttttgctggttttttattaatgttgccaggtttggtatcggatgtattagcgctcttaattcttattccgggcgtacaaactgcgtttcgtaatattgcaatgagaacactggcaaaacgtcagcaagccatgatgaacaaaatgatgggcggcatgggtggtgcaggtgctggtcaaaacccatttgcagatttaatgcgtcaaatgcaggatatgcagaatcaacaaggtggtggtagccaatatcatgattctagtattattgatggcgaagcgagagaagttactccagaccacaagaaaattgagcataaaaataaagattaa

SEQ ID NO: 47219 - DNA, 825 bp, Acinetobacter baumannii
atgaacattaaagccctcttacttataacaagcgctatttttatttcagcctgctcaccttatatagtgactgctaatccaaatcacagcgcttcaaaatctgatgaaaaagcagagaaaattaaaaatttatttaacgaagcacacactacgggtgttttagttatccaacaaggccaaactcaacaaagctatggtaatgatcttgctcgtgcttcgaccgagtatgtacctgcttcgaccttcaaaatgcttaatgctttgatcggccttgagcaccataaggcaaccaccacagaagtatttaagtgggatggtaaaaaaaggttattcccagaatgggaaaaggacatgaccctaggcgatgccatgaaagcttccgctattccagtttatcaagatttagctcgtcgtattggacttgagctcatgtctaaggaagtgaagcgtgttggttatggcaatgcagatatcggtacccaagtcgataatttttggctagtgggtcctttaaaaattactcctcagcaagaggcacagtttgcttacaagctagctaataaaacgcttccatttagccaaaaagtccaagatgaagtgcaatccatgctattcatagaagaaaagaatggaaacaaaatatacgcaaaaagtggttggggatgggatgtagacccacaagtaggctggttaactggatgggttgttcagcctcaaggaaatattgtagcgttctcccttaacttagaaatgaaaaaaggaatacctagctctgttcgaaaagagattacttataaaagtttagaacaattaggtattttatag

SEQ ID NO: 47220 - DNA, 546 bp, Acinetobacter baumannii
atgaactattccctcgattctaatttccgtttaattgattgtaatgaagcagagcatgcggcagcaatattagaaattctaaatgatgcgattgttaactctaccgcattgtatgactatgttccccgttcacttgattcaatgaaaacatggttttcggtaaaaagagaaaatggtttccctgtcattggggtagtagatgagtcaggtaagttattaggatttgccagttggggaacatttagagcgtttccagcttataaatatacggttgagcatagtatctatattcatcatgaacatcgcggctgtggtctaagtaaagttttaatgcaagcgttaattcaacgagctcaacaggctcaacttcatgtgctcattggttgtattgatgcgacaaatcaagccagtataggtcttcatgagaaaatgggctttacccacgctggtacttttaaacaagtgggctttaaatttgggcaatggcttgacgctgctttttaccaactagttttggatactccatttgaaccagtggatggatag

SEQ ID NO: 47221 - DNA, 678 bp, Acinetobacter baumannii; identical to SEQ ID NO: 45333

SEQ ID NO: 47222 - DNA, 930 bp, Acinetobacter baumannii
atgaaaacagaactaatagttaaagataatgctctaattaatgccagttataacctagatttagtcgagcaaaggttaattcttctagcgatacttgaagcaagggaatcgggcaaaggaataaatgctaatgatccattaacagttcatgctgaaagttatatcaatcaatttggtgttcatcgaaatacggcttatcaagcattaaaagatgcttgtgatgatctattcgcgagacaatttagttatcaaagccttagtgaaaaaggaaatgttattaatcacaaatcaagatgggtgagtgaggttgcttatattgataatgaggctgttgttagacttatctttgctcctgctatcgtgcctttaattactagactagaagaacaatttacaaagtatgaaatacaacaaataagcaatttaacaagtgcttatgccgttcgtttatatgaaatattaattgcatggcgtagtactggaaaaacgcctcttataaccctgtacgacttcagacagaaaataggtgtactcgatactgaatacaaacgaatgtatgattttaaaaaatatgttttagacattgcattaaaacaagttaatgaacataccgatattactgtcaaagttgaacagcataagacgggcagatcaattacaggtttttcatttagctttaaacaaaaaaagtcagctactcaatctgtcggatctaaaagagatccaaatacattggacctgttttcaacaatgacagataaacaacgtcatctatttgccagtaaactctccgagcttcctgagatgagtagatattcacaaggtacggaaagctatcagcagtttgctgtacgtatcgctgacatgctgcaagatacagagaaatttagggaattaattcctttgctcaaaaaagtaggatttcaatga

SEQ ID NO: 47223 - DNA, 546 bp, Acinetobacter baumannii
atgaaaaaactgtcagtttcagagttggctaagctttacggatattcacgacaagccatatatgcgcatataaacaaaggaaatttatctaaaggatctgatgggttaattgactttgcagaagccttaagagtttttggggaaccacaaaagaaagatactaatgtcaatcaaagtcaatcaattaacagtcaaaaattgacagaagttgacctattaaaacgtcaagttgacatactggaaaaacagttaaatcaagcactgtttagagagaatcaatcgctagaacgtgaatctttttatcaagatcaaatcgaggccatgcagcgcttactggaagcaccgaaagccaatatgactacgtttaccgatcaagaacagtcgcaagcgaatgtagctcaagtacagccagaacctaatattgatgatcctaaacatgacggattgactactccagagaacaaacgcgttccagtgccggagcatattgaaccagagcctgaaaaaagaggcttttggagccgtttttttagaccctatgattaa

SEQ ID NO: 47224 - DNA, 852 bp, Acinetobacter baumannii
atgtcaaaaattattgcatgtattgatggatcattagtaacaaatactgtgtgtgattatgcagcttggtttagcgataaacttagttcacctattaaactattgcatgtcattgataagccaaaagcgaaagccccacaagatttaagtggtgcaattggtctaggaagtcgagaaaccttgctaaacgagttagttgaactcgaagaacgtaagggaaaaattgagctagagcatggtcagattcttcttcgggaagcaaagaattatctattggagaagttttctattgatgctcaaagttttcaacgccatggcagtcttttagaaacaattatgggaatggaagaagacattcgagttcttgttatgggtaagcatgggactgaaactgagcatgattccagtaaagttggaacccatattgaaaatgttgttcgtgcccttcataaacccgtattaataacatctgcactttttagtccacctaagtcttttttaattgcttttgatggaagtcagactgcacgcatttgtgtagaaaaaattgccaatagccctttattaaaaaacctgacagctcatgtggtatatgttggtaagccaaatagtgatatgacatctcaagttacttgggcaaaagagctgcttgcaaataatggttttaatgtaattgatatcgtacttgaaggtgatgtcgagaaatcaatattagattaccaagagaaaaacgctattgatatgatggtggttggtgcatatggtcactcaaaaatacgccagttttttattggtagtacgacgaccaaattgttatcaagctctacaaaaccagtattattactaagataa

SEQ ID NO: 47225 - DNA, 1488 bp, Acinetobacter baumannii
atgttatccactattcgagaacaatggttctccaatattcgcggggatgttcttgcgggtattgttgttgctttggctctaattcctgaagcaattgccttctccatcattgcaggtgtcgaccctaaagtcgggctatatgcttcattctgtattgcagtcgtgattgctttcgtaggtggtcgccctggtatgatttctgctgcaactggtgcaatggctttattaatggtcacactggttaaagagcatggtctgcaatacttattagcagccacaattttgacaggatttattcaaatcctagcaggttatctaaaattaggtgctctgatgcggtttgtatcaaagtcagtcgtgattggctttgtgaatgccttagctattctaatttttatggctcaattgcctgaactcaccaatgtgacatggcatgtctatgcgatgacagttggaggtttagctattatttatctattcccttatatcccagtgatagggaagcttttaccctctcctctcatttgtattgtcctccttacgctctttgccttgttcattggtttagatgtaagaaccgtaggcgatatggggcaattaccagatacgctaccaattttcttacttcctgatattcctttaaatcttgaaactttagctattattttgccttattcactgggattagcagccgtcggtttgcttgaatctatgatgaccgcaacaattgtcgacgatttaacagataccaccagtgataaaaaccgagaatgtaaagggcaaggtgttgccaatgtcgcttcaggcttcttaggcggaatggcaggctgtgccatgattggtcaatccattattaatgtgaaatctggtggacgtacccgtttatcatcatttagtgcaggggtctttctgttaattatggtggtgtttatcagtgactggcttaaagccattccaatggctgcactggttgctgtcatgatcatggtagcaattggaacatttaactgggattcactacgcaatatccgccaatatcccttatctagcaatattgtgatgatcgttacagtcatcgtggtcgttgcgacacataatttggcttatggcgtattagttggtgtacttctttctgcattattttttgccaacaaaattgaacgctacatggcaattcagtccgaatttaatgaacctgaaaatacccgtatttatacggtaacaggtcaagtgttcttcagctcagcagataaatttacttctgcatttgatttcaaagaagcactttcaaaagttgtgattgatgttagtcaggctcacttctgggatgtgtctgcggtcgctgccgtagataaagtggtcattaagtttagacgtgaaggaacagaagtcgaacttattggaatgaatgaagctagtaaaacattagtcgataagtttggtatccacgacaaaccagatgctttagatcgcttaaatagccactaa

SEQ ID NO: 47226 - DNA, 456 bp, Acinetobacter baumannii
atgttaaatattgtgattaatgagactgagcgagcagcctttttcgatactttaaaaaaattcatagttgagaagcttggatattcattgaaacaagcaagtagtatcgatttattttcttttagagaagactactttacgcttcagtttaagaaaggcttagatgacctatatttaaaaattggagactatagctatacagcaccggagcaaaaatcgattgttatttcaagaattggttttcgtaaaagtcatagtggatctggtactgaattattgaaagagctttgtaaattaggccaagagtttaaatatgattggttatatattgagtgcccaaacccaggttgtcaggaatttatgaaaaaattaggtttcaaggacacttctcctatttctattcacgaattaaaaaactctattcaagaatatgaaaatcataaggtggttcaataa

SEQ ID NO: 47227 - DNA, 513 bp, Acinetobacter baumannii
atgaaaaattttgacccatttaaatcaatacattttattgaaatcttattcagcatgccttggaaacctatactctctttgattgtgttaacttatattgcggctatgtatgatctaattagttcaatttggacggataagtccaatgattcttctcacttgaatgatgttttttcaacattacttaatactaataactttttactatgggtcttttttatagcttatatcagctatattttattgagttttatatgtagttacaggatgtacaagaataagcgtataagttcaaaatttagtatattagttaaaatttttggatacacaggtttttttatagttgaaatattttatttaattggctttttttgtttagccttattatcgttagctctaatattttttgattttcaatctttaatttctttttttatgtttagctttatatttgtaggtattgcgattggatctcattggatgtacctcagtgcaaaagtgaataacttttaa

SEQ ID NO: 47228 - DNA, 168 bp, Acinetobacter baumannii
atgatgtcagataatattattcagctttcaaagccttgtacgctttgtgaaaatagacaaaatgtacagctttttgcaggattgatgctgtgtggaagttgtcaggaaaatatcaggcttacgaatccaagtatgttctcggccaatgatgagattgagcaaaaatag

SEQ ID NO: 47229 - DNA, 372 bp, Acinetobacter baumannii
atgggcgaaaaagtcaaaacttatgcagtcaggttagatccacaagtagcagaattctacgatcaattggctaattcagaaggaatcagaaccagtaaattattcagtaaaattttgaccaatgattttcaatctattgctgttaaacagcaagccgatcgtattgaggatctggtgaatcgattagaaaagcgaatagatgattttgaggaagataataatttttctgaaaaatactatgaggacttttctggactctatttcatgatgttatggacattaatgaaaaatggggcttctaaagaggaggttagaatgatgcaagctaaaggttattcatatgcagatgataactataagagagtaaaatga

SEQ ID NO: 47230 - DNA, 2559 bp, Acinetobacter baumannii
atgccaaaaaaaaggcaagaatcttataaattattaaaacgccatatttgttattacttggcttctggcgttgttacaatgacaatgcctgtgttcgtgcatgctgaagaagcagctgcgagtgcgcctgtagaagctgaatttgattctgcttttttaattggtgacgctcagaaagtcgatatttctcgatttaagtacggcaaccctgttttaccaggtgaatataacgttgacgtttatgtaaatggtcaatggtttggtaaacgccgcatgattttcaaggcattagatccaaatcaaaatgccgtaacttgttttactggaatgaaccttcttgaatacggcgtaaaacaagaaattttaaccaagcatgctccccttcaaaaagaaaataatagttgttataaaattgaagaatgggtagaaaacgcattttatgaattcgatacgtctcgtttacgtgtagatatttcaattcctcaagtcgcattacaaaaaaatgctcaaggctatgtcgacccaagcgtatgggatcgcgggattaatgccggctttttgtcttatagtggtagtgcgtataaaacttttaatcagtctggtgaccgaagcgaaacgaccaatgcttttatgggggttacggctggactaaatttagcaggttggcaattacgtcataatggtcagtggcaatggcaagatacgcctgcggaaaatcaatctaaatcagactatcaagaaacaagtacatacttacaaagagctttccctaaatatcgtggtgttttaacacttggggatagttttacaaacggcgaagtatttgactcatatggttatcgtggtatcgatttttcaagtgatgatcgaatgctaccgaatagtatgcttggttatgctccacgtatccgtggtaatgcaaaaaccaatgcaaaagttgaagtacgtcaacagggccaattgatttaccaaacaactgttgcaccaggtaactttgaaattaatgacctttaccctaccggctttggtggtgaaattgaagtttctgttatcgaagcgaatggtgaaatacagaaattttctgtgccttatgcctctgttgtacagatgttacgtccaggcatgaaccgttactcattaactgtaggtcagttccgtgatcaagacattgatctggacccttggattattcagggtaaataccaacaaggtattaataactatttaaccggctataccggaattcaagcatctgagaattacgctgcaatattgcttggtgctgccgttgctacaccaattggagcaattgcattcgacgtgactcactctgaagctgagtttgaaaaacaggcttcacaatcaggtcaaagtttccgtttaagttatagtaagttaattacgccgaccaacacaaacttaacacttgcagcttaccgttattcaaccgaaaacttctataaattgcgcgatgccctgcttatacgtgacttggaagaaaaaggtgtaaacacttatgctgctggtcgtcaacgtagtgagttccagattactttaaaccaagggttacctgagggttggggtaacttctatgtggtaggttcatgggtggattattggaatcgtagcgagagtactaaacagtatcagattggttatagtaataactatcatggtttaacttatggtttatctgcaattaaccgtaaggttgagtacggctcaaatgatgcgtcgcatgatactgaatatttaatgacgctttcattcccaatcaactttaagaagaattcagtcaacgtcaacgttactgcttctgaagacagccgtactgttggtgcaagtggaatggtgggtgatcgctttagttacggcgcttctgtgtcacatcaagactatgcgaacccaacatttaacgcaaatggtcgttaccgtactaactatgcaactgttggcggctcttatagtattgctgactcttaccagcaagcaatggttagcttaagtggtagtgtagttgcacattcagatggtattttatttggacctgagcaaggccaaaccatggtacttgtgtatgcacctgatgctgctggagcaaaagtgaataacacggttggtctaagtgtaaataaagcgggttatgcagtagttccttatgttacgccataccgccttaatgacattactcttgacccacaagaaatgtcgagcgaagttgaacttgaagaaacaagtcaacgtattgccccatttgctggtgcaattgctaaagtagattttgcaactaaaacaggctatgcagtttacattaatagtaaaactgctgatggcaacagtttgccgtttgcagcgcaagtctttaaccagaaagatgaagctgtaggtattgttgcacaaggtagtatgatttacttacgtaccccacttgctcaagaccgtctctatgtgaaatggggtgatgaaagtaatgaacgttgtttggttgagtacaacatcagtaatgagttgcgaaataaacaacaaagcatagttatgactgaggctgtctgcaaatga

SEQ ID NO: 47231 - DNA, 1011 bp, Acinetobacter baumannii
atgaaaagaatattattaacgggtgctctatttaccgcgggctttggtgtgtatggtgaagcgaatgcttcatgtattatagttaattatcaaccaaatgatgttcgcatggcagtaggccgtgttgttgtacgtcctagtgatccagtgggtgctgttttaaggaaagcaactttccctatcagtagtagcggtacacaagcgatgtattgtgatagtagagatactgtagttgctcaattaacacaagcttatccattaagttccttaggcaatagcatctatacaaccaatattcctggcattggtattcgtttatatcgtgaagcagagaatagcagtaatttttctggttattacccttatgaacgtggcggtatttctggcactcgttatttggcatcaggttattttgttgtagaaatcattaaaattgctccacaaactggttctggaacattagtaccgggcagatatagtagttattacgtccgtggctttccaaatcagccatttttaacaagtactgttgatgctaatgcaattaccattgcttcttcttcatgtgaaattcaaggtaatattaataaagttgtacagttgcctacagttacaaaggcaggttttaaaggtgttggctcaactcaaggcgaccaaacttttgatatgaacattctctgtaatggtggtatcaaccctactggctatgaagagaaaaaccttattagtttaacttacgactttacccaagatggtaccaacaatcaggttttagcgaatactgctccaacatctgagaaagcaaacggcgtaggtgtacagttactctggaattatcaaaataagaatcaggtcatcaaaaaaggtgacaaattagcattaggtacattgtcttctaaccagacaattcaatataacgtaccgatgactgcccgctactatcaaacagcaacaaatgtgactgctggtaaggtccgtgcaatggctactgtaactattgaatatgattaa

SEQ ID NO: 47232 - DNA, 534 bp, Acinetobacter baumannii
atgaaaaaacttgctttgatcgctgctctttcggttgtagggattgcgaatgctcaagctgctgatggtacaattacaattaatggtttagttacagacaaaacttgtgacatcgttactcctgctggtaaagatttcacagtgactcttcctactgtttctaaacaaactttagctgttgctggggatgttgctggccgtactcctttccaaatcaacttagctaactgttcacaaggtaaagtagctacttactttgaaccaggtgcaactgttgacttcaatactggtcgtttacttaaccaagacgctactggtgctaaaaacgttaacgttcaacttttaggtagcaacaataacttcatcccagtacttgctgctggtgcaaacggtgctcaagttaactctcaatgggttgacgtagctgaaggtgcaagtgctgaccttaactactatgctgaatactatgcaactggtgcttctactgctggtaaagtaactacttctgttcaatacacaattatctatcaataa

SEQ ID NO: 47233 - DNA, 600 bp, Acinetobacter baumannii
ttggctaaatttagcattgatttgctcagacatggagaaagccagtatagccataccttacgtggccatttagatgatgagttaacggcaaaaggttggcagcaaatgcagtcaaccattgagcaagtttcaaatcagccatgggatgtcattgtaagttcatcattaaaaagatgtgtttgttttgccgagcaactggccaaaacagcagaactccccttacttgtaaatcatgacttaaaagaaatgtattttggtgaatgggaaggcatctcaactcagcaaatttatgaaacttcacccgaattactggcaaacttttggcaaaaaccaagtcaatattgtccacctcgcgcagaaacattagaccagtttcaaacaagggttcttaaaggctttcaagatttgctggagcatatgcaaaagcaaaacttaccgcatgctttagttgttactcatggcggtgtgattaagctattggcttgtttagccagacaacagcctctagatgacttacttaaaatgccggcagagcttggaaaattatattcactcgaattttctgaaacagatggtcaattaacttttaagttaagatag

SEQ ID NO: 47234 - DNA, 1113 bp, Acinetobacter baumannii
atgaaaataaaattatcgaaaatagtaatagccagctcattattgatatttgcaaatatgagttatgcagagggagtaaaacggttttctgtctcggcaggttggttacatgtaatgcctcaaggtaaagctaatccatttaatatcaatacaagtgttaaaaatggaacagttgctaaagttggaagcatttcgccgaccagtttcttaaactccgttgatcctaatgctacagaggtagatgtaggcggtgaaccttttaatcaaaaagagtttcttgaactcgctttaaatgatgactttttaaaagggctcttacttgatgaagaaggcaatataaaacctgaggtagcaggtgaggcaacgattcaagggttagagcagtggcatcaaaatgatgccggccttgaagtagatgacacagacacattagggcttatgtttaactattacctcaatgacaatgtgtctttacaatttattggaggcattccccctaaagtcgatattaaaggtcaaggcgaaatcttggcaccattaagcggtgtcgcgttgtcaccacatgaattagttaaaattctttttccgaacggcattaccttaggtcaagcggtcccgattaccaatttaggcaataaacctaaagcagctagtgttcgtgcctggacacctgcaattgaagcacaatatcaatttgggaagagtggggtgaacaagtttagaccttatttaggtgtgggtttaatgtatgctcattttaatgatattaagctaaatgacgaaattcgttctgacctgatctctgcaggtcatatgattcaaaatgtattagatggtaaggctggggctgccttagatcgtaaagagtctagtggaaatatggtggttaaagtagatgcagatgatgcgattgcgcctatatttactgctggttttacttatgattttaatgattcttggtatacagttgcctcagtatcttatgcaaaactaaataatcgaacacaaattgatgtcattaaccaaaatacgggtgctcgcttaattcatgggtcaactaaagttgatattgatccgatcattacatatttaggggtgggctacagattttaa

SEQ ID NO: 47235 - DNA, 2538 bp, Acinetobacter baumannii
atgtcagaatggttcatatccagtatatgctttaaaaagcgcactacatattatttagtattgagtctcgcaattaatattcccttaactgtatatgcatcagacaatatgaatagggaaaatattttaaaagctgactttgatactaattttttagtgggaaatgcacagaaaattgatattggtcgatttaagtacggcaatcctattttaccgggtgaatatagtcttgacgtctatattaatgggcagtggttaggaaaacgaaagtttgtttttaaaagtactcgttcgaatgagaatgcaaagacctgttttaccccagatatgcttttagaatatggagttaaaccagaaattcttcatcatgaagtaagtagtacctttacctgtaatgacttggacaagtgggttaacgatgctttttatcaatttgatacttctcgtctgagacttgatatttcaataccacaagttgctttacaaaagaatgctcaagggtatgtcgacccacgtttatgggaccgcggtataaatgcagctttttttgcatacaatgcttctgcctatcgtattgtaaataataaccatgaaacaaatcatgcgtttatgggtacaaatgttggtctaaatctctatgattggcaattacgccatactgggcagtggaaatggcaagatcataatgaaatacaagaaaaggtttcttcctacacatcaaataatacatatgcccaaaaggcttttcccaagctcaatagtgttgttactttaggtgattattttaccaataataatttttttgatgccctaccttatcgtgggattaacatatcaagtgatgaccgcatgcttcctaacagtatgctcggatatgctccccaaattcgaggttatgccaaaaccaatgcaaaagtagaggtacgtcagcgaggaaatttaatttatcaaacgactgttacacccggaagttttgaaattaatgatctttatcccacaggcttcggtggcgaattacaagtctctatatatgaaacaaatggagaaattcaaaagttttctattccttatgcttctgtcattgagatgctaagacctaaaatgagccgatattcttttactttgggacagtttagggatgccaatatcaatctaaaaccatggctagtgcaaggtaaatatcaaagaggtattaataactatttaacaagctatacaggctttcaggcaactgaaaactaccagtcttttttaataggtagcgcatttgcaaccccaatcggtgcaatttcatttgatgcaactcagtcgtcagctgaattcgaacaaaagcccacccttaaaggacgaagttatcgcttaagttataaccgactatttactccaaccaacaccaatttaactttagctacgtatagatattccacagaaaattatttgaaattacgcgattcaattttaattcgagacttgcaacaacaagatattgatagattttccgtggggaaacaaaaaagtgaatttcagatcacattaaaccaaggccttccaaatcaatggggtaatttttatttagtaggctcgtggattaattattggaaccagcctaatcgtaatcaacaattccaatttggatatagcaatcaatttaaagatctgacttacagtatttctgcaattactcatgagcttgaccaagaaaatcaaaattctggtcatgaaacgcaatatttgttgtctttatcttttccacttcaatttaaaaaaaataccgttaattttaatagttctatttcagaagatagccgaactttaggaatgagtggttatatcggagaccgctttgattatggctcatcaatttcatatcaagatcaaggacaaacaagcctaaatattaatggcacctaccgtactaactatacaattataggcgcttcttttggtcagtccgatacataccaacaagaaatgatcaatttaaatggaagcttggtcgctcactcacaaggtattttatttggcccagaccaagtacagaccatggtattggtatatgcgcctcaagcgactggtgctcgagtcggcaatacctctggtctaagcattaataaacaaggttatgctgtcattccttatgtaaccccctatcgcttaaatgacattagccttgaccctcaagggatgccatcaactgttgaacttacggaaacaagtcatcgtattgccccatatgcaggatcaatcactaaagttaacttttcaacaaaagcgggatatgcagtttttattagcacccaaacacctaatggcggccatttgccatttgcagcacaagtttttaatcaaaacaatgaaatagtcggaatggtagcccaaggtagccggatttatttacgtactcccctaactcaagatcatctttatgtgaaatggggacaaagtaatagtgaagaatgtcaacttgattatgacattcaatcaaaaatcttacaggaaaaacaatcaattattatgacagaggcagtctgcaaatga

SEQ ID NO: 47236 - DNA, 537 bp, Acinetobacter baumannii
atgaaaaaatttatttttattgcggctagttctctttttaatattgcagcagcacaagcagctgatggtacgatcactattaatggtttagtaactgataatacgtgtacgattgatactggtgataaaaatcttactgtaaatttaccaacagtatcatctcaatctttgaaaaatgcgggcgatgttgctggtcgtacaccttttcaaatcaatttaacgaattgtgcttcagttggtaaagtcgcgacttattttgaaccaggcgcaacagttgattttaatactggtcgactattgaaccaagctacctctggtgcagctgccaatgtcaacatccaattattgggtagcaacaatgcagtaattcctgtaattgcgaaaggtgcttctggtgcacaagataactcacaatgggtaaatgtttctgctggggggaatgccgatcttaattattatgctgaatattatgcaactggagcatctacagcaggtactgtaacatcacaagtgaaatacacaattatttatcaataa

SEQ ID NO: 47237 - DNA, 663 bp, Acinetobacter baumannii
atggctactttgggcgaaaacttaaaagcaattcgcaaagctaagaaaatgactcaaaaagaactggctatgaagtcaggtgtcaaacaatctgtaatttctgatctcgaaacagggaatgccaaatcgacaggctctatacttgagctggctaccgcacttggtgttaccgcagaagagctaaaaaaaggaattgtcagtaagtttgacaataatgttgagcctataactaaaaaactaattcccgttctttcttgggtgcaggcagggacaatgacatcagtagaagctatcgatcctaataaaataaatgaatggttgccaccacttagtgcagatgatccagatggttgtttttatttgagagtagttggagtaagtaattcccctagatatgaagagggagactacattttagttaatccaaactatcaagtttgcgatctaatcgctgatgacctcatcgttgttagaaataattcagacgcaacctttaagaagcttgtaattgaaagcgaccagcgcaaatacttgcaagcattaaaccccaacttccatcccaatattattgaatttgaagatggtatggagctcgtaggcttagttattgatgcatttagaccattaggcggatcacgtccaaagcgtgttagaaaaagttaa

SEQ ID NO: 47238 - DNA, 363 bp, Acinetobacter baumannii
atgagcaaagtatcaaccgaattgagtgcaagtgcgagaaatagcattacaagggttttacgcattcttgcaaacagtaataactcccagattgctgaaaagttggggctagatccaactacattttcaagatttaaaaatgacaagaaaaacaatggcttgtcagatattgagaatgtttgcgcaatgttggatttgcttgaattaaaaatcgtaccgaagaaatacaagttaattcacaaggaaaagttggcagcgcttttgaatctatcaaaggcttatatgggacgcctaggttcagtcgatgatctttttcaagatgacattgaagactttggaattaatgaagaactcggatattaa

SEQ ID NO: 47239 - DNA, 303 bp, Acinetobacter baumannii
atgccattttttgttgttacttgtacggacaatgatgatgttttagaaaaacgattggaaatacgtcctgaacatattaaacgtctggaaaagcttaataatgaaggccgattgattacagcaggtgccttacctaaagatccaaataatattaagatgggtttttatggaagtattttaattgttgagtttgatagccgagaagatttagataaatggttgaaagatgaaccatttcttagagaaagggtttattcaaatattgatgtcaaaatttttaataaagctttcccaatttcctag

SEQ ID NO: 47240 - DNA, 159 bp, Acinetobacter baumannii
atgaactattcaatattagcagacattgaactaaatcggaagattagtttgtttcaaaaagcggttgaggcttatgtgcttaatcgaactctcgaaaactctatggcattggctaaagcgaaagctgatttagctgcatttgtattgagaggtgtttga

SEQ ID NO: 47241 - DNA, 879 bp, Acinetobacter baumannii
atgggtgcatcaattccaattattaagttgattgaagctatgaacgaacagccaatagcattcaacaagcactatgtatttttaggatgtgggatcaatggggcattaatgctctctcaattggtctactggacttctcgcactaaagacagtgaaggttggatctttaaaacacatcatgagtggactcaagaaactggtcttactcgtcgtgagcaagatacggccagagcaacacttaaatcacttaaattcatctctgagaaaaagatgggtgtgccttgtcgtgtttactaccgtgtagagcgtgaaaacttatatcaagctttgatcgaatactctgaaagcattgatattaatagtatgcacaattccgccatactgaatgcacagaacagccatactgaatgcacaaatccgccagactgtatgcacaattccgccatactgaatgcacaaatccgcccatctaatacagagaatacatacagagaatacacagagaatactacagatattatttgtgctgaatcagcactaaaaacacaaaaattcaaagcaaaagatttcttgttgaaaaacggagtatctgagcaaacagcaacagaatatcttgatcttcgcaacaggaagaaaaaaccagtaactcaaagagctttacaacttgttttcaaacaagcccaagaagcaaagttaagcaatgaacgtgtattccaaattatcgttgttcgtggttgggaatctttcaaagcagcttggaattggcaggagacaaatgcagagcttgagcaattagaaaatccagttgttgagcaacaagaaacagctccacgcaatgccccagttttacttcgcaaagaatacaagggggctaaataa

SEQ ID NO: 47242 - DNA, 1362 bp, Acinetobacter baumannii
atggattacttacattcagtccctacagagcaaggtgtattagtttctttgttatctcttgctgatggtgtagatcaatatgttcaacgcctaaaccgtgattacttctcaggaaagcatcagattatttttgatgcgattaaagcaatccacgatcgtggtgaacaaattgatttcattcttgtatgggacgaaatcaagaaaaacccattgaatcttcaccacattgatgagcagtacatgcttacgcttaatgcagaagcgcctacgcttatttcaacactggaacaacacatcgagaagcttcaccgtttaatggttcgtcgtaagttcgtagacatttctgtgcttatgcagggtatggcaaaggacttcaccacaaacctagatgagatgctcaataaaactcagaacatgattgctgaaatcggtgacaactctgagaagaaatcacttacctatgtgaatgagtttgtagcacgtctctatgcggatttagaagaaactcgcattgcacgaaagaacggcacttatgttgaatcgggcttaagaacaggattcattgcactagacaacaaaatcggtgctctacgtcgtggcaactttgttctgattggtgcccgtccatcaatgggcaaaacaacattcgctcaaaacattatgagtgatatggcaatcaaccaagaccttgttgttcagttccattcacttgagatgactgaggaagaaatcagggaccgtattgtttcaggtgtcggacaaatcaagcttcgcaatatcaagtctaagtttcttgaggatgatgactgggggcgtttagtccaggctaacaagatgcttgaaaatgccaaattcggaattgatgacacggctaatgcatcactctctgatgtccgtcgtcaagcaagattacttaaagctaagtatggccgtgtagacgcaattttcgttgattacctacaaatcatgaaaagcccagttgttactgataaccaagttagagcaattggtgaaatatcaaaaggcctgaaagcaattgccaaagaatttgattgcgttgtattcgctctatctcaacttagccgcaacttagagaacagacctaataaacgtccagttaatgctgatcttcgtgaatctgggcaattagagcaggatgcggacgtgattctattcatttaccgcgatgaagtttacaacaagaactctaaagaggcgggaacggctgaaatcatcattggaaagtgccgtgatggtgaggtaggaactgtacgtttaggaactgatttagcaagagcaacatttgcagatcttgatcctgcttacctcgctagcttgcaagagtttggaggtgcagcgtga

SEQ ID NO: 47243 - DNA, 252 bp, Acinetobacter baumannii
gtgaaagcaataaaacgagttaaagcattccaaaacatttttgacattttattattcgctacacatgcaacacaacctttcacgatgaaagacctgcgtgaccatgtgttagatgcgcccaacaacactatccagtgctatgtgcaggaattaattaaaagcggctacttggaaaaggactcatacgcaacttacaaagcaactcagtttgcaaaggacttgctgaatgttaaaggggagctgaaagcatga

SEQ ID NO: 47244 - DNA, 396 bp, Acinetobacter baumannii
atgaatatgttggttaacaagccagagttgctgtgcccttctttcccttacttggatatgtctacagacattcaggttgaaggtgaaacggtttatttcgacctaacctacggctgcaatgttcttaactgccagatcaaagctgaaacaacttacgagactcgtgaagtaactgatcagtttagtgggtgtgcccgtgaccaagagtatgaagtgcttgtggtggacacaagaactcatgctgttgtgactgacaaagacggcattgagtcaccaattggcttacgtttcaagcttacagactcacaagtaaacagcttaaacgagcagcttaaatactacgccgaagaattggcagatgaagaattggcagatgaagaagcgggagtggtgtga

SEQ ID NO: 47245 - DNA, 207 bp, Acinetobacter baumannii
atgagtgagataagtatgaatcaaagaattgaaaagtacaagtttagccaagccttcagggatggctcgaaagcttttttagctttctggattatcaccttcattgtatttgcattcttacgaggctgtgccgacgagcaacacgtcaacgaactcaaagcaaaacagaacatgtatgtgcgtgtgcaagtggaaggtgcctcatga

SEQ ID NO: 47246 - DNA, 219 bp, Acinetobacter baumannii
gtgaataattcagaactccctattaacaagttgatctctaagataaatgaagcagcttcaagaaaagaacctcttgatcttactatagaagatgttcagatcttatcaaatagcattggtgatagcttctttgtacctgtattaactaatgaacaagtggttgaattgtcaaaacaaggaaaattgggaagtccaataaaaccacataaacctgaataa

SEQ ID NO: 47247 - DNA, 747 bp, Acinetobacter baumannii
atgattgcaatgagcacaatggttgaacgtattcagggcgccctgaaagcaaagaagttatcttggtctaaagccgctacttcaattggtctatctgctcaagctccagcaaagtggaaaaagggacagattagtaaagagaccttagataagcttgccgcattacttgaagtggatgcaggctggcttctgaatggtaaaaatcctgcaaagcttgataacttcaatatgcaagagttcatggataagcatgggcttaataaaaaagaagatgcatcatttgataccgacgacatcatggaggccgatgttgttgagtatgaagtggctaacggttatgtatggattgatgtcgtggaagctagtttttcatgtggtactggggaatctattgagttccattttgatgtaattaatgggaaataccctttcccgccttcattctttcaacgcaaaatggttgatcctaaatgcttgaagcttataaaagctaaaggcgatagtatggaagagtatatttatcatgatgacttggtagggattgatatttcccaaactgaaatcattgacggtgaaatctatgctgtttactttgaaggcgaaggcatgatcaagaagatcttcaaagaagaaggaggcactttgatccttcatagccttaatgagaaatatagagaccggaaagttactgaacagaatggacttaactttaaggtaatgggtcgtcaagtttggcgcgcgggttaa

SEQ ID NO: 47248 - DNA, 231 bp, Acinetobacter baumannii
atgaatcctattcaacaagccattgatgctgttggtgggcgaaccaatgcagcgtcattacttggtatctcctacgttgctgtaagaaagatggcagagaaaggcgtcttgccacgtactgattacacaggtgaaaccaactacgcacagattcttgctgagcacagtaacgggaaagtgactcaagaatggttactcgataaagccaatccaaaacatttagcggcataa

SEQ ID NO: 47249 - DNA, 267 bp, Acinetobacter baumannii
atgagcctcgaaaaaaaatctacgcatgttcgtttatctcccgaaaaccatgaacgtgcaaaagtacttgcagaaattaagggtaaagaccttgctcaataccttgcttacttacttgaaaaagaaatagcaggtgagtggcatgtacttaatttacaagcaaaatcatttgagcgcttgggattaggagctttgatgcgggatctatcaaccgaagtaatttttggtgagggatcggaagggattcacggggatttagacaaataa

SEQ ID NO: 47250 - DNA, 1308 bp, Acinetobacter baumannii
atgaagcaaaagaaattgctcaagtatattgtagttgctattttactaggagtattgacgggttggatctgtcatcacttctttaatgaaggcgagcaactgaagcaaatcgcttcttatttcaacatcgtcacagatatctttttacgtctcatcaaaatgattattgccccattggtatttgctacaattgtgtgtggcattgtatcaatgggcaaatcaacttcaattggtagcatcacactcaagtcaatgacttggtttattactgcttcgtttgtctcacttgccatcggtatgggtttagcaaactttttccaacctggcgcggcgctagacctagcattaccaacagctcaacaacttagtagttcttctctcccaacaactactggttttaccttgcaatcattcttgagtcacgtgttcccacgcagcattgcagaagcaatggcgaacaatgatattttacaagtccttgttttctctattttctttggttcagctcttgcttttgtaaatcagggcaaagaaaaagactcagttatcattcgcttaactgatgaactcagtaaaatcatgttccgcattactgactacgtaatgatgttcgcaccttttgcagtatttgctgcaatcgcttcagcaattacagtacaaggcttaggcttaattgttgattatggcattttaatcgcagaattctacttcggtctgctattactttgggtcattttgttctctgttggcgcaatcgtacttaaaaaagatatcttccgtttaggtaaattgattcgtgaacctgtaacacttgcctttgctacagcttcaagtgaatcagcctatcctaaagttatggatgctttaaataagttcggcgtgcctaaaaaagtaactagcttcgttttacctttgggttattcatttaaccttgatggttcgatgatgtacaccacctttgcggtactctttatcgctcaagcttacaatattgatctgagcttcacccaacaaatcttgattttgttaacgcttatggtgacaagcaaaggtattgctggtgtttcaagagcttctattgtggttatctcggcaacactcacaatgttccatttgcctgaagccggcattctattattacttggtattgatcagttccttgatatgggccgtactgcaacaaacgtagtaggtaatagtattgcgactgcagttgttgccaaacttgaaggcgataaagtggctgatactgaagaattaccagagcctgtattaattaaatcaactcaagaacaaacaatcgcttaa

SEQ ID NO: 47251 - DNA, 744 bp, Acinetobacter baumannii
gtgattgaaacagctcgtcaccaccgtgaatttattcaagatccgattttaaaacagcgtgttacatcgctgattggtcaagaagccatccattcaaaattgcataatgagttcaatgatgcaattaaagagctggaatatccggtcgatttttatcgtttcttgggtgagaacttctttaaatatgtgttcttaaaattcccgcagccattaaagctttcactcatggcgggtattgaacattttactgcggtacgtgccgaatacatgatgaagcatgaaaagaatttctattataccgacgatgccaaaagtcgtgccttatggatgtggcatatgcttgaagaatctgagcataaagatattgcctatgatgtatatcaattactcaatggtagctacccactacgagcttctggcttcttcttagctttctttactattttaggtttgatcccagcaactaccttgtttattccggttttaagaaaaccacaggaaatgttgactagaaaattctggaaagacgcgcgccgtggtgtaggacttatttttggtccaaaagatggtgtatttggtagcaccattggccagattttcgattacttacgtcctgacttccatccaaatgaccatgacacgaccgaatatctagagtactacaaagacaaattactgaaagaaggcggcgcgattgcaccttactttgtgaaggaatttaccccacctgtacgcttgtcttaa

SEQ ID NO: 47252 - DNA, 834 bp, Acinetobacter baumannii
atgattttatttggcaaaaagaaagttaaaccaagccaaaaagcttatgccgtcgtgacgggtgcaggcagtggaattggacgaagttttgcagttgaactggcaaaacgtggcggcagcgtagtctgcgcagatattaatttagaagctgctgaagaaaccgtaaagttaattgaacagttgggacaaaaagcatttgctgtacagtgcgatgttgggcaagcagaacaagtacaggctttggctgatcgggcagaacagttattaggacatccggtaaccctcatcattaataatgctggcgtaggtctaggtggcaaatttgatgaaatgagtttggaagactggaaatggtgtatgcatgtaaatctgtggggtgttattcatggttgtcatgcatttgtgccaaagttcaaaaaactaggttacggtgcaatcattaatgtggcttctgccgcgtcgtataccgcagcaccagaaatgagtgtctacaatgtaacgaaagcgggtgtattggcattatcagaaaccctttcagccgagcttcgtaaattcaatattaaagttaatgtgctctgtcccacactggttccgaccaatatcattaaaaatggtcgtattccggggcgttattcaaaacttgcagaccatgcactcatgaactatgccatgacaaccagtgatgcagttgcggctttaacattgaatcgattagatcgtgggcagctctacaccacgccacagatcgacgccaaattattctggcttatgaaaaggacatctccaacgctatatgcaaagttccttgggctttcgtatcagttatttaaataa

SEQ ID NO: 47253 - DNA, 834 bp, Acinetobacter baumannii
atgattttatttggcaaaaagaaagttaaaccaagccaaaaagcttatgccgtcgtgacgggtgcaggcagtggaattggacgaagctttgcagttgaactggcaaaacgtggtggcagcgtagtctgcgcagatattaatttagaagctgctgaagaaaccgtaaagttaattgaacagttgggacaaaaagcatttgctgtacagtgcgatgttgggcaagcagaacaagtacaggctttggctgatcgggcagaacagttattaggacatccggtaaccctcatcattaataatgctggcgtaggtctaggtggcaaatttgatgaaatgagtttggaagactggaaatggtgtatgcatgtaaatctgtggggtgttattcatggttgtcatgcatttgtgccaaagttcaaaaaactaggttacggtgcaatcattaatgtggcttctgccgcgtcgtataccgcagcaccagaaatgagtgtctacaatgtaacgaaagcgggtgtattggcattatcagaaaccctttcagccgagcttcgtaaattcaatattaaagttaatgtgctctgtcccacactggttccgaccaatatcattaaaaatggtcgtattccggggcgttattcaaaacttgcagaccatgcactcatgaactatgccatgacaaccagtgatgcagttgcggctttaacattgaatcgattagatcgtgggcagctctacaccacgccacagatcgacgccaaattattctggcttatgaaaaggacatctccaacgctatatgcaaagttccttgggctttcgtatcagttatttaaataa

SEQ ID NO: 47254 - DNA, 747 bp, Acinetobacter baumannii
gtgattgaaacagctcgtcaccaccgtgaatttattcaagatccagttttaaaacagcgtgttacttcattgattggacaagaggcgattcactctaaactgcacaatgaatataacgatgcgcttaaagatgttgaataccctgtcgatttataccgtttcttgggtgaaaacttctttaaatatgtgtttttgaaattcccgcaaccgcttaaattatcgatgatggccggtattgagcattttactgcggtacttgccgaatacatgatgaagcatgaaaagaatttctattataccgacgatgccaaaagtcgtgccttatggatgtggcatatgcttgaagaatctgagcataaagatattgcttatgacgtctaccaggttttaaacggtaattatccgttacgggcaacgggctttttaatggctctcattaccattttagggcttattccaacagcaactttatttgtacctctactgcgtaagccaaaagaactgttgaccagaaaattctggaaagatgcacgtcgtggcgtcaacttaatttttagtccaaaagatggcgtatttggtagcaccattggtcagatttttgattacttacgtccagacttccatccaaatgatcatgacacgaccgaatatctggagtattacaaaaagaaattacttaacgagggcggtgcaattgcgccttactttgtgaaggaatttacaccaccagttcgtgcagtttcataa

SEQ ID NO: 47255 - DNA, 678 bp, Acinetobacter baumannii
ttgattggacaagaggcgattcactctaaactgcacaatgaatataacgatgcgcttaaagatgttgaataccctgtcgatttataccgtttcttgggtgaaaacttctttaaatatgtgtttttgaaattcccgcaaccgcttaaattatcgatgatggccggtattgagcattttactgcggtacttgccgaatacatgatgaagcacgaaaagaatttctactattcagatgatgccaaaagtcgtgccttatggatgtggcatatgcttgaagaatctgagcataaagatattgcttatgacgtctaccaggttttaaacggtaattatccgttacgggcaacgggctttttaatggctctcattaccattttagggcttattccaacagcaactttatttgtacctctactgcgtaagccaaaagaactgttgaccagaaaattctggaaagatgcacgtcgtggcgtcaacttaatttttagtccaaaagatggcgtatttggtagcaccattggtcagatttttgattacttacgtccagacttccatccaaatgatcatgacacgaccgaatatctggagtattacaaaaagaaattacttaacgagggcggtgcaattgcgccttactttgtgaaggaatttacaccaccagttcgtgcagtttcataa

SEQ ID NO: 47256 - DNA, 723 bp, Acinetobacter baumannii
atggcaataaaaatcttagatgtatcaggtcagaaaattttagaaaatgaaaaagaggctacaactcaagactttattatgattaatcatccagtctttttcgcgaatgatgctaaacgatatctttcttttatgaatgatgtgaatagccataatatgatcagaaagcttcatatgccgtttgctttaggttttaaaggtaccatgaatgctctcggagcacgtaattcacaaattgcaaatccactatatgcacggtattggtctatggttccctatcaattaggattaggtgttgaccgtcaagcagttaaatactccgtaagaaattgctctacagtgtctgcaactctacctgatcaccctagccataattttttacgggatgctttaaaagatacattgcaaaagcaagacgtgtgtatggaatttcttatacagccaagaacttcgactaaaatgctggttgaagatgcaatgaccgagtggaaagaaaatgaagcacctttttatcaagttgcgaccattcatattccaaagcaaagctttgatacacctgaacagaatcaattttgtgaaaatctctcttttacgccgtggcatgctttacctgagcataaaccgcttggcgcaataaatagaatgcgtaaaattatttatgaaaatataagcagagttagacacgatatcaactcagctccccgacaagaacccaaaaactaa

SEQ ID NO: 47257 - DNA, 372 bp, Acinetobacter baumannii
atgaaaccagaacagtttattcgtgacttcggcgaaaagaaggcgagagaggttgttgatggggcgcctagcaatgctgagagcttccaagatggctactacttcagaacaaaaccacagtttgaatttcacaatggcattcatgaggcttggaacttaactgataacgatggcgagtacttcaagaagcgtggctttgaaccagtaaaaatcaatgacctgaaaatgatattggaaagcctccgcatcgtggaccagtttggtggaatagaaaaagcaaagctagttgcggaaactaaagacgggatgggttatttgaagggatgcatcaaagaccacgaatcaatatacggaggcggggaaaatgcataa

SEQ ID NO: 47258 - DNA, 219 bp, Acinetobacter baumannii
atgcataaatacgattggtcaaccattccagtagaagccaattgggctgcaactgatgcaaatgggttgacttgttgctacaccactaagccttttatgtggggcaatgagtggttagttaaggaacttgatgaagttgttctttgttatagatctgagcctaaagaagactggcaagactcactagaacaacgcccaaaaggagccagccatgagtga

SEQ ID NO: 47259 - DNA, 231 bp, Acinetobacter baumannii; identical to SEQ ID NO: 41935

SEQ ID NO: 47260 - DNA, 324 bp, Acinetobacter baumannii
atgaaaccagaacagtttattcgtgagtacagggtggagaaggcgagggaggttgttgctaatcagccaaaaatgaatgcaactcaatacagggctaaagacaagaaatattcgtctctgtttaaaccaagcccagagattgtttatgtagctgacctcaagcgtctggtggagtctattgatttagtcgaatcatggggtggcattgaggacttaaaactatatgacttgtctcattgcaaagataaacctgaatctgctggatacaagctgcttaaagcaattgctgattacgaatcaatatacggaggcggggatgaatag

SEQ ID NO: 47261 - DNA, 381 bp, Acinetobacter baumannii
atgaagaaaatatattttcttattaattctcttagtagccgttcaggtacagaaagagtcgcatgccaattggctaatttattttcagataatggctttaagattattttctttaatagaaatactattaaagaaaatgtatcatttaaattagaagataatattgaagtggtttcattcaataatagtcttcttactatggctaacgcgcttcgtaagttgaatgccgatgatactttattggttcataatatggggaaattaacttgttttgttttaatgttacaactgagatgtaaagtagttagtctcgagcatggtcctttttttgcaaaggctaatttgattaaatttttgaataaaattttcggaaataagtaa

SEQ ID NO: 47262 - DNA, 186 bp, Acinetobacter baumannii
atggagtggattagttgtgaagagtgttacccaagtccagatgagtgggttcttggttatataaatgatggtcaaggcactacaggtcacgaaattgtttattgccataacaagaaattttatgacagcgaatatgaactaccaataacccactggatgccactaccagaaccaccacagaattag

SEQ ID NO: 47263 - DNA, 231 bp, Acinetobacter baumannii
atgagtgagtttaaagcgggtgaacaagtcaaatacaagtttaagaatggcgtagcaacctttgtttattacggggcaatttcacctagaaacagctttattaaatttgctggcgataaggataacactatggttcttagtcatcacttgacgcgcattgacaacgatatgggtgacgacttccccatagaaaaccacatcagcccacattgccaatcgagggatgtttga

SEQ ID NO: 47264 - DNA, 630 bp, Acinetobacter baumannii
atgggtgtcaaccaagttactggaagtaccgatgtcgcgaaaatggataaagagcctcaatataacgagcaatatgaaattggggtaaaaagtgaatggttcgataatcgtttaaatactcaattttctgtctttgatatccataaaaataatattcgctataaaccaaaccctgacagtgaaccagaggtttgggcaactgctggtcaacatcaatctcgtggtctcgaatttagttttattggccgtgtacttgataatgtctttgttcgcggtgggtatggctataccgatgccaaagttaaagaagataatcaaaaccctgagcgagaaggcaattatttagccaacacttctaaaaatacgggtaatttatttgttcgctatttaccaactgaacagtggtataccgaagtgggcgtgacctatgtcgggtcttattatccaaatattaataatcaggtaaaaatggaaggctttaaccgtgtcgatgcggcgattgggtatagtgcagagccgtggaatgtcacacttgcggtgaacaatttaaccaataaagagtactggcgttcagacagcatgccaggcacaccacgtaatgtgttattgcgtttgaattatcagttttaa

SEQ ID NO: 47265 - DNA, 1284 bp, Acinetobacter baumannii
atgaaatttaagaaaattctgcttaacgattggcggcaatttcaaaatatagatattgattttcatccaaatgttacaattattacaggggcaaatggttcaggcaaatcaacaatattaaaattactttctaaacactttggatggtatcaaccatttttaggcacccctattttatcgaaagaacaaggagtgttctattataagacggtatttcgaccattaaataaagaatatcaaacatctcactatggtcataatatccatatattaggcaatattttttattctaatgatgcttcttctgacatttttattcatgaacaaatatacagcgatgctcaatttgacttgcaatttggggggaacatccctgtagttaagggggtccatatcagttcccatcgacctattcctaaatatgaaagattgcaaaatattcccactaatcctatggatgcgtcgcaggcttttaatagttactttcaagaaactgttaacttatttaataataattatacacagcacaccccaatttatagaatgaaagaagcaattgtttcaatggctgcatttggtccaggaaatcaatttgtacagaaaaatgaaaagattgaaaagcaattttccgactttaaagatattctaaagcagatattacctgctgatcttggttttaaagacttaagtgtacggataccagacctagtattggaaacggaaacaggagattttctattagatgcctcttctggaggaattatgtctattattgatctagcatggcagatttttctttattctcatgacaaagatgaatttgtcgtcactattgatgaaccagaaaatcatttacatccgtctatgcaacgttctctattgaatgattttgttaaagcatttcctaaagctcaatttattgtggtaacacatagcccgtttattgtttcttcaattcgtgaatctaacgtatatgctttaaaacatgaaaaaaataatgtaagcgatcaacaaagtggatgggcaaaaaaagttgtttcttataagttagatctgaatcaaaaagcagctactgcaagtgaaattttgcgtgatgttttaggtgtacccgtaacattgcctaaatgggctgatgatgagttacaaaaaatctgttcgacctttacagtccaagatattacaacagacggtttatctagattgagagctgagttaaataatgctggtttaggagagttctatccagaagcattaagtaatatcgtaggagagagtgggttatga

SEQ ID NO: 47266 - DNA, 354 bp, Acinetobacter baumannii
atgtctgtgcagcgtttacacgttacttcacgctactgcgaagttgcgatttcaggtaatttggtacacctagctgggcaactcgcagatgatacaaacgcagatgtcacagggcagactcaacaaactttagctaatattgaccgtctattggcagaagctggaacagataaaacccatatcctttctgttatgatttttttaaaagatattgaaaaagattatgcagcaatgaatgcggtttgggatgcatggattagcgaagggaacccaccagcacgtacatgtgtagaatcaaaactctatgcgccagatgtacttgtagaaatgacggttgttgcggtacttccataa

SEQ ID NO: 47267 - DNA, 204 bp, Acinetobacter baumannii
atgtatcaaacgaccaaatcagctttaagtcaactcaaacaattgtgtccaaatcaaagctccgttgcagcttgcttgaatcagcttcggcgcgccaaaatccaatttttaaatttaggtaatattattgtttgcccacaatatcgctctattcttattttcaaacagcgtaaattaatggaaatagaaactttttcagcctaa

SEQ ID NO: 47268 - DNA, 1395 bp, Acinetobacter baumannii
atgcgtagaaactttatcaatcttaaaataggagcggttttattcctaattttgattttttatattggcctcttttttatttcaagcttggtagatgaacgccaaagctatcaacaacaagtaattcaagacattgcaaaagaacaaattcgcccccaacaagtgatcgcaccatatttaaaaatcccttatcaagttcaaaccatatgtaccgatgagcaaaagaaaacttacgcttgtatccaaacattatttgtcaccctaggggcagaatcaacggactggaaagctcagtttaaagtttctgataacacttacaaacgcaatatgtataaagcaattagctatcaaaatcacatgttaggtaaaggtgtatttaaaggcacaatgcttgaatcacaacgcaactatctttgggatcaagctgaaatcatttttcctatccaagatgctcgcggtctaaataccaaaccaatatttaatattgatggaaaaaattataaatttgacttttctgcacaaagccaaggtcaacatggctttgatcttcttcatatcaccagcaagcaatatcctgaactgatcctaaaattgcaaaaaggttttagctttagtctgcaatttgatttagaaggtttaagcgaatttgcctttgttccaaccagttacgagatgacctaccaagctaaaggcaattggggagatgtcaaatacgatggtcaaagtttgccttttaagaaactgagcaaaaaacaattctttgaagctgactggaaaaatattgctttagggaaacgtaatttagatcgtctctcaacctgtgcaaatagtcagtgtttttaccaagctgtaaatactcaaagcaatctgatcagtaatgttgacgctgcttatgctgcttcaaatacatcttcaaacaacatttctggtatttcaacgcagtttttagaacccgttaatatttatacccgaactgatcgtgccatcaaatatggcattatggtgatcattattacctttggttgcttcttcttatttgaagtattgaaaagtcttaaaattcatcctattcagtacgctctggtggctatggcacaaggtgtattctttgttttgcttttatctataagtgaatattatgcttttggcctagcctacctcgttgcggcagttgcatgtattggcttgattacttggtatttatacttcgtcgttcaaggttttaaagccgctatactcttcggtgttttgctcagtgctttatacggcatgatgtatctattactacaatccagcggcaagaccttcctttttggctctattctttcgttcatactaattgcatgtgtcatgtacatcacacgccatgttaattggtatcattccgaacaatag

SEQ ID NO: 47269 - DNA, 1467 bp, Acinetobacter baumannii
atgtccatctttatccgcatttggtttttctttagcttagtggtggtactgagcctaagctttattgcttatacattaaaccaacaggtcaaaccaaatgtccgccaagtggtcgaagatacacttgctgaaaatgccaatattattgcccaactgattgcagaggatgtagcacaaaaacaagttagtacgcccgaatttgatcaaaaaattcaagcagcattatctcgccaactgaatgctacaatttggcagcataaaaaagatgaaattaatcaacaactttatataacagatcagcacggcatagtaatctacgactcagaagatcaagccattgggcaagattattcaaaatggaatgatgtttatttaaccctacaaggtaagtacggtgcacgttctactgcaaccacaccttatgaccgaaacagcagtgtaatgtatatcgctgcgccgattatctacaaacaccaattaataggtgtagtcagtattggtaaaccaaatcaatccgtgcaaccttatattacacgtgcagaacgtcaactgatttatcaagcgctgtggatcgctgcactcagcttattacttgcaagcatggtggcatattggttaagacacagtattgataaagtacgtcgttatgctcaagcactagcacctgtcaatcaagctccatttttttattctgcaaaagagctgaaccaagtgactcaggcgctcagtgaaatgcgagagaaactcgaagatcgtgcttatgtcgaaaattatgtaaatactctgacccatgaattgaaaagtccactcacggcgattcaggccagtgcagaactattacaagatgatctgcccttagaagatcaacaacaatttgctgcacatattgttgagcaaagtcatcgcttacaatctttaattgaacgtatgctattgctcacacgtttagagaagaatcagcatgttttagagtttcaaaatattgatttattaaaagtgattcgagattgtttgatacaacaacacagtgctctccaaattaaacatctccaattagaggtgaatcttcctgagcattacataatctatgctgatccattttggcttaaacaagccatcaataatcttttagataatgcaagagacttttgctctgaacaaggtcttctcaccattcaagtcaggaaaaatactgtcactgatggcattgaaattctgttattcaatgaaggtgaagccattcctgaatatgccttaaatcgtgtctttgaaacctatttttcattaccacgtccgcataaccagcaaagaagtacaggtatcggactaagtatcgtgcagcagattatccaacagcatcaaggtcatatcactattcaaaatattcctgaaaattatttggattttttaaagcaacacaaatcgggagtattgctaaaaattttacttcatcaaaacttcacataa

SEQ ID NO: 47270 - DNA, 723 bp, Acinetobacter baumannii
atgatgagccctaaacaaattttatgtattgaagatgaagctgctattgtccttcctctacgttatgcgcttgaacgtgaaggctggaatgtcagttgggcaaatacggggactcaagcattacaatatctttcagaacaagcttttgattttattattttagatatcggtttacctgatcttaacggctttgaagtctgcaaacaactacgccaaaaatctcaaacacctttattatttcttacggcacgagatgatgaaattgatagagttgtcggtttggaaattggcgcagatgattattgtacaaagccttttagtgcaagggaaattgtggctagaattaaagccatttggcgtagaatggaagtacaaatacaaagtaattcaagtcaaaatccaatctctcaggctgcaatagttgctccatgctcgatatggtcatgcaatccacaatctttgcaaattcaatatcatggaaaatcattacaactgacgcgttatgaatatcgattgttatttttgttgattcaacatcctgaacaagtctttagccgtcagcaattaatggatcatatttgggaatatcctgagcatagcttagaacgcacagtcgatacgcatatcaaaagtttaaggcaaaaactaaaacaaattacccctgataatgatcctattcggacgcatcgagggttcggatacagtctagtgaagttaggttaa

SEQ ID NO: 47271 - DNA, 501 bp, Acinetobacter baumannii
atggcaaaagacaatcaagacattttctataacgatggtgctttggctgtttcatggaaagagcttactgaacgtgctttattttgggaaaagtttattcaaaaatatccaaagagttattttattaatgatgccaaattactctttaatgaatatcgatacttcattttctttggtctagataacacacctgtgtcgaatgaatatgccccgaacacatggtttgaccctgatgcacttcagcaaatccgctttttatcaactcagagccaatcaagtttagcgaaacctgcccaacaatttcttaaatttattgccacccctgtcgatgagcgcaataagcaatttaaaatagatttaactgatgaaaatgggcaaaagaaatctacctatcagattgtgcatgaacaacttgagcagctattaaaactagattcaccttggaacacggaagtctaccgagactgccatatagatgcggtttgtatagatacaaattga

SEQ ID NO: 47272 - DNA, 582 bp, Acinetobacter baumannii
atgaatgataaaacagcaagacagaaaattctcgatgcagcggcaacactgttttataacgatggcattaccgcaacaggaattaatacggttacggctaaagcagatgtagccaaaatgtcgctttacaataatttttcttcaaaaggtgaacttgttgatgcctatattgctgcacgacatcaagagtggttagacctttatcaaaagcgtttagaaaaaacaaaaacagctaaagaagctattttggccgtatttgatgcctatcaagatcatgccgagtttgcttatgaaaagggttttagaggatgtgggctattaaatgctgccgcagagttcccagcaaatagttcagggcgaaatgctgtaagacagcataaagaacaagttgaggcgattgttgccgagcatttaaatcgcttattaaaagattcacagcgtgttagctatatcgcctcacaactttcttttttattagaagggtcgatggcaagagctggtttagagggtagtagccgtcaacttcaattagcgagacaaatggcagaagatattttagatcgagaatcccaacatgattag

SEQ ID NO: 47273 - DNA, 1053 bp, Acinetobacter baumannii
atgaaagacaagccgacattaacttatcaattgccgactcagtcctgttggacgcatacatggataaaaccacctttttgtcatcctgaactgggccatgaaaatgatacccgtttttataatcagcagcctagatcgcctgcacgaggatcgaaagagttattgcgttggttagtcactcgtgagtcttatacttggaatgttgatattcagaatgaatatgatgtacgtgttaatacaccaattgctttaccacaaaaccgtccacatgcggatttagatgattggcaagtttggtttgtagggcatgctacggtactcattcaaattggaccttataactttattaccgatccggtatggtgtgactacgcaagtcctttacatggtcgtggtccacgtcgtgtatgcccagcgggttttgctttagagcagttacctaccattcacggggtattgttgagccataaccattatgaccacatggatttagcaacgcttgagtggcttcataagaagtttgctatgccgatttatacagggcttggcaacggattttacttacctaaagagttccatgtaattgaaatggattggtggcaggaaattccttatcacgaattaagaattgtttatacacctgctcagcatggctcggggcggggtttacgtgaccaaaataaggcactttggggcggtttttcggttttggcgaaaacaggacattgtttttttgcgggtgataccggttatgcgggccacttcaaacaaattcatacgcgctatggcgcgccgcgtgtggccttacttccaatcggagcttatgaacctcgtaaattaatgagctatgttcatatgaatccgcaagatgcagttcatgcgcatctagatttacaagcacatcggtcgctggcaattcactatcgaacttttcagttaacggatgagggacgtgaagatcctgaacatgcattagctcaagccattaaagcttcatcaaagcttgctaatcctttttattgcattcgagaagggcataaattgactgtttaa

SEQ ID NO: 47274 - DNA, 717 bp, Acinetobacter baumannii
atgcgttatttaattattgctttaagttgtgccgcattacttgcaggttgccaaagttcatcacacttagaaaagaattcaggtgagctgaccgccactttacctaaagttgatgttgataaagaacccggtttattggatcaatatcgtttagggggcttcactgtagggggatgggtaaatcaaaagttaggtcagacatttgcgccagttaaaccccaaaatgagcaggcagcagttgtctatctttaccggccagacacgaaatggaatcgtcaggaaattgcagctatcaatttatttgtaaatggcaaacgaattccaagtttattgcataaccattattactggattgaactgccagcaggaacttaccgtatttcagcgagccgccctttgttggggattcattttcaagaacctaaatatatcgatattacgttagatgcaggcgcatcttattatttgaagtatgatgaagaaaataaaatggaccgtagtgagcacacgggtccatttatgttaatgcaagataatattggtcgtagagaaattgcatttaccgagcttaaatcttctagctataattttgttgctgaagatgcttcaggaaaaatacgtcataagccccaagaattaaaacctgctaaatataatgaaaagtcagatgtacatctgataaaaccatttaaattgtggaaccccttaacgtggtaa

SEQ ID NO: 47275 - DNA, 420 bp, Acinetobacter baumannii
atgaaaaccttacaaatattatgcgttgcaagttcgatattggcttcatcaaccttatttgcagaaacaacacagccacaacaaattggtgaaacgacacccaaaacacaaccttatggtgacaatcctagcttagggcgggtactgttgtataaaacaggcaaaggcatacaaaatttaggaaactctattcaaggtgcttctgaaaagacatcgaataaaattagtgagaaatggcaaaacaccaaagaatttacggctgaaaaagcagaagtcgttcaacaaaaagcagatacagccaaagtatttactgaacagaaaatagagcaagccaaacaaaatattaccagcagtagaaacggtgaaaatattccaatcgaacaaggtgagctaagtaaatctagtacgactgccaattaa

SEQ ID NO: 47276 - DNA, 1086 bp, Acinetobacter baumannii
atgtctaaagtccaaaaaatatgccaaggtttggcggtaagttttcttgcagcttcagttttatcaggttgttcatacgtcgtgaaaagcggagcaaatgttgctttaggttttacggaaaagcacgtcgttccacctattttagcaatgcaagatgctgaaatggtctgtaatactggtagtgccttaactcctgcaatcatgtcgactaaaggtatgggggcagatcctactcgtgttgctgtcttaatgtatgctgcttcaggtgtatgcgcggaaaaccaagcattagaacaggaattacgttatttgcgcgcttcaaaagcagggcaggtaacagaagctcaagatgcacgtattgcacagaagcgttgggctgcaattgctgctgagcgacaatacgcaggctataagctctttgctgatcgttgggaatctaaatataaatatcatttaggtgactcttgtccaacaatgcgtagtgatattgaccaaactgtatatttacttgggatgattagtggtcttcaagctgtgaccaacgacattaactctggcggttctgtcaatgttccgaaagatattgctgctattgtagagcgcggtatggtctgccttgataaccaaaaattctggggcgcaccaaatgcaacgcgagcagtgatctggactttattaccaggcgctaatgaaggaaagcctgatccatatgagactttaaaacagtccgtgcaaattggtgaacaaaaaggtgttcgtttatctcatgcattatatgccgtggctgctcaagcgagtggtgacgatgccaaaatccgtgatgcattaaaaacttatgccgcatctcaagcagatgacaaacctgtcaatccgaactttaaattaatcgatagtatggctggtttaattgtgcgcggtatttctgatcgttactggactgagcatactggtgttcgtaccggtgatgacggtatgtctcatttctgggatgagaaaaacgaaggctcagctgaattggatgagttgtttgatggtggagctgcatcggaagccccagctgacacaaaaactgcacctgcacagtaa

SEQ ID NO: 47277 - DNA, 2196 bp, Acinetobacter baumannii
atgcaagaatatcaagaaaaaagatctggattaggtctgctgggttatatctggaatgaatggatctcaacattcattatcctcattttactattgatgacgctcataattggtaccggggaaatgatccacggtcaattattacgtatcggggaacgtctttatggtgaccctgctacaggcatgcaatattcattcttgcgtgctgagcctgaaaagccgacttgtgatcgacatccgaatattgatgctcaagtaaaagagcaaatgaaagcaaatgcatctgatgattttgcgagcttctttggtgctgcatcggaaagtgatgtccgtgcatccttactggcagcacagcagcaatgtgaagaaaaatatcaggcttacgacaaaactattaaatatatcgaagcaaacccgggagtacgtacttatcgtgcgatcgaaacaggtttctttggtatttttaaattcggtacagagaaccgtgccattttactggtctttatggtactgatttcagcgattactgcatcattgaaatatcaccatattggcttgcgtaatccagcaacaaaaatagattacaaagtgtattctctatttatgttgattggtaatgcgctactaagcttctcggtcattagccagtatcgttcagtcattaattccggggtaacacctacttatgaaacagtaacaatttactggatatggatgattctttttgttgttctgaccttaattagtctgtatcaactatttgtttcacctccaccaaaacgtgaaggcggtaatataggtttagccttactttctgtacctttgtatgcctatatggcactaattacaggtattgtattcacgttctttatggattatccaatggggcaagggatttaccttggtttattggttgagttctcgggtatcttcttaaatcttgccttatttatttgggcgggtatgttactcacgcaaacccgtgttatggacttgttcttaaatgtacttcgtccatggaacttggcgccagaaaccttaacttggttaattctgattgctgctgctgtaccgactgcttataccggtgcttcggggatttttgttatcgcggctggtgcgattatttataaggaagtttggaacgcaggcgctcgccgtcaatatgcattagctgtatctgcaatgtccggttccctaggggtagttgtacgtccatgtctcttggtcgttctaattgcgatgttggatagtcgtcatgttacatctgatgaattattcggacatggtatttatgtcttctggctaacagcatttattttcttgggcgtatctcttttattggcagaagaaaagttccgtgtgaactcgccaaaagtggcactaccaggtatggcacgagctttcgtaccggttattccatatatcctaattactgtagttgtccttgcattttataaatatgcattagatacaggaatgaatgaatttactgcaccagtgattctgccactcgtgcttattgcgatgattctgtacgataaaatggttatgcctaaagaggcaccagctttaaatattcatgaggcgattgttcgtgagcatgaaaagaaatcaccgttcttacagactcatgatccgcatagttcacagttccgtcttggttttggtggtgctttacgttttgcgacatcagaaacagtggggcatatcggtgccttaattattttgatggcattgtctgcaagtgtaggtggtttaattgaacgctctgaagtggtcgaattattaccaactcatttaggcagtatctatatatcactggcatgtattgcactgttacttgcaattattggtatgtgtacagatccatttggtgccgtaattttagtggcagcaactattgctcctgtagcttacgaaaatggtattcatccaattcacttctggatgattgtattggtcgcattcgaatttggttatgtaacgccgccagttgccttgaaccatctattaacgcggttatccgttggtgatgatgaggtgaatgctgccgatgcagaagccaaagagaagtacaccagtttctactaccgatatgaacgttggttattaccaattattgtcttgttctcatcattggtattggtaacttatgcaccactaatactgaaactatttggttggtacaaataa

SEQ ID NO: 47278 - DNA, 2010 bp, Acinetobacter baumannii
atgcgtcagcttattcaactgattgcaaagcataaccatgcctactatgtcatggatcagccgacaatctcggacagtgaatacgatcatttatttcatcagttaaaagctttagaagaacaatatccggaacttgtacaagctgactcaccaacaacgaaagtaggtggtcaagcgctttcaaaatttgagagtgtgacgcatgtggtgccaatgctttcacttggtaatgtatttaacaaagaagacttatttgcatttgcacgccgtgtagaagagcgacttccgaaccagaaagtacaatatgaagttgagttaaaactcgatggccttgcgatttcactatggtatgaaaatggtgtactcgttcgcggcgtaacccgtggggatggcgaaacgggtgaagacattactcaaaacgttaaaaccattcgtaacttacctaaagttctgcattcagaaaaatatgaaatacctcgtctacttgaagtacgtggtgaagtattgatgccaaagtctggttttgaaaaactcaatgctgaccaagaagcaaagggagaaaaaaccttcgctaaccctcgaaatgcagccgctggaagtttaagacaacttgatccaaatattgctgctgctcgacctttggcattttatgcgtatgggattgcacagtgtgaaccaaatcatggcctaacaaccatgcatgatagcttgcaatggttaacggaacttgggttccaaattgctgagcgtcagtacttgtgtaattcaattcaagaagtacagcagcgctatgagcaaattcagcaagaacgtccaaacttgcaagttgaaattgatggcatggtggtgaaggttgatgacctaaaacaacaacagcagcttggtttcttaagtcgtgaaccacgctgggcaactgcttataaattcccggcacaagctgcattaactacagttgagcagattgactggcaagtagggcgtacagggactttgacccctgtagcacgcttaaaccctgtttttgtgggtggtgtgactgtttctaacgtaacgttgcataatattggggaaattcatcgtctggatgtacgcattggcgatacggtaagtgtatatcgtacgggtgacgtgattcctaaagtagaaaaagtttggccggagttccgtcctgctgaagcagaagttgttcatttaccagagtcctgcccagtatgtgcttcgcctgtagtgatgcctgaaggtgaggctctcgcacgttgttcaggcggtttatattgtgctgcacagcgtattgaagccattcgtcactttgtatcgcgtaaagcgatggatatcgagggcttgggagatcgttgggtagaatctttattacgtctcgatttacttaaagatgttgctgatatttaccatttgcatgagcacagagaaactctgttgggcatcgaaaaaatgggagaaaagtcagtacagaacttaatagatgcgattgaagcaagtaagaaaacaactctagcacgttttatttatgcattaggtattcgtggagtaggtgaaacaacggctagaatgttagcaaatacattccagacgcttgaggctcttaaagctgcgaatgtagaagctttaaagaaaaccccagacgtaggggatattacagcagagtggattgctgactttttcttggcaccgcataacattgaagtactcgatcgtttaattgccgcaggaattcattgggatgcaccaacagcaccaacgcgtcaacctttaaatggtgaaagctgggtacttacaggtacattagaacaaatgacccgtgatcaggccactcaaatgctacaagcattaggtgcacgagtaagtgggagtgtttctagcaaaacaaaatgtgtagttgctggtgagaaggcgggttcaaaattagaaaaagctgcgaagttaggtattcccgtcatgaatgaaacagatttcttatcactcatggcaggctatgggcaaactttgagctaa

SEQ ID NO: 47279 - DNA, 888 bp, Acinetobacter baumannii
atgaacatcgcaggtatgacggcagaaaaatcatatttaaatcgtcgaaaagcgttgggtattactgtgcgtcgccttgagtttaatcctcaagctatcaaacgctattattttgcaaattcacctttaatgtcccattttttaactgcactctcttcaacatttcccgtaggagaacagttttttgtaaatagcgtgcgtaatgtacgtgacaaagtttccgacccccaattacaggcacaaattgcagcttttattgggcaagaagcaatgcattcgaaagcacatggagagttcaatgaggcttggcgtcgtgatgactataatctggatcgctttcaaaactggttgaatgagcgtgacaaatatttaagaacaatttctcctaagctgcagctagcactgacatgtgcatttgagcattttacggctttgctggggggatatattttacagcatccagaacttctaaaaactttggatcaagatgcgctaaaactttgggtttggcatgctatagaagaaattgagcatcgttcagttgcatttgatgtctatcaacatgtctatggcgatgaccgtattcgtcgtttactcatgcgtagtgtcactacaggatttgcgagtcttgctttctatggtacgacgcgattattttggcaagataaatggaaaagcttgcctaaaatgggaggaaatatttttggtgtgtatttgcttgttaaaatgcttatacagctaactcctgaatattttgcttattacaaaaaggacttccacccgagtcaaaaagattatggtcatatggtcgattattggaaaagttatttggctgatgaatatcaaataacaagtttccaagaggaaaaaaatccaagaccaagctaa

SEQ ID NO: 47280 - DNA, 456 bp, Acinetobacter baumannii
atgaatgcacaaaaaggttttacattaatcgaactcatgatcgtggttgccattatcggtattttggcggcaattgcgattccagcgtatcgtagttatattgctacttcatatggttcacaagcgaaaggtggattggatgctgttattggcaaagtacaagcatgtatccaaactggagttggttgtgaggacctaaatactactaaagaacttgctgctgctaaatatcagaacagattaagtgtggtggctcctgctgatgggcaagttgctgaagcaacatctgcaaccttaaaatggaaaaatgaaggatgtatcgttcaagttgctgctgcagctgacggcggaattgcttataaattcaactttattacaggtaaagcaacagctgctcaatgtgctaaaggagcaggcttagatgctgcagctgatttagatggtgctttaaactaa

SEQ ID NO: 47281 - DNA, 249 bp, Acinetobacter baumannii
atgttattcaaaaaattcgctgttgctgctgctgttgctgctactttagctttcgttggttgttctaagaaagaagaagctcctgctgctgctgctgcatctgaagctgtagctgctgcttctgaagctgcttctgaagctgctgtagctgttgacgctgctgcttctgaaactgctgctgctgcttctgaagctactgctgctgcttctgaagctactgctgctgctgacgcttctgctgcacactaa

SEQ ID NO: 47282 - DNA, 198 bp, Acinetobacter baumannii
atgaaagtaggtttagttccaacatcggttcctgcaaagctcattacagaaatggcgactggcgacacatggcaaaaccgcaatggtgaatatgtcagtgcgcatatgccagactggaaatcttctcatgccaaaaaccagcaattagcacgcgatctctatcagcaatctatgactgtagtggaaaagttcctctaa

SEQ ID NO: 47283 - DNA, 1131 bp, Acinetobacter baumannii
atgatgaaaattccagaatatgtcccaatcatgaaagcgaagcaaggtgaatttgatgcgataaaacctattaggtctgagcagttagaatatcaaatacagccaactttccaccctttatttgaaatgcctaatatttataaagaaggggtttcaagacttgttgatattaatagccgttgcgagaaaatagggaaattatggagtggaaatattgctttagtggatggttatttttggaaaccatctgaagctttattggagaatggtgagcatttcctaacctatacgtataacaaattgtttgcattaggagtaaaggtagttcctgtaattggttatgaccgttggtttgatcaaatgagcagtctttatcatcaaacaatgaaaaatttaaattatccagaggctccttatttttgtattagattagatggtgaggcaatgtatgatattgatgaacctgattttttcaaagaacaactagaatcaattatttctgatttaaaattagcagaaaataattgttctatattattagattttggggatgtaagtgtcaatcgtataacaattgaacagatgctaagcaagtctagagactttttagaagtattaactgaatatgattttaaatacatttctatcagtggagcttcatatccttcaagcgttgcagaagccattgaagatcatgatacggatggtccagtacttcgaaaagaaatggttgtatggcagactttaagaaacatgttccctaatgttaaattgaagtttgcagatcatggagcaagacatccagctccagaaaagcagattattaatcaacatacgaatggaaaaattatctacactatagataaaaattactatgtcgtaagaggccatccattttctagagatggtggaagtcatgggcatagaaagcagctagcaatgagattaattaattctatctattatgaagatgtaagctttagttggggagacaataaaatctttgaatgtgcgcacggtattaataattttataggaaatcctacgcaatgggttgcaattgatacgagccaccacattcggtatgtcttagaggaaataggatcttttgagctagcttatcaaaaatag

SEQ ID NO: 47284 - DNA, 1224 bp, Acinetobacter baumannii
atggaatttaaagttattcgtacaagagagcagtatcaagcttatcttgacgaagtgcattctttaattatgctaaatccggctataggaagtcctgagagtgatcggttggaattattatcggttttaatagaagattatgaaactaaacaatatccgatagaggcgcctgatcctattgatgcaattctatttaggatgcatgagaaagggttaaaacaagctgatttggccccatattttggtactactagtagagtttctgaagttcttaatcgaaaaagagctttaaccgtagatatgatccgagcattatctgtagggttgggactgtcggtagagacattaattggtttatcaaattcaaagaatacattagataaaaataatattgattggtctaaatttcctgttaaagagatgaaaaatagggggtggttaaaaacatttcttgctgatacggcagcatcaactgagagtattatccaaaaatatattgctcaatcagggttacaaatcggctcagcttcttttaaacgaaagttgtctggtgatgcccaaacacctaatacgatgtatgcactgtatgcgtggctagctagagtcattctccaagctagagataagaaagatagtctaggaaaatatgaccctaatttaataaatagtaattttttaagagagttagctcaattaagctggtttgagcatgggccaatattagcaattgaatacttagaaaaacatggaattgctgtagtcattgagcctcatcttaaaggtacgcatcttgatggagcggcattgaaggacagtgacggcactcctattattgggctaagtttacgatatgaccgattggataatttttggtttacgttactacatgaatgcgcacatatttggaagcatgttgatgaaacagaagcatttctcgatgatttagattcatcaagtatggaggatcggagggaggctgaagcaaatcgattggcaagagaggcatttataccaagaggagttttgagacgtacagaggcatttatctcaccaagtaaagaatctattgaaaagttggctaaagagttgagagttcatccagcaatcattgcagggcgtattcgaaaagagttgggaaattacaccttattttcagacttggttggtcaatatcaggtcaaggcattattaaccaattctcatttattaagtgttgaggagtag

SEQ ID NO: 47285 - DNA, 273 bp, Acinetobacter baumannii
atgaagcttttaggtcttgaaaaaataacagtgattgagtgtgagtttgctaaaaaatggctcataagttggatctctgaaatacgtgatgctcattggcggggcgcggaagatattctgaaacaatttccaaaagtatctattttggaaaatcaatgtttcgaattttcgatacataactctaaatgggttatttgtctacaaatcgcgttttctcaaagaatagcgattattaaagctgtaaacattaaaggtgctaacaatggaatttaa

SEQ ID NO: 47286 - DNA, 903 bp, Acinetobacter baumannii
atgaaactgctttttcaaaaaattcaaagtgcttttgacaatcaaaatacacataacaaaattactttaagaaatattgaggcattaagaaatttacttaatcagcaattaccacctgatattcttgtttattcattaaagaattggacaggcccccaacaacttgatattcgaaattatattttttggaatgctacaattttcgccttagtttgtatggccttaggctttttaatctcgatttacttcttcccttttgccattcttgcgattttttatggtttttatcatagagcatcgacggccgaactgatttgcctacttcaagatatccaaacttattattatgaacataaatataatttcaaatttgcaactgaagataacctacctaaagaaggaacgtccgcttcagactttcctttgtttaagttaggcaatcaacaaaattcagttttaactgcaatactcggcaagtggcaagtaagagaaacaactcacccctataaaatatttagataccattatgtcaatcgagagatggcctataattcaaaaggtaaatgggaactaaaagatgttagctacaatttataccgcatcattttagagaattttccagttcgcggagtcagcatttcaagtcaacagaaaaaggcttgtcgcttaggagtaggttgggaatcaagtgatatccgttttaatcaaaaataccaacaaagcggaattaatgaattggacttagtaaaatttctaagccctgatcggttgttattattagagaaaatgttggaagggttcccaggggatttctatgtacaccctgaaacatctgcattatgttggctctgtaatgggctttgttgcacaaacctatctgtaaaggctttttcagcgatataa

SEQ ID NO: 47287 - DNA, 810 bp, Acinetobacter baumannii
gtgttttatatcctgattttactggtcttgcttattgtgttatttagctataagtatgcgtggtggaagccagcagtggattggaatcgaccacgtgtattgatgtatcacatggtacgagaccatattaatggtgccaaatttaataagcttcgggtcaagcccgctgagtttgaaaagcaagttgcctggatgaaagcgcaaggcttccattttgtaacgatgcacgaattgcaagagaactggggaaagcacccagccaaaacagttgccattacctttgatgatggttatttagacaacttacaaaatgcttatcccattttagaaaaatatcaggccaaggcaaccatatatgtggtggttgatcgtcatgatcgtgattggtcaacctataaaaaagaacatcataatagtggtgaattggcacgtgagccaaaactgagtgatggacaagtccgatttttggcaaagagtggtttagttgaaataggctcacataccatgactcatgccaatttggacaagttgacagatgaagagtgtttgcaggagttggggcaatcgaaacaacagcttgagcagatgattgaccaacttgtgaccagttttgcctatccttttggaatttatagtcagcgtgacgttgaactggccaaacaggcaggttatcgtaatgccgtgaccaccaaagagggtattgatattgcacagcctgactttatgcagttacagcgcatcaagatcagtggtaaagattcgctatttgcagtgaaatgtcgcttgaaactgggtcagcgcgggttataa

SEQ ID NO: 47288 - DNA, 996 bp, Acinetobacter baumannii
atgcatatttgtatggtcatggcgggtgacgaagaaggcgggttggaaaaacatgtggttgaactggcaaatggtttggcacaggcggggcaaaaggtgacactcatcgcgcatgaaaagtatgctgagcgagtcagtggtgttgaatttaaagctttggatttaagcaagagccgtaaaaacccgattttgctgtggcagttgtatcagaccattaaagccacgcatgctgatgtcctgcatgtgcaagccaacaaagccgtatccatgattgcccccatgctgaaatggttgaaaattcccagtgtggcgacactccataacctaaaacgtaatgttcaggcatttgaaaaatatgatcgaattattgcagtgagtcgacgggtcgccaatcagtttagtcagcaagaccgtgtgcgtgtagtcttaaatgggattcagccacctgtacatcaggcagcacaaaaacagccacatcaacctttacaagcgattgcggttgcacgtctcgtgcctgccaaaggttttgatttactggttcaagcatggcaaggcattgatgccaagctctggattgtgggagatgggccagatcgcgatttactacaagaaaaaattcagcagtatgctttaacagatcgtattgaattgcttgggcatcgcaatgatattacgatgttgatgcaacaagcagactttctggtgatttcatcacgtaatgaaggtgggccttataccttggcagaagccttgttggtacattgtcctgtcatttcaactgatgtgggcatggtggcagaagtcttacctgctgagctgatttgccctgcaaatgatgtcactgctttacatgatttaattcaacagcatgtgcagcattttgagcagctcactgagcgttcagaaccgatttatcaatctgcccagcaacagctaacgctagaagctgtgctacacaataccctacaggtttatcaggaactgagtcatgcataa

SEQ ID NO: 47289 - DNA, 1029 bp, Acinetobacter baumannii
atgcataaccaaccgaaaagtaaaaaaatagtatgggtggtcagcgatggtgtgccagggcattttaatcagtctaaaggggtgttgtttgcacttgagcgtgattttgagctagacgtgcactggattgaactgacactcaaacataagttttatcgtcgtcctttgacttggctattaaattgtaaaatccctaaagcagaaaaaattcatcagttttatcagggagatgttttgccaaatgcacgcccagatattgtggttggtgcaggtggaaatagtgcctatgcgattgtgtggttatctaaagcacttggtgcaaaaaatattttctgtggttcattgcgtcaactgaaagctgaattgtttgatgcaatattggtgctcgaaccagatttgccaaaaccatttattagcttgcctgtgtcgccgatgcctttaagtcaggcaaccttgcaacagcatggcaagcaatggcactccgagcatccacatgtcgagcagcaagtatggaccatgcagatcggtggagatggcgcgggagcacagtatcaggagcaggattggattcaactggcaaaacagatgaacctgctggcacgtcagcatcggattaaatggttgctcagcacttcacgccgtacagggaaacaggctgaaaaaattctgcagcagtacttaaattttgaatgtattgtagatgtagtgtggtgggcagaacagccacgtgcagttttgcatcagtttttggcagtttcgacacgcgcattttgtagtgcagattctatgtctatgctcatggaaagtgtttctgccatgcgtcctgtagttgcttatttgcctgagcattggcaacccgatgaacaattcggaaatgtattgaaacgcttggaagcggatcatcttatccatatttcgcctatagctcagttaagtcagattaaagatagcgaagataagatgaaatcattaaaatatgaaccgagtgaacaattggcaaaactgctaaaagaaaggttattcccttga

SEQ ID NO: 47290 - DNA, 1068 bp, Acinetobacter baumannii
ttgaaaaaactaaaaatcataaatgccgtttatggtgatgcaacgggtggtcgttggcaggcaatgcttgatattgcaaataccttaaaaagttttggacatgaagtggttttgctgcgtggtactgaaaatcagcatctcaaaagtggtgaatggccaatcacagtgattccgaataaaggtttttatagtgtcactgcggcattaaaaattcgtaagttcatcgagcagcaaaaaccagatgtgattattgcccatagtggtaaggctgtgtggttatttaaaaatgctatgctgggaatgtcgaaaaaaattccagtgattgcagtcaaccacagccataacgtcaaacgtaccttacgtgcagatgcatttattcatattacgccgtatgtacaagagttggtgcaaaagcgccaaacgcctgaagagcgcgctacaaaaccacagcaagtgatttcaaatttaacatatctaccaaaggttactgctgagccatgtttaattaaacagccaccaaacattgtgatgttaacgcgtatggtacccaataaaggtgttcatgtgctgattgatgctttagcaattcttaataataaaggcttgccatttcatgcagttttggcaggacaaggtgaaatgttagaacagtgtaaggcacaagcacaaagattgggtttggctgataaggttgaattcccagggtggattggaggcgaagataaaattgcattattgcagaatgctgatatcgtggcgctgccatcaattactgagattcaggggattggtattttagatgcctttgcatggggtaaaaccctgatcactacggatgacatcgggattcgtcaaacagcaaagcatggaattaatgcttggtgtgccaaagctgatgatgcacaaagtcttgctaatggtattgaatacttgattcaacatccagatgaagctttaaagttcgctcagcaaggcaaaaaagaggcattagaaaaatactgttttgagcagattgcgaaaaagcataatgcatttgtgaatgaggtttatgaattttatatgaagtaa

SEQ ID NO: 47291 - DNA, 1131 bp, Acinetobacter baumannii
atgataaataaaaatttagcagcggaaggtttgcgtggtatagcatgtataatagtagttctatcacacctttcattaactttcttccctcaacttcacaactatttttcacaagaaaactttccttcaagtgattttttagcatcaatgcataattcaccttttttattctttatttctggcactggtgctgtttatattttctttatattaagtggatatgttttaacagcagcaaacttaaatgcaaaaaatccaaaaatcaaactaaaaacatcaataataaagcgctatcctcggcttgctatacctgcattatgttcatgtattatttcttatttaatttttcatatttctattgatttatctaaaactacaaattggtttagccaacttataccgcaaaatattagttttttaaatagcatctactcaagtttaattactccatttatatttgcagagtctaaatacaatacggtgctttggacgatgaaaaatgaattaataggctctttaattatattttatctaatttatttaaaaaacattcaaaaaattaaacatttttatttttttagtttcctatttttaataatttctcttagcatttcaaaaatttttcttttaggaatattaagtttcattcttgggatggctatatatcacatgcaaaatattaacaaatatttatctttattcttgctaattcttggtttatattttataggcttccataaaacaagcgcaagttatcaaattatttatgaagcctcaaaccatagtaaaaaaagttatgattacactatatttactggaagtttatttataacatacgccattttaaaatctcattatttatctcaaatacttagccaaaaagtcttaataaatttaggaaagctatcattttcaatatatttaaatcatcttgttattttatacattatcggtataccagtatttaatttttttataaaaaatctcggagaatctttcttcttttcagcaataatctccagtttaatcacaatttttacatctattgttttctctatcttattttacaagctagttgacaaatactccattaatatctcaaataaattagcaaattacattaaaaaataa

SEQ ID NO: 47292 - DNA, 855 bp, Acinetobacter baumannii
atgaataaaaaaataacagttgttacagctttttttgatattgggagagagaattggacagtagaaaaagggtttcctgactatttatttagaactccagatagttatataaattattttaagtatttagctttattaaacaatgaaatgattatttttacttctgaaaagttcaaagagaaaattttagaaattagagaaaataaaccaactcatgttgttgtggttaattatcctgaagattttttaaaatatagaaatagaattgaggaaattcaaaatagtaatgaatttaaaagcagggtatctccgaagcaaattattaatcctgaatattggtctccagattatactttgttgactaatttgaaatcttattttgttaaaagggcaattgaatctaatttgataacaaataatttggttgcttggattgactttggttattgtagagatatacagacattgaatggtgttcaagaatggaagtatgactttgatgaggaaaaagtacatttttttacgctgaaaaaaataccgaaattaactaaagagagagtattaaaagcaatatttgaaaatgaggtttttattataggcggtgttgcaatagcttctaaagaaaagtggttagaattgcaaaaaataatttattcttgtcagttagagcttctaaatgaaaatattgttgatgatgatcaaggtatatatttgatggctcttttaaagagcagaaatttgatccaagaacatcgtttaggaaaaaatcaatggcgtactttatttttaagatatgatgaaacttctaaattgaatgttattcaaaaaatcagaaaatatttaggaaaattttaa

SEQ ID NO: 47293 - DNA, 933 bp, Acinetobacter baumannii
atgaacaaatttaatgattttgtcagcaaaacatatacattatcaaatgcgcaggataactttgttccaaacataaatattgcatttgcaattgataaaaattatttaaagccttgtggaatcacactttattcaattacaaaaaacaaccctgatattaatattgattttcatattttcacaactttttttgaccctaaagggtatcaagatatattagaaaaaaataataatattagaattcatgtttatatattaaacactcaattttatgacaatttgcaagttaatggtcattttacaactgctatctattatcgtctatcaattgcaagtattttaaaagataaactagaaaatttttggtatcttgatgctgatattttatgtgttgacagtataaaaggcatgctttccataaatataaataattatgttttagctgcggtacaagataaatgtatgaaacctgattacatcaaaagtattggtttaaactctaacaacaaatacttcaactcaggtgttttatttatcaatgtcaaagcatggaatgattttcaggtttttgaaaaatttaaccaacttatttctaaacgtgactataaatttcctgaccaagatgtgctgaatatcttgttagaaaataaagtaaactttattgatgaaaaatttaacttttttactcaagaaaaaatacaccctgtactgatacattttgtcagttctccaaagccttggagtgtcgctgcctcacatagtgcaaaatatttagaatactactaccagtcaccatggaaagatcaacctttagatgcaccaaaaaactctaaagaggcaaaaaaatatgccaaaattctttggaggcaaagtaaatatttagatagtattaaatggtacttgatttatcttaataaaaaaatgaagaaataa

SEQ ID NO: 47294 - DNA, 1050 bp, Acinetobacter baumannii
ttgcgccattcatctttaaaaatcttgcatattgcaaatttcaaaactgacaataatggcttaatgttttacaacaccgatgccaaaattcaacatggtttaattgagcttggacactatgtgcatgcttttgactataaatacatggtcagaaaaagtaacattttcaatactacatccctttctcataaaaaaacacatcaacaactgattgaactttgtcaaaatgttgactttgacctgattttaattgggcatatccatttaccaaaagaattactcaagcaacttaaagcgattaaccaagccagagttgccatgtggtttgttgatccaatcaatgaacctcaccgccttgaccatttcaaagaaatgcacagtgaagtcgatcatgtctttgttacaacggcaggccagcatttacagaatctatctgaagtttgtgatcatcctgtgtttgcatttacgccaaacctgagtttacattcgattgaatacgcgcgtgaagactggctcaaatttgactatgactgtattttctgcggttcaaatagcaaatatcctgaacgtgagcaatttattaaccatttaacggagcagcttcctgagttcagatttaagctcggtgcatgtttaggacaaccatctttatttgggcatgaatatcaagtggctgtccgcaacagtttaatgggcattaactactcaaaatataatgatatttatatgtacagtagtgaccgtctcgctcagcttacaggaatggggtgtctagtctttaccgcccaaacaccaggtctggcagaattatttcctgaagatagcgtcgtacattttcaagatacgtctgatttacttgagaaattaaaatactatcaacaacatcctgaaaaggctgttgaaattgcacagcgtggttatgcacttgcacattcaatttttgaagccaagtatattctgcaacaatggttaaatttgattgatcagcagccattaaattctccttggcaaaaagaaatttatcagcaaggtaacagaatgatcaactga

SEQ ID NO: 47295 - DNA, 567 bp, Acinetobacter baumannii
atggataagtgtagagaagagtttgagaagtggctagatgacaacaacatgttcatgaatattgaacgacgatttgatcaagaatctaacacttatgattattgtgccattcggtggatttgggagtcatggcagcaccagcaagcgaaagtggaggagcttaaagcatctcatcacggtgaagtgattggtcatgaagttcactttaaaaagatcaagcaagagcgtgacgagctgcaaaccttatacacccaacaaggcataaacatgctgaagctgcaaaagcaggtgcaattccttgagcaagaattaggtgcatggaaagggaaatctattgcagcgatgataaatggcatgtgtaaacaatgtggcaaagagccatggcaggcaatagtttctgataaagatggttatgcacttctacattgctttggatgtggtgcaaacaagtatgaattggttggagagcaagcgctcaatggagatcaatacgatgaacatcgcaagaaagcagaagaggccatctcaaaaggtgcaagcctaaccaaccataggattgagctatga

SEQ ID NO: 47296 - DNA, 255 bp, Acinetobacter baumannii
atgacaacattcaaagaggctcaaagggtccagtcacaaaaggcagctcgttcaaagagattcaatagagtgcctacagaagatcaagaacagatgacgctcatgagttgggcgcatcgtgtgaaatatgggtcaggtcgtttgagtgattacctgtttcatattcctaatggtggctcaagaaacataattgaagctgcaaaagcgggtggatgcggcattaaaagagactcaatttgctttgcagtatgttga

SEQ ID NO: 47297 - DNA, 771 bp, Acinetobacter baumannii
atgaaatcaaaaccaataattccatggcaaggtggtaaaacccgtttggctaaggatttgttgtgtaggttcccagaacattcatgttatgtggaattattttgtggtggagcagcattattcttcttaagagaaggaccagcaagaactgaagtaataaatgatctgaatggcgagttggtaaatctgtaccgggtagtgcagaaccatttagaagaatttgtgcgtcaattcaaatggtgcatttcaagtcgccagatttttgaatgggaaaaactaaaagtaccagacacactaacggatattcagcgagctgcaagattttattaccttcagcaacatgcgtttggtggtaaggtttctgggcagacatttggatatgcaacaacaggccgctctttaaatctcttgcggatagaggaaagtttaagtgcagcacatttgcgtttgaatggagtctatattgaaaacctgtcctgggatatttgctttgataagtatgaccgggaacatacatttttttatgctgatccgccgtatctagatacagcaggttatggagtagattttccattagatcagtatgaacttctttctgaaaagatgaagacttgcaaagggaaggtaatgctatcaattaatgatcatgaaaagattcgtgaaatctttaaaggttttaattttgcatgtacttcaattaattattctgttggtcgtgatttggctgctaagagtaagaaaagtaatgaactgataattatgaattattga

SEQ ID NO: 47298 - DNA, 174 bp, Acinetobacter baumannii
atggataaaaacgaaggtaaaaaaaaccttgataaagtttccttagaattggagcgttatcaaaacttgtcgcgtacaggtctaagccgtgatgagatgttagttatcgatagaataattcttcgtttaagaacacaggtcaaaaatttacggacttctttgtatggacactaa

SEQ ID NO: 47299 - DNA, 429 bp, Acinetobacter baumannii
atggacactaaagattatttttggctaacaagaaaaaaagaacctaaaacaaagcctaaaagccgacctttgcctaaggctaaacaaaaatatttagaagctgaagaaatgttgtttcaagagctagaagaacaacaaattggataccgccgaaaatttcaatttgaatcaactaaaaattggcggttcgatttttatattgtgaagttgaatcttcttatagaaattgctggcagtccttggtctgttggtcgaggtgggcgaaaaattgcaaatgctttgggtaaatatgatcttgctttagataaggggtataaattcgaacgtctagagcctcaccaaattgaatcaggttacgcaattaactggattaaaggcgaattagcgagaattgaagatggaacagatcagaccatttccaccaactga

SEQ ID NO: 47300 - DNA, 642 bp, Acinetobacter baumannii
atggaacagatcagaccatttccaccaactgattttattgatcaggcagaagaagaggaagcaatccgtttaataccggcaccagatttaaagaaatgggtagtagcgaattttctaactcctggtggacctctacataatccagaccatgaccacgtcgctgagttacttcatgacaacgaagagttcttagcgtttgcatgggcttcatctgcttataaaagtaaacagaatatggtgttaggccaatgtgaaaaagttatgttcaatgtcggaggttggcgaaaagcaaggcaagagcaacaaatgcgtgattggtttggatttgtaccaacttatttaattacagtcgatgcttcattttgtgaacgggctaacgatactgaattctgttatttgcttgagcatgagctttatcacattggtgtgatgaaggatgaagatggtgaaattctttatagtgactctacaggcttacctaagcactaccttgcgggtcatgatgttgaagagtttattggggtggtgaaacggtggggaccaagcaagaatgttaaacggcttattgaagtcgcaaaaaacccgccgtttgtttcggatttagatatttctagatgctgcggaaactgtgtaatcaattga

SEQ ID NO: 47301 - DNA, 471 bp, Acinetobacter baumannii
atggcaacactaaaagagcctgtgaaaatctttatagttcagtctcttgcttgtcgtgacacacctcaagaagtagcagaactcgtaaaacaagaatttggcgttgatattgatcgcgttcaagttgcaacttatgacccaactaaggctgctggtaagaatttaagtaaaaagtatatcgagctatttgagaaaaccagagatgagtttgacaagggtttagttgatattccaattgccaacaagtattaccgtctgaagcaatatcaaagacaacttgatagaacgcgaaatgttaaaactgctttaaaaattctagaacaagcagcgaaagatatcggcggacagtttaccaaccgtcaagaaataacaggtaaagacggcggtccagttcaaacggtcaattcagatgttcctgttccaatggaagagtacttaaaagcacggagggaggtcgtagatgagtactga

SEQ ID NO: 47302 - DNA, 1428 bp, Acinetobacter baumannii
atgagtactgatgcggctcgggataaagccatcaggatcgaggcgcaagaagatttatatttcttcacaaggtacatgtttaaggagcgccgtggttataaatggatgcagaactggcaccacttagaaatctgcgaagctttgatgaaagtttatcgtggtgaaatcaagcggttaattattaacgttccacctcgatattcaaaaactgaaattgctgtaattaatttcatgtcttggtgctttggtaaaaatccagactctgaatttattcatatcagttattcggccatgcttgctgcaaataacgcatttcagactcgcaacatggttcaagaaaaggcttacaaaaaggtctttcctgatcttaaattacgtgatgatagtaaggccaaggatttctggcgtacagctgcaggtggtgtctgctatgcgactggtacaggcggtaccattacaggttttggtgcaggcaaaatgcgtgaaggctttggcggctgcatcattattgatgacccgcataaagccgatgaggccaaatcaaaaactatccgtgaaggtgtgattgactggtttcaaaatacactcgagtcacgtactaactcgccagatacgccgatcattgtgattatgcagcggcttcatgaagaagatttagcgggctggttattaggtgatagaaaagacggcgttcctgtagctggtggtaacggtgaagtgtgggagcatctatgtctttcagctattcaagaggacggatccgcactgtggccagcaaaacacaatattcaaaagttgaaacaaatggagcaagctgcgccgtatgtttttgccgggcaatatcgacaaatgccatcaccgccagcaggcggtttttttaagcctgacaatattgaaattgtggatgctttacctgctgatgtagtgaagcaagtaagggcttgggactttggtgcaactgagaatgaaggcgactttacagcaggtgttagagaggctttgggggcagatggctttacctatattgtcgatgtaacaaaagggcaacttggtcctgacaatgtcaataaacgcttaaaacaagtcacagagttggatgggatgggcgtaacggtaaggatccctcaagatcctggtcaagctggtaaatcacaagccagttcattcgtaaaacttctcgcaggttatgacgtaaaagctaaacctgtttcaggtgacaaactcacacgggctcagccctttgcggctcaagttaacgtgggtaacgtcagaatgttgagaggtgattggaataaagaatttattgaagagcttcgaaattttccgaatggaacgcatgacgaccaggttgatgctggttcagatgcatttaatgaattgaatggaggttttgaagccttctttgctgatatgggatttgctcgatga

SEQ ID NO: 47303 - DNA, 1443 bp, Acinetobacter baumannii
atgagtgacgtaacttttaaacatcctgagtatgttaaaaacttgccatactggcagaagctagatgatgtatgtgaaggtgaggatgcggtaaaggctaaaggtgagaaatatttgccaaagcctaatgcacatgataagtcacctgcaaataagagtgcttatgaggcttatcgtacccgtgcagttttttatgaagttacaggtacaacatcaaatagcttagtaggtgctgcttttgccacagatccaagctttaagtttccatctcaacttgagcatttagagcgcaatgcaaacggcgcaggcttaagtgcttatcaattagctcaaacaggtatacgacacttattgaagcattaccgctgtgctctatatgtagactatccagcagttacacaagctcgaaatcttgctgagtttaaacaacaaaaagcctatcctatgattcacatattgaatgccattgatgtgatcaattgggattcaatgatgatcgataaccagaaaaagctttgcttagtggtcattcgtgaatttacttctgaacgtggagctgatggctttagtaaaacagaggttgaacagtaccgggttcttcgtttagagcctgatagtgaagaaaattacatctattcagtacaggtttataccaaaagcgataagggcacatgggtaggaggagaaaagaaattcccaacagattataacggtgatttctggtcctatattccattcacttttgtgggggctattgataactctgaggagattaagaagcccccattgttaccattagctaatctcaatttagctcactatagagacagtgcggactttcaagagtccgttttttatatggggcagcctcagttttatgcaaaaggggttagttgggcttggtacgatgaagccaaaaagcgtggcatttatatcggtgcaaaagttcttttacctttacctgaaaacggtgatttagggattgtacaagcagatccaaacacattggctcgggaagctatgaaggataaatgggatcagatgaaagaaatgggtgctcgtttaattgaaaagggttcagcagctaaaaagactgcaactgaatcaaacagtgatgacgccgtgcagcattccgttctttcattatgtgttgtgaatatgaatgaagccctttctatggctttacgatgggcagcaaagtttgtaacgcctaatgttgatgttctgactaaagatgaactaatgtttgaaatcagtcaggaattcaataagcaaggttatctcgctgaacttgcacgtcaattatttgaagcagcattacaaggacgttcttcatttaaatcttggtgggaatataaccagactggaatgttccctaaacaaaaatatgaagaagaactggttaatgtcgaatccgaaaaagacggaacagtgaatctatag

SEQ ID NO: 47304 - DNA, 1104 bp, Acinetobacter baumannii
atggctaaagataataaaaatcttttggaagtactcactcaacaccaggcttatctttatcggacttcttctcaatcagtaaatgaattattgggtttgttcaatgatgatacgagtgcgatgctatcaaagcttcgtgatttactggatgagcttagtgattcagaaaagattgctttagctggaggcaaatacacaacttcaaatctaaaggaaattagagatttaattacccaatggtttggcagtttaaatacaagcctacctgaagtattcgccgtttcagctacggcaatggccgtttatgaagccagttatatggccaagttgttcggcggaaagataaataaacctgacggagaaaagctttactctgcagctaaaaaggttccacttacaggcggtgcacttgttgatgatcttctatcaagaattgctgagagtgcccgtcaaaaagttgaatatgcaattcgtgacggaatcaataccggtaaaacgaatcaggaaattgttcagcgtattcgcggtaccaagcggcttaatcatgaagatggaatcttaaatggtaccaagacagatattgatcgcactgttaggactgtacgaagtcatgtggccaatcaagcttatctgaaaagctttaatcaattaggctttgaatatgtgcgctttgttagtgttctagatggaagaacatcgaagctatgtgcatcactagatggttcaatttgggaaataaacgaccctgccaaacgtgtaccgccgttgcatcctcattgccgcagtattctggtaccagttgaaaaagaagggaagcttccgggggagcgtccgtttgtgatggatgagcgcaaagtcaaggatattccaaaagatgagcgtagtcagttaatcgggcagttggatgcaaacactacatttaaagaattctttaaaaagaccgatgacttttttcagaaagagtggctagggccaaatcgttataagctcttcaaagaaggaaagtttgattttgaaaagtttttcgatccagaagggcgactttacacactcgaccaacttcggaagttggatgaacaaatgtttaagaggttgggattatga

SEQ ID NO: 47305 - DNA, 144 bp, Acinetobacter baumannii
atgaaacaaataaccatgagtgaggcgcaatatgtcctcagcacaaatcttattctattgccatttgttcgaaagataatcccaagatatatggcaatttttggttatagctttaaacagccaaaagcacatattcaaccttaa

SEQ ID NO: 47306 - DNA, 513 bp, Acinetobacter baumannii
atgacaaagcaaccgcaaacccttcaagagttagtgcaaaatgttgaatatttcaatgtggaccagccatcaccagatgcagtgcctaaacgcattatatgcatcttaaaacttcactctggagtgcaagtaaacggcgagtatttaattcctgaaggctcaccagttggtgattacaatccatttgcacttacagctgccattgagaacttaaaacagctcggatttgaaattattgaaccacctacagagcctcaagtaatcgaaggtgaggcggttgaggttggccagaatgtagatgagccatcacttaaagcggttgaatcaccaaaaattgaaagcttggaatcccgtgtaactgccacaggcgctggtgttagcacttatgatgctcataatgcaaagcttcattctattgaagtattgacctcacttttaaaagctcctcgagtaaatcccaaagttttagacgcagcaaatacaaagcttgttaatcttatcgaaaagctttaa

SEQ ID NO: 47307 - DNA, 306 bp, Acinetobacter baumannii
atgccaaatactgaaaatcaaacagaactagaaatccaaagtaaaggtttagatgcgccacgcttagcacctaataatattgatgccaaaattaagtcagaagagtttcactcactacctcacaatattacggtttgtattcttgtattagaaaatggctataaagttactgggttaaaccatgcaagtgtgagcccggaaaattttgatgcagaaatggggcggaatcttgcctatcaagatgcgcgtcgaaaaatatgggagttggaaggctaccttcttaaagaaaagttataccaggcataa

SEQ ID NO: 47308 - DNA, 768 bp, Acinetobacter baumannii
atgaaacttaaaacagtaacaatcgacggtaaggtatatgcggaagtagatggtgataaacctatctatgttcatgatgatggtaaagaaatgccacatgatgccgctcactctgtagcgactatttcacgtttaaacaatgaggctaaaacgaaccgtgaagcaaaagaagcggctgaaaaagccctaaaagcttttgaaggtatcgaagatcctgtagctgctaagaaagcaattcagactatgcaaaaccttgacgataaaaagctagtggatgctggtgaagttgagaaagtgaaagctgaagctatcaaagcagttgaagaaaaatatgctcctattgttcagcagcgtgatgctcttgaagcttctttacataaagaacttatcggcggtggttttgctcgttctaagtacattcaagacaacattgcagtaccagtagatatggttcaggcaactttcggtaatcacttcaaaatcgaagaaggcaaagtagttgcctatgatccaaacggcgaaaagatttactcccgtgttcgccctggtgagcttgcaaatgttgacgaagctttagagtccttggttggtggatacccgcataaagacttaattcttaaaggtggtaaagggacaggtggtggtttccaaagtgggggcaaaggtggagctccagcaggtatgaagcgaagcgagatgtcagtatctcaaagagccgattacatcaaagaacatggccaagaatctttcctaaaactaccgaactaa

SEQ ID NO: 47309 - DNA, 954 bp, Acinetobacter baumannii
atgactacaacagtaaattcagacatgatcatctacaaccaattggctcaaactgcttatttagagcgtttgcaagacaatttaaatgtctttaaccaagcttcaaacggcgcgattatctaccgtaacgaaattattgaaggtgatttcaataaagaagctttctataaagttggtggtagcatcaaacatcgtgatgtgaattcaacggccaaagtggttcctgagaaaattggttctggagaatctgtaggtgtgaaagttccatataaatatggtccttatgcctctacagaagaggcatttaagcgccgagctcgcacacctgaagagttcgcaatgattcttggttatgatttggcagatgctttagttgcaggacgtttacagtacagcttagcttcattaaaagccgctatttctagcaatattgatatggttgcaaaaggtagtatcgctgtggatggccgtaaagcattaacacgtggtatgcgtaagtttggcgacaaatttggccgtattagtttatgggtaatgaactcagacacctacttcgatattgtcgatgatgcgatcactaaacaaatctatggcgaatcggaaatcgtaatctatggtggtttgccaggtactttaggtaagccagtattagttactgatgctgtaggtgatgatgatgcatttggtttgcaaatgggagcagttactgttactgaatcacaagtaccaggcttccgagcgtatgacatcaatgatgaagagaacttggcaatcggcatgcgtgctgaaggtacattcaatctagatattctaggatatagctgggatacatcgaaaggtgaaaaccctgatcttacattacttggttcaagtgctaactggaagaaacatgcgaccagcaacaaaatgacggctggtacactgcttgacttgtcaggtacaacgactggttaa

SEQ ID NO: 47310 - DNA, 666 bp, Acinetobacter baumannii
atgaaattaatctatacacgtattgccgcagctgcagctttagaagtagggacaattgcaaaccctgactattatgaatttccaaatcgcagtgctgaagaagtaattatttatggtcactacccaaaaattcaaaatgactatgaaactttggatattccagttgaagttcgcaaattggaagaacctgcaaaaaccactttggccacagtaaatgttgaggtaggaattacacctgaactgcaagaggttatcgataatgcgaaagccgagtgtgaaaaagttgttgaagaaaacgggcaacttaaacaaaaaatccaaatcttagaacaggccagtggtaatagttcggaattaatttctgaaaattcacgtttaaaagatgctgtaaccctagcagacaatgctactaaagcagctgaagcacaagtagtaagcatccaagctgaatttgatgcttttaaaaatgatgtcgcggcaatgcaggcacgtattgctgagcttgcatcaggtgaaggctcaactgttaaacctgaagagtcgaatcaaaatgattatgaaagctggacaaacgatcagctcaaagagtttttagctagcaaaaacattggctataaaccatcagcaacaaaaccagaacttcttaaattaatcccgaaggaataa

SEQ ID NO: 47311 - DNA, 390 bp, Acinetobacter baumannii
atgagctttattactgtagatgacgcaaattcaattttgggcagcgattttgcaccggatagtgataaagctcgtctagtccaacttgctaatgtatggatgaaaaaacgaataggatttgtgccagatcctcttgacccacttcttaaagatgcagcctgtgaaattgttaaaggtattttggccaaggtaatttataacggcaaagatcaactgttgaagcgtaagaaagtaaaggccgattctgttgagtctgaaaaggaatatcaagatggatctgaagcaatctccagctttgagcagatagcaattgattttattgattcccttgatctgaaggatccaaacgctagttttaatggctttggaattccactttatagagcatga

SEQ ID NO: 47312 - DNA, 369 bp, Acinetobacter baumannii
atgggcctacgtgacgaaattcaggcagaaattgctgaagcatttgacgaggatctagctgaggccgttcatacttttacgtgtgaaaggatagtcagtacaagctggaatcctaaaactaacacttctgaaaatatagttgaaaattattctggtcgtggtgttttgtttggttcgtacaatcagtatgagatccagacgctaggtgtactcgcgactgataacaaagctgtcattcttcaaaatgaagtgactatggtaccgaaaattgatgatgagtggattactgggttaggaacattccgtgtaatacatatccaacaagatccagccgcgaccatttggaagtgtcagttacggagagtgtga

SEQ ID NO: 47313 - DNA, 171 bp, Acinetobacter baumannii
atgtcttgggttgtatataaatttcatgaaagtgttcaagtggtacctgaagatgatttaagaccacacactttttttcattgtgaatgccatcccaaaattgtggatggcatttttattcataattcatttgatggtagagaggctacggaaacactcttaccaagctga

SEQ ID NO: 47314 - DNA, 369 bp, Acinetobacter baumannii
atggggtggacggggaaaaagccgactaactttagcttcgatgttgtaaaaaatgctgaagaccaggttaagaaaattgtaatggataccgtgcaatcacttgttgttactagtccggttgatactggagcttatagagcatcacatatagtttcgattggatctggtgattatagctctcgtggacctgaaacaaacgccgttcaagatgcagcgattcaagctgttaagtttaagctgggtaatttagtttacatacaaaacaataagccttatgcggaacgattggaaaatggctggtccgatcaagcaccgctgggtatctacagcactacgtttacttatattactcaaaagtatggtggttaa

SEQ ID NO: 47315 - DNA, 399 bp, Acinetobacter baumannii
atggcaatgactttagagcagacaaggcaggctattatcgagcgtatgcaaagctttacagggattgcccaggatagaatccagtatccaaatgcacctggctttactgtgccaacaaaaggcttatggtgtcgtttgactattgcaggtggaccaagttttattgctgggctatccgatcagccaactacacgccgtacaggtaatattttaattcaatgctttgcacgacccgaaacaggtgatatggaaatcacaaatctaagtgatgctttacttgcccattttgaatatttcagaatcgaaaaattagagtgtttgcaggggcaatctgtttatacaggtaaagatgctgacttcattcagtataatgtgacgattgggtttagggtgaattga

SEQ ID NO: 47316 - DNA, 219 bp, Acinetobacter baumannii
atgtcttgcattctgacattagaagaaattgaaatcaaacgacaagagttagagcgccatttagaacatgttatgggcgcagagttagacaaatggcaaaaagataatcagttgtgtgtatctgatgtgaatgtgcgccttgcaaacactcaaccccttggctcaaccaaacataatcttgttactggagtaagtgttgaactagattacaaaccttaa

SEQ ID NO: 47317 - DNA, 1287 bp, Acinetobacter baumannii
atgacccaaaacttacatcatattgttattgtcggtggtggcgctggtggtttagaactcgccacacaacttggtgaaacttttgggaaaaatggtaaagccaaaattacattggttgaccaaaatttaactcatatctggaaaccattacttcatgaaattgcggcgggttctttaaatcctcacgaagagcaaaccaattattttgcccatgcaaagaaacaccactatgaatttgtgttgggaacattaacagcagtaaataaagataagaaaataattgatttaattccccctcaagtctctaaagaacaaaatacccatattcaacaactcagttacgatacactggttttagcgcttggttcagtatcaaatgatttcaatacacccggtgttcgtgaaaactgccatttcctcgatagccgtaaacaggcggatattttccagcaagatcttttacatttatatatcgaagcgcaaaatcaacccgatcaacgtacattaaatattggaattattggtgcgggggcaacaggtgtcgaacttgcggctgaactgattgaaacgaccaaaaacttttatcgctatggtttaaaaaagatccatccgaatcaagtcaaaattacactcattgaggcctcagaacgcatcctccctgccctaagtgaaaaaacagctgaacatagcgcaaaacagcttcaaaaaatgggtgttggaattttaactaaacaccgtgttgaaaaaattgatgaacactgtatctattttagtaatggtaaccaactcaacagtgatgttacggtatgggcagctggggtaaaagcaccaaaattacttgaaagtcttagcgatttcgaacgtgacaatattaaccgcttaatggtctatgcaacgctacagacctattccgatcctaatgtatttgcatttggtgattgtgcccattgccaacttgatgcaagacacccgcctctcggaccacgcgctcaagttgctagtcaacaagcaagctttttagtcgatgctatggctgctaggctaaatggccgatcacaaccgatgtttacttttaatgacaaaggttcacttgtgtctttaagtcgtaataaagcggttggagaattactgggggatgtcagtgtccaaggatatattgccaaaacgatgtatgtatctttataccgtttacatcaagcaacaattcacggatacactcaagctggactactcacaatgaaagatttacttacaagacgagtacgaccaaaaattaagctgtattga

SEQ ID NO: 47318 - DNA, 945 bp, Acinetobacter baumannii
atggaacaacttaacccatctgacttaaaagcaatattacattctaaacgagctaatctgtactaccttgaacattgtcgagtaatgcaaaaagatgggcgagttttatatctcactgaagcgaagaacgaaaaccaatattggaatattccaattgctaacaccactgtaattttacttggaacaggtacatccattactcaagctgcgatgcgaatgttatgtagtgcaggggtattggtggggttttgtggaggtggtggaacacctttatttgcaggtagtgaggtggagtggttaacaccacagtgtgaatatcggccaacggaatatatgcaaggttggatgagtttttggtttgatgaagccaaacggttagacgtggcaaaacaatttcaatttgcccggattgaatttatccgcaaaatttgggcgaaagataaagatttaaaagatgaaggtttttacttagatgaccttgatattcagcaagccttaaatggttttgaaaagaaaattcctaacatgactaaggttggggatttattacttgcagaggctcaaacaaccaaacaactttataaaattgcagcgactcgttgcaaactcagttttgaacggaaccctgagcagggtgatttggctaatgactttttgaaccatggcaattatttggcttatggcctaagtgcgacgacactttgggtactaggaattagccatagttttgcggtgatgcatggcaaaacccgacgaggtgctttggtgtttgatgtggctgacttaattaaggatgctgtggtcttaccgtgggcatttatttgtgccaaagagggaatgaaagaacaggagttccgtcaacagctcttgcagaaatttacagagtataaatgtttggattggatgtttgatcaggtgaaagaaaaatcaatatataaattataa

SEQ ID NO: 47319 - DNA, 228 bp, Acinetobacter baumannii
atgtcaaataaatcaactcatgttgttccaaatactaaaggtggttgggatgttaaacaaagtggagggcagcgttcttctggacactttgatactaagcacgaagcagttcaacgcgctagagtaatcagtaaaaatcaagatacggaattagttgttcacaacaaagatggacgtatttcaggtaaagatagtcatggtaatgatccttacccaccaaaagggtaa

SEQ ID NO: 47320 - DNA, 3375 bp, Acinetobacter baumannii
atgattgtcacctttatctctcaatgtgaaaagaaagcgattcctcgaacccgtcgtgtgctggatgccttcgcagatcgtattggtgataacacttggcaaacagtgattactgaagatggtttattggctgtaaaaaaactattaagaaaaacggtcacgaagaataccgcggtgagttgtcattggatacggggtcggcgtagaagtgagctcatgtggatagtgggaaatcggaacaagtttaatgagcaggggattgtgcctgtaaatagtacgaaaaaaagtctagctcaaaataaatgggaaaatgattggcattatttacctctcattaaagcattggttgcagtgtctgctttacttcatgattggggtaaagcaactgttttgtttcagcaaaaactactgagtaagaatgatcaattcaaaggtgatcctttacgacatgaatggatttcctgcatgttgttaaatgctttggtgcaatcatctggtaatactaagtctgatgaagcatggttaaaactattgatgaatcaaacttgggacgaggaactactcaaacaaacgattataaagaactcagatcaatcgaaagttctagaccaacttccaccttttgctcaattagctgcttggttaattgtttcgcatcatcgcctgccgaatttaaaaactgaaaaagagtataaaaaatatgggagtgaggatatttcatgtatcaaggaattatttgaatttatcgaagcagattggggttatcaaaataagtttgaggaaaaagagtatcaacagcggctccaattatgcttcgagtttgaacaaggtttattgactcaatcggtcgaatggaccaagcaagttaaaaaatggtcagcgcgtttattacaagaatctcaagtatcagaacagatttttgttgatggttgttggcgagtgattttacatcatgcacgcttatgtctcatgttaggagatcattattattcatcgtgtgaggctgataaaacttggaaaacaagtttatcactcgttgcaaatactgatccaaaaacgaaacaagccaaacagtatttagatgagcatttggtacgtgtcagtgacaatgcaatgcgagtagcccagtccctaagccgtttggctgatgaaatggaatctgcatatgatattcaaaaattaaaaaagaaaagtccacaaggttttgaatggcaagatcaagctgttaaagggattcaacagttcattcaaaaaaatgaggggagtgagaaacaaggttggtttattgtcaacatggcaagtactggaaaaggtaaaaccattgccaatgccaaaattatgcaagccctatctcaagatggtcaatcattacgttatgttttagccttagggctaagaacactaacattacaaacaggtgattcatatcgtcatgatattggtttaagtagtgatgagctggcggttttaattggttcaaaagctgtacaggagttacatcatcaggatataaaaaataatcagacagaagagttcagcattgaggaaataggttcagagtcattagaagaactattagataacgaacttgattatgatgctatgccccaagctgagtttatgaatgcattatttccaaagaatcaagagcagcgtaataaagcctttttgtataaaccagttttaacttgcaccattgatcatctgatggcagctacagaaaccaaacgtggcggtaaatatattttgccaagtttaaggctttcctcatctgatttagtcattgatgaagttgatgattttaatggccaagacttgattgcgattgccagacttatatatttagcaggaatgttaggtcggaaagtaatgatttcttctgcaacgattccacctgcattagctgaaggattttttaatgcttatcagcacggttggtcgttatattgtgcatttaagaagctgaaaaatattgatacggttacaatgtgggtagatgagtttaaaaccaaaactcaaacaattaattcaggtaaatcagaagatttagtacagcaatacaaaaaaacacatgatcaatttattgaacttcgagcagatgcgctaagtaagcaaatcgtaaagcataaggcttatattgtagattgttctgatttggtgacagaaaaagaagttcgacgtttagatcagagtttgcagtctcagtattttgagcggattaagcaaaatgctgaacagttgcatttcaaacatcacactattgatactcaaaccagtaaaaaagtttcgtttggtgtcgtgcgagtagcaaatatcccaccatgtattgcacttactcagtacctgttgaatgctgaatggtcaccaggtatttcacctagggtgatggcataccatagtcgccaagtgctattactacgcagtgaacaagagcgacatttagatcaagtcttaaaacggaaagaaaaattaggagaacaaactgctgcatttttagatgatgtgattcgccagcatctagattcgacagatgatgaacatgttatttttatcttggttgccacacctgtcgaagaggttggtcgagatcatgattttgattgggccattgtagagccatcttcttatcgttctattattcagttggctggtcgagtattacgtcatcgaaaattagatcaggatattcaaaatccaaatattgctttaatgcaatataatttaaaagggttaagaaaggctaaagtagcatttgaaaaacctggttttgaaattaataatgataaattcaaattacagaccaaaaacctaaaagaacttcttgatatctcagaagctaattttaatatcaatgctattcctagaattaaagcaaatcagccattgcaagcaataaaaaaattggcagaccttgaacacgcagtgatggcagatgctttaacttcatataagcaagttggagcaaaaccactcaattcatggttgacacaaaagtggtttttaactgctttacctcagaggtttacaccttttaggcaaagctcgcctaatatccagctttttgcggtgccgaaaaatcataagcttgtattttgtgagaagaatgattttggtgcgtatattgatcgtaatggtttttatgatattcatcacattaaattaagtaagttagaacaaaatcgattatggttaaatcgaaattattacgacattttgtgtcgtttagcgcttgataaattagatgaaaatgaagatgttaatgaaatgatagaagaattagcaaaacgatatggggaaatcatgttgcctgaatatgatgaggataaacaacttaccttttccgagcaatttggacttgtagttttggataaataa

SEQ ID NO: 47321 - DNA, 1251 bp, Acinetobacter baumannii
atggctgaaagtatccatacatttttaaatgagcgtaaagaactttggttaaaagatcgaataaaaaaggccgaaaatgaaagtgccatagcagaattacagcagcaagcaaatgataaatttagtttgaatgagtggcttcctgacgcagcaaagcgggttactcaactttctatggtgagtcatccgagtaaatttagtcatccaagtgcgaaaacttcaagtgttattgctaaggtagagtattgtaatgatggttatttaagaagcggtaatgtggattattctttagatgtatttggtaatgccgctgcaatggatgtctttaagtttctgtccttagctctaactgaaaacttgacagtattggatggtttcgaaaagcaaaatcaagaacttaaaaaattaattgcccatgctgaattagactttgataatttaagttcagaatttttaaaaataaaagcaacagatgattctattaaaactgatcatctagtgaagcaggtctatttcccagttggtgaagctcaataccatttgctgtctattttgacgccatctggtttaattactcggctaaaacaatcggtagatgctatgcgtttttctgaagagactaaacaggctaaagagtcacgtaagaaaaatgagcatcatgaagttggatattctgatatttttgatttaactgtaacaggttatggtggaactcaaccacaaaatgtcagtgttctaaatagccaaaatgcagggcgagcttatttattaccaagttgccctcctgtcttagaaaaaagaacaattcggcttccaaaagctgatttctttgctcaatgtttatatcgaaaaaattatcatgatagttttattcaattgcataagtttatgcagcttgatttaaataatattgatattcgtaatgcaataaaaaatattatccagtttgtgattgatcaagtattactacaagccttaaaaactagagaatatgcagttgagggatggtcaaatcaggattattacgccagcctacctaaaatacagcgtatttggttggataaagttcatcagaaagaacgagaagaaaattctgactggagagacgaattaagtagagaggtagcacgctggatattacgaagctatgaaaaagtgattagcgatgcttatacgttaggaacaggcgagttactggatgtcaaacaatgggtagagaactcattacaaaaagcaaaggagtttttttaa

SEQ ID NO: 47322 - DNA, 885 bp, Acinetobacter baumannii
atgcgtcattttttattgattcctcatttaaaactccacaatgctaatgcaatgagtagtccatataccattggatttcctgcaatgacggcttggttgggtgcagttcatgctttgcaacgaaagttacaaacgaaagattgtgatgtagctttaactaaagtggctgtgagctgtcatgaatttaatttgcaaacttataaaggacagggggactttgttcattcgattataggcactgcgaatccgctagataaagatggaagcagaccggcttttattgaagaagcacgatgtcacttggaagtttctcttttaatcgagattgaaaatctaggctttaaaaaaagagagcagcttttgaaaattgttccagatttagttagtagtatgaaatttgccagtggagatgttctatctgttcaaaagtgccaaataatagatttcgatgaagatgagagtcacgataaagaattaagacctattttaaataaattaatgcttggacatgtactcattgaacgccgtgatctcgttgtagaaagtatgaatcaggggcgtgatgctttagatgcagttttagattatttgaaagttactcatagttctgctgtagatgagaatggaaaagtaacatggaactcaaaacgtcaaacgcacggctggcttgtaccgattgctattggttttcaaggaatctccgaactaggtcaagcaaaaaatcaacgcgatgctaatacaccgcatcggtttgctgaaagtgttctcactttaggggagtttgtgatgccataccgtatagaacatatagatcaactgttatggcaatatcatgttgatttagaaaataatttatatctttgtaaaaatatttcaacaatttga

SEQ ID NO: 47323 - DNA, 1014 bp, Acinetobacter baumannii
atggctaaaaatgaaaaagcagttgcaagtgtacttgcatttgaaaagaaacttgttccatctgatggttatttttatggtacgtcatggggaaatcggaaagaacaaacggctttaaaactgattcagaaatccgttcgggggactatttctaatcgactaaaaccagccgttgccggtgacccaatgaaattgaatgccgaagttgaaaaagccaatttacaaactgtagatgcttgtgctttaggtgagcatcaagatactttaaaagttggattcactttgaaagtattaggtggcatagaaaacccatctgcttgtaataatgaaatatttctaaaatcttatcagtcagttgctaataactatattcagcaatatggttttacagagttagcaaaacgttatgctttaaatatcgccaatgctcgtttcttatggcgtaaccgtgtgggtgcggagaaagtagaagttgttgtaacgattaatgatcaaccagcagtaacatttaatgcgttggaatatccattgcatgactttgatcatattgatgaaaaggttcaaaacttagcaaaccaaattgcacaggctttaaaaggtgaaacaccatacttattaattaaagttgaagcttatgcattggtaggaaaagcacaagaagtctatccaagcgaagaattagtattagataaaggaaaaggtgataagagtaaaattctttatcaagtgaaggatgttgctgcaatgcactctcagaaaattggaaatgcattacgtacaatagatacttggtatcctgaatttgatgagaaaaaagctgcaattgcgattgagccatacggtgcggtaacgaatcttggaaaagcctatcgtactcctaaggataaaaaagacttttttagtttatttgataaatatgcattaggggaatcgcttgagaatcctgaacaagaacattacgtgatggctgttttagtacgtggtggagtgtttggtcaaagtggtaaggagtaa

SEQ ID NO: 47324 - DNA, 612 bp, Acinetobacter baumannii
atgaattggtatcaagaaattaccttgattgatcaagatgaaatttccctttattttatttggtcaaaagtttatacccagcttcatattgcttttgccgaacatagcaatgagcagggtagaatatccttcggtgtatcttttcctcaatatcgtatcaatgagcaaaagaaaattggttttttgggtacaaaaattcgtgtgtttgccagctcggaaaatgacttacaacaacttaacttaggcaaatggctagaacgattcattgattatgtacatatcactcaaccgagagaagtgcctcgagccaagattacaggttatgcgcattactatcgagttaatcctagaatgagtgttgaggaacgtatagttcatcaagcacaacgtcgtaatatttctttggatcaggctagacagcattttaaacaatatgttgagcaactagtggttgaaccatacgtaagtttaaaaagtctcagtgcaaaacgtgaggaaaatgtagatcgcccctatcgtttatatattggtaaatcacttgttgatgaggcaagggatgggatgtttggaacttatggactaagccgaatgacaacagtcccagagttttga

SEQ ID NO: 47325 - DNA, 1020 bp, Acinetobacter baumannii
atgaaacgatcggcacttggtttaatctatttaattcaaggaatgcgcaatgcgggcattgatgtcgactcacgtttggcagatataggtattaaagtagattccttggacccaagctcaacaattcatgacagtttggaatgggatatacagcaaattattagtgagaatgttgacccagagaaaggattatttattggacaacattacgcattggcaggttatggtcctttactcatgttacttgtgaccagccatgatatacaaacagccttagaaaaaggcatacagtatcaaaagcttacgcatttatttggtactttgagcttacaagaaactgaaaatcacatcattttaaactatttaccggtcgatttaaaaacagaaatcggtttactccgtgcccaatgcgaaatttcgggcacttataagtttattcaggatatttataccatgatgggcttaaaaatgcctgatatgcgtatagatttaccatttccgaaaccctctgatccagataccgttgctcaatattacgcatattatggagatgatctacattttaattctacacatgcagcatttagcctaagtaagaatgtgctggaaataaaaattccttcagcagatattattactcatcgtatctatgaagctaaatgtattaaagaaatagaaagattaaatgaacaagatcatcaaataccgcctattattcaatatgtgcaagattatttagagctacaacaaggaattatcccgagcatggcggaaaccgcttttgctttgaaaatgcctgaaaggacattaaggcatcaattgcagcagcttaatacgagttataaacaaattcgtgaacagattattaagaataaggcgcttaaacttatggaatataaagagtattcaatagaagttattgcagaagcacttggttattctgaacctgccgcttttaatcatgcatttaaaagatggtttggacagagtcctcggcaatatggaaaagagttttactga

SEQ ID NO: 47326 - DNA, 1485 bp, Acinetobacter baumannii
atgctaaacgcaaaacaacatgctattcaaaaaactaaaatcgcaattattggtgctggattcggtggccttgccatggctattcgtctgttacaaagccaacaatcagatttttttattttagaaaaatctaatgatgtcggtggaacttggcgtgaaaaccgctatccaggagctgcgtgtgatgttcaatcacatatgtactctttgtcttttgcacctaaaactgactggtcaaaacgttatgcagaagctcctgaaattttcgattatatccaagatataaccaatcaatatcaaattaaaaactactgtaagtttaaccatgaggttactcatgtacagtatgatgaagtgcgccatatatggacactagattttgcaaaccaaccttctctcgaagcacaatttgtagtttttgcatcaggtccactacatattccacaaatccctcatattcaaggtattgaaaagttcaagggtaaagtttttcactcttcccaatgggaacatgactacagtctagaaggtaaatcagttgcttccattggtactggtggtagtgcaattcaatatattccagaaatcgcaaaagacgttaagcaattatatgtattccaacgtacagcagcttgggttatcccacgagatgagcgtaaatactctaatttgagcaaagctctatttaaaaaatcaaacttctatcgacaaattcatcgcagccgcctttattggagtaatgaatctcgcgttgttcctatagttcagccgcaaatcatgaaatatgggcaaaaattagctgaggcatttatacgtttccaagttaaagataaagatttagccaagaaacttacaccagactttgtgatgggctgtaaacgcattcttatttcaaataaatacttccctacatttaaccgtaaaaatgttgaattagtgaccgagggtattcaagaaattaaagagaacagtattattacaaaggatggaaaagaaagaccaattgactgtttaatctatggaactggttttgttaccgatccacgtatttatttaaaacattttatatgtattggtcgcaatcaaattgaattgaaacaggcttggaaaaacggtgcagaaagttattatggaattatgaccaagaattttcctaacctatttcaactggtcgggccaaataccgttttaggtcataattcgattatatttatgattgagtcacaagttaattatattttacagcttattgatctagttgaaaaatctggacagcacgctatagaagttaaaccggaagttcaggattccttcaatcaaagaatacaaacacaacttcaaggtactgtatggcaagctggcggatgtagcagctggtatcaagctgccgatggaaagaacttttctttatggccaacttatacatggaaatattggctagacactcgtaaagttaatcctgggactgttctaaattttgtgtaa

SEQ ID NO: 47327 - DNA, 786 bp, Acinetobacter baumannii
atgcaagtcagtaagtggattcggattttcttagcagtcattggttcaattttatttttggacggcttatttctagcttttctaaataaaattcatgtaggcacacttgttcctttagttttaggagcattcttctgtctttatgcattattttattatcatttagaacggtttttcttctatcactatcggcttcatactctctggcgttttgggtggttgtgtttctggatttggttaattggcttaggctatttttttaattttattaaagaaaataaagacgcaagtcaaaatctccccgcagttaaagcaattattgttttaggaagtggtgtcgaaaatggacagccttcagctattcttgcaaagcgtcttgacacagcagcgccagttgctctttcacaaccgcaagcaaaggttattttaacaggcggtttagacttttccgaaaaagaacctgaagcattagtcatgtcacgctacttggaacaacattttcatatagcaaaagatcgaatgatccttgaagacagaagcacaagtacagaacttaatcttaaaaatagtaaacctttacttgaacaagttcatattaatgctaatcaacccattgcaattgttacaagtgacttccatacaccacgagctgcagctattgcaaagaaacaaggctatacacaggtttatatggtcgctgcagaaacacctttaattactcgctacaacgcttggctacgtgaatattttgcgtacgctagtggctggcttctaaacgagtattaa

SEQ ID NO: 47328 - DNA, 390 bp, Acinetobacter baumannii
atgtctgaacaaacagcccagcgtcaatattctattggctggattatgttgctcgctttactcacggctttagggccattatccattgatatgtacttacctgcgttgcctcaaatggcccatgattttggggtgagtacgcaaatggtagcaaacacattgccagcttatttctttggtttagccattggtcaactggtatatggacctttaagcgaccgtattggtcgaaaaaagcctctttattttgggcttgcgctttatgcagttgcaagcttgttctgcgtgctcgctacaaatgaatggagcctaattgctgcccgtattttacaagccttaggtggttgtgtgggggggttatggctcgtgctgctatacgcgatagattag

SEQ ID NO: 47329 - DNA, 2142 bp, Acinetobacter baumannii
atgatgacaaaaataaattaccagccttggctacaggcggtcttaactattgctaaacattatcgaatagagccttcagaagaaagaattcgtttacaacttgattggaaccaaaatcagaatttagataacgtcttgcagttaatgacacgtcaagtcggtctgaatcttcgtaaggcaccattttccttagacttactcaacccatggcgtttacctgtcatggtggagtttaatgatggtcaagtcggtgtaatcgataaggctgatacccaaggaaatgtgagtatccagttcagtggagatcagggcctttcacaaagtttatctttagacgctttaaaaactacacttaaaaatgtctatatcttgcgtcctgaaacgtctatcccagatgcacgtattgacgaatatatcaaaccttatgaagccaactggttctggtcaatcgttttaagagactggaaacgctacgttgatattatgtttgcctcgctgattgccaatgtgctggcactggcaaccattattttctcgatgcaagtgtatgaccgtgtggttccatcccagtcaatacccactttatgggttttggcgggtggtgtactgattgccgctctttttgagtttaccttacgtgtttcacgagtatatttatccgatattattggtaaacgtgctgatttacgtgtgtcggatcgtgtatttggccatgccttaagaattaaaaataaagatcgctcaaaatctacaggtagttttatttcccagattcgtgaactcgaaggcgttcgtgaactggtcacctcaactacaattagtgcgattgccgattttccgttctttttcctgttcttagtaatttttgccattattggtggaaaactgttctgggtaatgttacttgttgtgccgcttatgatcttgccaggtattttggtacagaagaagctggctcaactggcacaagaaggcatgagagaatcttcaattcgtaacgcaattttggtagaagcggtgcaaggtattgaagacattaagctcttacgtgctgaatcaagattccaaaaccaatggaaccatatgaatgaagtctcagccgacatcggtatgagacagcgtaaaattgtgggtaccttaatggcttggacccaaatggttcagggtttaacttatgccattgtggtgttagtgggctgttttgcggtaatggacggtgaaatgaccacaggtgcgttagtcgcatgttcaattttatcttcgcgtatgttagggccaattgcccagattacgggcgtattaggtcgtttacaacaggcaaaagttgctaagcaaagtttagatgagctcatgcagcgtccgattgatcaggccgaccgttcacatctggtacacaaagctgttttaaatggcgactatgaattaaaaaatatcttgttccaatatggagaagaagatccgagaccaagtcttgcgatccgccatttaaaaattcgtgccggagaaaaaattgcgattttgggtcgtaatggtgctggtaagtcgacattgcttcagcttttatccggtatgcaggttccaactcagggagctgtgcatttagatggactcgatctttccttaattgatccatcagatgtgcgccgagatatggggctactcaaccagaatgcacatttattctacggaacaatccgtgaaaacctgactttaggtgcaccgcttgcaacagatgaagacattcttcgtgcattggtggtaacaggtgctttatcttttgttcaagagaaaaaagaaggcttggattacttggttttagaaggaggcgttggtttctctggtggtcagaaacaagcgttattattggctcgtttattgattcgtcaaccgaatattttattacttgatgagccgacagcagccattgatgatgttgcagagaaacaattaattgatcatctcaaaggatggttagcacaccgaacattggttgtggcgacccaccgccgagctgttcttgaactggtggaccgtattattgttgtcaatgaaggcaaaatcgtgatggatggaccacgagatcaggtacttaatcaatctacagcccaacaaaaacaagtgagccaagggggcaattcatga

SEQ ID NO: 47330 - DNA, 1014 bp, Acinetobacter baumannii
atgcagaaaccgacccgtcgcggcaacgcttggcgtattgaagttcgttttaagggcaagcgctacgctgccactcgtgacacagcaagtgagtgtgaacagtgggcagcaaccaaactattagaattacagtctgaacaaccaacatcagaacctgaaaaaatccatatttcttttcaagccctttttgataagtattatcaagatgaaggtcgcaaaatgaaaagcgcccgtttaattgtgcaaatgcttaaatgcttaaagaaaaattggggcgaacttgcagatgaatctatacacaacctaactcctgccctagtcaagcaatggcgtgataagcgcctaaaacaagttaaaggtgcaacagtcattcgagaaatggctatgtatagttcagtttttgactttgcaagaaaagaactatttttaactaaagaaaatccattcaaagaaattacaaaaccttcagcaccaccgccaagacaccaacgtattagcgatgaccacattaataaagtaattaaaggcttggattatgaatggggtaaaactccaacacagccgagacaccgtgtagcatggtcgtttctgttcgcacttgaaaccgcaatgcgcaaaggcgaaattctaagcgtacaaaagtcactaatctttaccgactttatccgattattagacaccaaaaatggctcgtcccgtgacgtacctctaacagctaaagcaaaagaaatgctttcttggttgccagatgatccaaacgatagtcgtatggtgcccttaacatcaaacgcatttagacttatttggcagcgaaatttgcgccgtgttggtttagatggtgtgattactttccatgattcaagacatgaagcaatcacacgctttgttcatgactatcgtttgcctgttgagattcttgctaaaattacggggcacaaaactattagtgtactggtaaatacttactacaatccgaccgcatccgaaattgcaaaaatgctaaacgctgcataa

SEQ ID NO: 47331 - DNA, 195 bp, Acinetobacter baumannii
atgaaacaagagttaattaaggttcacgacttagcgaactctaaaatgattgatttactggcagagtttgacaaaaacggcgaagtcacaaaaatgtttgactataacggaaatgagttaaaagttaattttctgcgtgatgaagtttattataaaaagatatggtggcacttcgataagaagcaacccgtctaa

SEQ ID NO: 47332 - DNA, 543 bp, Acinetobacter baumannii
atgtcagtagataaatatattgatgaccttatcaagcgcgaaggtggttatgttaacaaccctaacgaccgtggcggcgcaactaattatgggataactgaagcagttgcacgggtaaacggttggaaaggcccaatgcgtgatctgcctttagatttagcaaagcagatttataaacaacaatattggattaatcctcgttttgaccaggttaacaccttatcacctttgatcgctgaagagttgcttgatactggtgttaactgcggtgtagcttttgcaaaacctttattgcaacgagcattgaatctattgaataaccaaggtaaaggcggttggcccgatctagccgttgatggtatttatggttcagctacgttaggggctttaaaaatctttcttgccaaacgtggtaaagacggtgagaaggtaatgcttaatgttctgaacatcatgcaaggccaacgttatattgaaatatgcgaacgcaatcccacgcaagaacaattcttttatggttggatcagtaaccggatcacataa

SEQ ID NO: 47333 - DNA, 372 bp, Acinetobacter baumannii
atgaacgaccctttaacaattaaatccttatcttggtttatcaagatttgggcggcggtgatgggcggcatttttgcgctcatgttgagtggtgatattgatgttgaaggaaagataaaaatcaacatcggtgtgattatcaaattcgcaattagcgtttctatcagtttatacggcggttcagcatttattgaatatcaagattgggggcattactcgcacatgacccaaggttttgtaatgttgatttttgcagtatttgggatgttgcttattggtatttggtaccaggcgattcaattactaaaaggcaaaaccattagcgaattaatctttgaaatcaaagaagcgttcaaggctatattcaagtag

SEQ ID NO: 47334 - DNA, 258 bp, Acinetobacter baumannii
atggtggaatttacagcagaagagtgtgttgattacttcaataccttactagaagtacgtgaagacttcaaaaatgaaagcggattatatccaaaatatttaatccaaaatgagtcaaacatgcaaaagcttctctgggggatgaactatatgggaacccctccgcgtgcgaatcccgagggtacgactaattacttttttggagcagagctaattgtaggggataacgaggggttttatataagcttgcctgaataa

SEQ ID NO: 47335 - DNA, 2772 bp, Acinetobacter baumannii
atggctgtagagattacggccttttttattggtgtttttatgactgtttctatttctgagcggcttagtcctttgtatgaaggtaacggcattaatacacgctttgattttacctttcgggttttcgatcaagaggacgcaaacggtgtttcagttaaacaccaagtaggtgctgattttgaaaatgttgatgagagcctttatacggtaacaattagccccgacaacttaggcgggtatataaattttttaaccgctcctgaagttggttttgaattttacattgcaggggaaacccctgtagatcagctattggatatcactaactatgataatttttatcctgatgctattgaacgctctttagataaattaactgctatcttacaagagtgggcgcattcattggggtttgaaaaattatcacgtgaaaaagcccttgagctattaaatcttgcgttacagaatcagattcgtgatcaagggcttgccttagatcaaatagatgcctttgctcaggaccttgcgaatagactagaaacaattgttgtcgaaagagggtggttagctgaattagttgcagatggcgatgagaaccaaaagcaaattaatgaccggataaaggaaaagacaaattggcttgtgacagttgagcaattcggtggtcaggaaggggctgataactcaataccattccaactggcatataactacctgcaatctgtaggtggtgggactcttacttccaatattcgtcatcataaaattagtcagactgttaagtactatgacaacatcacaacagatttaaacttcgctgaagtagaaattttggcgggtggtcgtttttctggagctatttacaatgcggatcggtccacatctaccgcgcctattcttgctgaagtctattataaaaatcagcaaagtttagatgcaggaaatcctatttcacgcataacagttaacgcattaagtggtgcaacaagtgttgtggttgagagtgctgcaggctttcaagttggggatttaatcttctttaacaacggctactgtgatatgtggcgtgtgatggagcaatatgaaggttcttttcaaaattgggtaaatgaggatgtcgctctgtggcgatgcgaaatccagaaaattaaaaatattgttggtaatacaatatatcttgaatcacagctttcaaataactatctaacagctgtagagacgtacggttttttccctgatgagaataatagagccgatcatcagggatggaattatgctcgaattgaaagacttggcggagttagtaactgtacttttaaaaacatcaagttcaaaaataatggagcctcagtaagtttattagcatttttagctcaaaatgtttttactcagtactgcacatttgaaggaactggtcagggtgttgattatgtgacttgttataacagtcatattttgaattgtcacagtaagactgaaaactttgggcagtctatccgtcgcggttcctcaatgtgcattatgaataatgcaggtgcagactatgtggcgggggattgcccacttatcatctgggaaggatcgcatctatgtattgctaacaatattgttgcagacaacacttcgatttttgaagctcatgcaaaagtggggttttacttcaactcttgctgggattgtgtcggttccaattttacagcgaaaaatgtcaaagatgcggtcggtatcatgttctgccgtggtggagtaacagcaacaaacataactggaatgaattgtgacaccctagttaaagtttatgcatcttatgatgttttagggaaaaccggcagattgcgtgggtacggaacgcaagcacgtactgattatacagatgtgttgtttacagtctcccaggcacataatgctgtaataaaagatctgagagattctcagaaatatgatacatcaaaagtttcgggccgtgcccatatttacaaatcctttgctgtagaggtttcaggagttaaggcccgtaatattattctttggaatagtgttgatgatgataaaatcattgatccgacagagtttaagatgaaggttaaagactctaaattcaaaaatgttcatattcagcaaacctatgctgcatcccaagcacaaacacggtcaacgacattaagtgatacagaaatcatctctcaactacgacttgattacattcacaacactttaatgactcgggtcaaggtgttgggaaacaatacagatcgatctttaagattgaccgtttcacacttcaataagttggttgattgctacatcaagaatgaaacgaacggaattgattttctgggaggaggcgcagcaggtaatgagaaccatacaagtcttatttacttgcgagatacttttgttgatgcaccaactaagttcttaaattatgctgatccgtccgcaatgttgctatctggaaataatatggcgacaacatcacgcgaaacagcaaaggtatctgttttaaccaactatccaaagttaaaaacattcgcaaatgttggtcgggcgggtagtacagcttgggtacttattgaatctacaaatggcgcacctgttgttagcacaactactgccagcctttcttcagcagcggacccaatcaattcaggtaaatacctagggcgggaggtttacaactcaaccatcagtcaatttatgcggtctttaggttctacctcaacatcgcagtggaaatcgtcagatggcgccacaacaattacaccagtatag

SEQ ID NO: 47336 - DNA, 381 bp, Acinetobacter baumannii
atggtggataattacaagacaactttatttaagaataatattgatgcttttgattttatatcaacaatgtcaaatattaatatagagatcggcagtattttatgtgggatagtggttaaaatctttgacgatgatgaaacacctaaatcagtttctataatgttggcgcaccctgtggatacaagagtagcgtttgcagaacttgataaagaacaggaaagtacgttacaaaaagatgatttagtttactgccgtgttgagggggttgatgaaagctacgaagatatgactgtatttattgttgcagtattggctatctgcaaacctgaattaacacctaaaggaatattggaatttaaaaaggtttttacgaacacgtaa

SEQ ID NO: 47337 - DNA, 528 bp, Acinetobacter baumannii
atgaaattattcatagcaacattgtttttaatactgtttcctataaacgtatttgctaaaactggatatgaaaatgttcttacctttaatcaagacggctggagtcttcagaagaccccaacgggattcgcattagcatgcactgcttgtgataatcaggttatgatatcggtagatatggtccccattaataaaaataatcagcaagtaaaatctaacgaaacctttgttaattcccttgctaaagagaaggataaggttgctgaatctttcgctaaagagtccgtaatgggcggtaaagtaaaagttttgcgtgctgataaagtaaaaacaggcggtaaggattcatttagatatatgttcttagcagacatgggagttagcggtaaaacctttgataatacatcaatgttagtacataagaataagattatcaaaatcacgcttaattattttgatgggtatttttcagtaaaagataaaaaacaggtaaataagttttatagttcacttaaattcactccttaa

SEQ ID NO: 47338 - DNA, 189 bp, Acinetobacter baumannii
atgaaaggctatgcgtttaattggcaaaaatttttaattttgattggggtatcctttggtttcggctttttagcaatgattggaacagatgaagggctaatgtactatttaaatacctttagtatgtacgatgctattctttgtatatttgttttttcggtaatactcataattagttttgaaaagtag

SEQ ID NO: 47339 - DNA, 2508 bp, Acinetobacter baumannii
atgagagcagaatgtcgtgagcaggttgcccaagcattgggtaagaaaaaattaagtgctgcggatagtaaccgaatttctcagttgtatattcgtgctaaaaacattcttgcaagaactgaccctgattggcttttaaaaagcccggctgaaagggctgaagctattactcaaaaaacggcaagtgatttatctattcagattgccaaaaataatcaaaatattgcccgtgatgctattttaaaagcgcagttagagcaggaaatttataaccattctacattaaaccctattcaggtgttgatgcgtaagatcgcctatttctctgatcaaagcggaatacagtcagtagaaaaacaagcccaagcacttcacagtagatggatgtctttagttgctgatgtcttcactaaaacccaagaaagatggggattttcagtaaataaagaaatgaccgacgatattattcgtgtcatgttcggtggaaagtccgataatccagaaatcacagcaatggccaaagaggtcagttttgcattggaagaaatgcgcttagcttttaacagagcgggtggaaatattcgtaaactggataatttcggcatcatgacatctcatgatcaaaagaaggttgcgttatctacagagcaagaatgggtcgatgaagttcttccaaaattagaccgtaatcaatatgtccgagaggatggtctactgatgagtgatagtgaagtacgcactatgcttaaagatgtttaccggaccattgctaccaatggggcgaacaaagttttagatgggcgcaaaagtattacccctgttggcggccgttctaaaatggcaaatagacaccaagaagcccgtgcacttcatttcaaagacggtgattcatggcttgagtatcaggccaaatttggtacatacaatgaaacgggtttccatgaaatattaaaaaatcatacgcatcggatgagtacagaaattgccatgatgcagaattttggctctaacccgcggttgagttttgaaaatttattagaagaggcaagcacgaaattaaaagctgatccagaaaatggcagcaaacatggcgaaattgataaacaatctaaacgtgctttatctatgtacaacactttggatgccaatactagggcagttgattctaccttgggaaatgtaatgggtggactacgtgcattaatggttgcttcaaagttagggggcacaactctaacagctatcggggaccatgccagtacaaagaaaatagcgaatatgctagggctttcctatacgaaatcggttttacctgagtacatgaagcagcttacacaaggtaaatatcgagatgaagcacttcgttttggtcttggtattacagagatggtgggctctacttctcgttttggtgatgcagacgtagtaagtagtgcaactaaagcaggtcgttttaatgctcggatgcagcaactagcatctacaactttgaaaatttcaggattaaatgcagttacagcgggtatgaaacgagcgtttaatttggtccacatgaataaaattgcagaaatgactcgtagtacccattggaaagacttgggtaaagatgatcttaaaattttaaaaggtaacggaattactgaaaaagattggaatttatggcgggagttaaccccatcaaaaagagaggatggggctattgtgctaacccaaaatgatttctttaatgcacctgatgaagtgattaagaaattcttgccaaaagacaaacaggatagtcctaccgctattgtagattatcgatataaagcagcaatgaaatatcagactcatatttttagtgaagagtcagtagctgtcattgaagcgggagtgcgtgagcggagtattattaatcttggtgatgcaggaactatacaaggtgaactaggcagaacactttttcagtttaaggggttccctttggcttatatgttaagaatggggcatagagcttttgcacaaggtgtcaaaggtagatcaacgttcattgcatcacttattgcttaccaaacattggcgggggcttttattgttcagcttcaaaaccttgcaaatggtaaaaatcctgaacctgtttttacccctgatttcttcctgaaatccgtattaaaaggcggtgggctctcatttatgggggatttaatgagtgcactatcagaccctacagggcgtagttttggggattttgttgcaggtccattagtgagccaaggtggtaaacttggtatgttactaactggtatgggtaataactttattgaaggcaaagaatctacaaggatgatggaagttgcaaatactttgaagggtaatttaccatttcaaaacatatggtacagtaagctgataattgacagaatgttgtactctaaacttcaaaacatgattgaccctgactacttaccaaaaacacaacaacggttagaaaatttgggcaacagctattggtgggatttaagcgaatga
